United States Patent Application Publication US 2014/0230087 A1 - sequence listing, part 17

SEQ ID NO: 12044 - DNA, 8735 bp, Vitis vinifera
  Intron number 4 from transcript GSVIVT01031525001 (locus G SVIVG01031525001) derived from phytozome v7.0 (chr-ID chr6 ; pos 17624637 to 17633371)
caggtagcaccattttataaccttgcaaagatatatcaattttagcagctagcatgtgaacatttcctctgcataactgctcttttaaagggatcctcttttctaatggtcagatttagagattatttggtaaaatttccaattctcatttatttattctttttccttaaatggtagtatttcaaatatttgtgttgagactacattgcccatgcagacacaaatgttgagactgtgtgtgtgttttgggatggagctcttgtgtgtgtgtgtgtgttgagactctctctagggttttgatgcctagctattgtattcttgttacctatgtgtttatgctatttctatgaatatttatttcagtttagcttctagttcatggaaatacattaggtaaatctccaactaaattgtgaccgaatcaaactcatcaaagttctctgagtgcaaatttgatattcaaagcttggccattcttcctcacccactcatcattccagtgatccctcaaaacatttcatggttcaatcaataaaagtgttccttgatactcctcaagtctctcatcttgtgtgtttcctcaagatatctaaggtgaaaactaaaatagcaatttagattggtcataattggtactcaaatggactatggaaaggttgtgtataaacctaacttagttttgaacaatgctacccatcattatccataacaatcttgtaatgggtctctgaatgaacaaatgtttcacaaatttttctagttacagcttgtcaaaaaattaatggattgttcctttgtatcatttatcctttgctctaattttctttcctttgagaaattttagggtaggtcaaccaattgatccaacacctttgtagcaaaccgctccctcccatgtagatatttattttggcccaatgggtcctcacatttttgaaacacgtttatacaactaagaaaagtctactacatatatagtactaaggactttttaccttgtctgatgttggatattatagtcctaattatcaattgacacgaaatatgggatgaaaaataataagttctgtatattagattaactatacacacagtttatataggatattacaagagaagaaataggaaacaagagacataataggaaactaacttattcctaactagcttattcctaaatcataaaactatctatttacagaaataagaaactaacataataggaaaataattctcctattctatttacagctcaacactccccctcaagctaaggaatagatgtcttccattcccaacttgaatacaagatcgtgaaacattaaactgttcagcccttttgttaggatatcggctaattgatgttctaatggaacatatgacatacacactactccttcctccaatttttctttgataaaatgtctatcaatctcaatatgttttgtcttatcgtgttgtatagggttatgagcaatattgatagctgacttgttgtcacaatagagcttcataggaccatcccacttgattctcaagtcatctagaataattttcaaccaaagtagttcacacaacccttgagcaatggccctaaactttgattctgcagacgaccttgctaccacattttgctttttacttctccatgttaccagattacctctaagaaaagtacaataccctgtagttgatcttcgatccattagggaacctgcatagtcaacgtcggtgtatgcttctagaacaagagtagtgttcttcttgaacaaaattcctttctcggggttgcctttcaagtaatgcagcaccctataagcagcttgaagatgaggttctcttggatcatgcatgaattgattgatcacgctcatcgagtaggcgatgtctggtcgagtgtgagcaaggtatatgagcctaccaactagcctctgatacattcttttatccgtcactggttcttctttagcttctcccaacttgtggtttggatccattggggtagagactgatttacatccaatcttccctgtttttgccaataaatcaatcacatacttttgttgagagatgaagatcccttgtgtggaatatgtcacctcaataccaaggaagtacttcagtttacctagttcctttatctcaaactttgttgctaatctctacttcacttcatgcttttctctctcatcatttccagtcactatgatgtcgtcaacatagactagaagagcaattacttcccttgcagccgagtgcttaatgaagagagtgtggtcaccttggctttgtttgtgcccagactctttcatgacttttgcaaatctcccaaaccaagccctaggagattgttttagcccataaagggcctctttcagcttgcacaccttgttacctgtgtttccctcaaatcccggtgggatgttcatgttaatctcttcatctaaatcaccatgaagaaatgcattcttaacatcatactgtaggagttgccaattgtagtgggcaaccagtgacaataggattcttacagtattcatttttgcaattggagctaaagtctcctgataatcaactccataagtttgagtgtaccctttggctaccaatcttgctttatgtctctcaagagatccatcaaccttatatttcagtgtgaaaatccacttgcaatcaacaatgttttttccttttggtctttcaacaatctcccatgttttattcttttctaatacactcatctcctctcttatagcattcttccattccctttttgtcaatgcctcaaaaacagtgttagggatgatagtggtgtttagactcacaataaaattcttgtgggctggtgataggtgcttaagagacacatagtgtgatagtagatagagtggtcggttagtgcattctctggtgtcttttctgacagcaatgggaaggtctaggtctaggttgtctgttgagtcaatggaagtttcaccaagttgtgtatgtaaaggtgggtctgatcttaccgtgatttcattcccagggtctgagttggattcttggacctgcttttgttctggactgaccttttcccttaaatacaccttaggaaactgtggaaaattgcgagtgacactggctagaacaggggatgacacgaggtcagtggtagctggaataagggatgacacgggttcttcatcaccatgggttgagacatgaggaaggtcaagaggttcaaaggacttacaaaaactatcttccatcattgaaatctccccctgaagagaggacttggggaaaaaaagtttattttctgtgaaggtgacatctgcagagatataaaattttctggctgagggattataacacttgtatcctttttgagtggatgagtaaccaaggaagacacattttatggctcgggggtctagcttgtctctatgttggctgtggatatgaacaaatgcaatgcacccaaataccctaggagtgagcccatttgaggttttgaattgtggatagaaactcttaagtatctctacggggcttttgttgtctaacactcgtgagagaattctatttatcatgtatgtggcagtaagaacaacttccccccaataggacttaggaacattcccttgaaagagtaaggctcgggttgtgttgagtaaatgcccatttttcctctcggctatcttattttgttaggatgtgttaacacatgatgagtcatggagaatgctctgtgattgaaaatagggtgacaaaatctggttgaagtaatctctagcattgtttatcctaaagctttttattttaaccccaaattggttttgaacgattgagtggaaattaggtataacaatgctaacatcaaatttttgtttaagaagaaagatccatgtaacccgagtgcagtcatcaattaaggatacaaaccaacaagccccagaaacattaggtatagtcgaaggaccccatatgttactatgaatcaaatgaaaaagatgagaacttttattgctaataggaaaagatacacaagtatgttttgccaattcacaagtttcgcaatgaaactcagaaatatctaatccttggaacaaatgaggaaacatgacctttaaaaccctaaaagatggatgacctagatgtaggtaatacaaccaaatggtatctttatttgaggaattgagaaaagacaacaacaaattattactagttttctgagatgattcaaggtggtaaagaccactcctttccttagtaagtctaatcctcctccccgagccttgttcctgaaaaacacaataagaaaggaaaaaaatagcataacatttaagatcatgggtaagcttttgaatggaaataaggttggccgacaattttggtacatggagaacatttttaagaataagggtaggtgtgatgtctatgtctccgaaacctacaacggtagttaaagagtcattggtcactgcatttttcttgttacttgggcttggggtataggtatggaaaagttgagatttggaggtcatatagtctgtggcaccggagtctattatccaatagtcatcataaaccctgtgtgaggcatttatgcaaaaagagagtgaaggtgtacctgaaagagccaaagaacaagttccaataggtttgtcaagggatcccaacaagcttcttagcttctccatttcttcactattgaacccgcctgttgctgaattttcctcagttttgggctgctctgccatgtgtgcttgaggcctttgctgctctccacagtttccccattcacgacttggtggtttaccattcagcttccaacacttctcttttgtgtgtcttggtttcttgcaaaaggtgcaccagagattgtccttgttctccttccactgattgtctctacctaagtgtttaggcagatcattctttccttgcttttaatattctgtttttgctactagggcttatcaatccaaggtttgtggttcaagcataacactccttcggcattcctcgcctcgaatcagtgccaccacctcattaaagcatggaacctcctgcttgccaagaatctggattctcacttgatcaaattctaggttaagcccaacaagaaaatcatagactctaccttgttcaatgaaatcctttagaacagcggcatccttacgacgtttggtttttatcatcctataatgatcaagttctttccacaaagctttcaattgattggcatattcagtaactgttttacttccttgttttgcagcaatcgtcttcaccttaacctcatatacttgagccgtatctctagcttttgaatacatctgttggattgcgtcccaaatatccttagctgtagccaagaacatacatgtgtcgctaatctcaagagtcatagaattccacagccacgccataatcatagaatctttttcatcccatgcttcaaaacggggatctcctggtttcagccctgtacccataagatggctgatcttccattttccctttcagcacagtgcgaacaagttgagaccatttaaggtcattttttccatccagcctatacgcagcctgaatgttttgcaattccccaggatgttgagatcgaacaatctcctctgattgtgttgtagtagtcgtctctgcaacctccaacatcttccacgaaaaaacctgatctcttgggaattaaggtagatcgcgaaataaaaaaaaaacagcagcaatgaaggctggtaaaagaacacgtgaataaataaaaaaatccagctatgaaggccagaaaaatggcgatgaaggccagaatgatgctcaggtcttaaaaacctacaactcttataccatgatacaaaatatgggatgaaaaataataagttctgtatattagattgactatacacacattttatatgggagattgcaagagaagaaataggaaacaagagacataataggaaactaacttattcctaactaacttattcctaaatcataaaaatatctatttacagaaataggaacataataggaaaataattctcctattttatttacagctcaacatcaaccttttaggtctcttgaaacaaatgtgttcaagtaattttagactcctatgaactccacttgctagcttattgatggcccatggtagacaggttatgcaaagatcattgtgcatatagataccaccattttccttgcaccttatacactatatcttagttccaagattcttctatatgagctggagctgctgctccaggaccttgattccatgcttgttattcagagtcttgaaaggcttgcattctcttggacacaagtttgagccttcatgattgaacttcaaactaactgaagacgagttagaatgatcaagaaatagaaagtaaataatttttttcataagaaaataggaaagggcattacaacagcttaggaatcaaaagtcagaaaaaaaactgccttcttcctcaaaattgttaaatcttgaacaagagaccatctatctaattattcttgttctaaaaacttataattcctccctgaacctacttctgcattggcttccacttcatgcttttaagctccctccatttcccatggcaagatttatgacagattcaaagcattttgaaaccttagtattcttttccacaattcaatacatatacaatatatatgacagagacaaatatgacagattcatagccttttgaaacctcagcattcttttccacaattcaatactatatatatatatatatataattcccaactgtttttgcaccctatgctcatctggagttgtctaaagatcattttctgtcttcatcacagcatgaagtatccgtcccattaacatcacacaacctgccttcactagtttcctctttttttggaagaggagttggtgcctctggaccctgtttttcttcatgctaactcatgacttcatttgatgaggcatttctagtgaatcttggaaagcaattttttcccccatttttatacttaatactgtttctatgaaaatctatgatagcttctttgtttgagggggaccttgttctacagggttctttaattctgttgtacttatcctaatctctaggaaaaattccttgattcttcaacttcaatgaaataggactagttaccttcattggtatactgtaacatttggatgaaatataatcagagtcaaatatttcttattgattcctatcctttgagtaggtcatttttttttttaatgccatttcgtgttgtacaattcctttgtttgtgggattcttttgttacaaacagtaatgaaaagaaagaatggattgctacctatgcctaggccgccgataaatttgaaattttattgataggatcttgttatgaataactcccgacaactttagagaaaaagaggcacttacctactgtagagatggtgcaatttgacctttcttttttttatccgtgctccttggtttaggttaacaccaaccacaaactgaactgcccaagtttgataaactgatgctgaagctgaactgtgctgaccagtgatgaaaaccaaaccataccacaataaaagtgggcttggtttgactgctctagctgcataatattcttttttcaagaacctcagacaaatgaataggtgcatgcttgcagtgatccaaccattaccctctgaccttgcagcaataccagcacataattgtatctaaccaaatgtcaatttcaaagtctccaaacaagcacgaataatggtgcatcatctgcatgtctttaaataaattactagtcaatgtggtggtctattattaggattagggcatgtgacatgagaaatattatgctccaaggacatgcctacatttggaatagatcatggtgcccatgaaccacttaatttaagaatctatattttataaacaggacaaaattttcttttgtaatttttttttcccatgtctctttgattgtttttaaacagggcctttgccaattttcttttctcatgaattacgccatcacactcactagtatcatgttttttattaagtttattttaaataaacaccaaatttccagatgaagttatcaataaatgattcatcatgttggaaagaagccacttcattgtatactgtcaaatttcccaggatataaaatagcagagaatctatgttatggagttccaagcattctatcttctttcaccatagcagggtatgcattgggatgtcatacacatggtctccaacaatatggcatgcatagacagtcagctagataggcactggactcaatgtcaatgagttttttgccttctcctagtgtgaaacataaaacactgatcttgtcctcatcagccacaggataagctggtggtctcattgtatttgcactatttaaataactccagaacttcccctgtgctctgaacttataaacttagttcatctttatgttcagaatgatgttgctatttggttattacagccttatgggttatctctatccagaaaggagatttatctgatgaatttcctttctccatttttgtttttgttttttttgttttttgtgtgtgtgtgtgtgtgtgtcacaatacatgatttttggaagaatcctgccatgcacttgtatctttctccttttttcctctgagaaattgttttcacctttcagaatccgagaaaggaaggaatctgtaacagtgctgt

SEQ ID NO: 12045 - DNA, 4818 bp, Vitis vinifera
  Intron number 7 from transcript GSVIVT01008355001 (locus G SVIVG01008355001) derived from phytozome v7.0 (chr-ID chr1 7; pos 2924612 to 2929429)
ccatttatccacaagaacgtgctcgcattcagaaggtaggctaatgtgcatgtgagatatcttgcattgttttattttccccctattctcttttacagaatgctacatatatggtcaaataattatagaattgtaatttacatatggacagctcaatttgtttgttggtaccattagaagctaaaatgacattgatctaaatgtcatatttcatatgtcaaaaaattagtggaaagggttatcttttgaataatatttaagccttaataactattaaaaagcaaactgaactcctgaatggcttgtgcttggcttaggaagctcactcaaccctattgattggtgaaagatccatgttcaagtgcaaattccaagcttgagttctttaccagccatgcttgagagtgacacaccaagcttcattaggcttgtgagtggttgaaatagtttatgcagtagtgataagaaaaaacctcttagagtatgaattcatatggaagaaaagatgccaaataatctaaagcaagtatgataattaatcaattaagcttctggagtatgctgtagtcattaatttgctctaataaaagtaggagtgttgggctttgactctgtaattaatatgtggttagcttaatggacaaagcttagttgggcggattaacatgattgagctggtccaaatctgcatgaaaaaagttggaaaagggtagttgaacttggatgagattgactctagcttggttcaggtcaaaccaattggaatatgttcaaattctcatttttgcttttggctgattgctcccctattatactttgatcctgaactacaatgaattgcttctggcatacttctctctcacaagtcacatctcatactgtctgctgcttcttttctctttttcttcctcccttttttgtcttcttaagactagcaactgtccttccatattttatgttgtgcttaatttggacaattttttttttccttcattttttttttgatcagcaactagactaattgaatcaaataatgccaagggggtgtaccccaagtacagtgacaagctacacctaaagttaaaaaaaaaaaaaaagttaacatgaaaacaacccatggtaccaaaaaaagagaaagaaaattttcatctactatagattctattgtctgcccatcaatgttagcaggacatttcatcttcatcactctacctatcaaaaagaaaattcatcttcatcaccatgagttcaaccaccctaaaaattctatatgcttcttcctgttacacttggccacacagaggggcatatcctcctggcctttctcatgtttatgcaagcaaccttgcatgccaacttgataagatctcccctcactgttttctggaccctagctatgtgaaatggtgggaagaaaatcatagactagagatcttaggacactggataatggacaactaatgccttttgcccctacaacgtcaaatcttaagaatcatcttataagcgaatcaatggttgagatccttccctaaactgctgctgaaataaagaaacacctttgtaggggccaatgaccccaaaatcttttcccctcagaacgtatcatcttttccatgagatatggccttgaatgatttttgactagaaattgtatgtactaggttctttttctgatcaattctgtccatcctctgattgaccgccaacctataaatatgatcccaaaaggaatcaaccatctccagctttccagtgtcctggggcctttgtccaacacttataaaccctatttgggaaagctccttaaatgctaaaatttgtatctgaccctgtatatgtaacttttaagtatgttttcatagaactctcaaatattgatttcacagttccataatatgatttatctacattttagaaaagcagtgagacccctattttttctcaaacacaatgtaagaaacagaattttatttaattaaaatcttaaaatatcaaaattatccatatttttaatagaagcttttttaaaatatagtttacagatgcaaaatcaattgcacagtaaaagtagttactttttctaagaagtagaagttaaaaatctatcccaacagaatgtagtctagtaattggggttgcgtcaatttattctctaagcttgtattctgctaatgtggggtggcctctctacttattctcgagggatcccaaaactccaccttcaatggatgattcccacactaaatttcacaccagatttcacacttttgctcttccccactatattatgaatggacttcagaaaaccttcctaccttgttcctagtattcatcaacagctccgccaacaaatgtcactgtcactttttctccctgtatttcctcaccacttctttccttcacaagcgatcctttttccattagaaaccttcaatgccattttcataacagctcactcactccatccctttcaattttttcgatcttttcctcactgtagcctcatcaaagtctgcttgctaaaggcaaacaaaaatgtcataaacttggtaagattcttttaataagggttaggccctatttggtatctattttcaaaaacagtttttaaaaatgttttataatgttttgtaaatcaaaagtttatttgaaaacctgaaatatttttaatcagtttttaatatttttaaatatattctaaaaataattttcttatctaatgttttatttttaatcattctacatgtttgtataattattttttaaaataatcataaaaaaacaagtgaaaacaattaaaagatattttctgaaaacaccctattttctaattgtcaaacatgctttccccccttcttttttttttttttttctctggagaatagaagattgttcttgaaaacaattaccaaacatgctgttaatctctcttttgaaagattctaccttccctgactgaccaaacaccatgccccaaaaggaagggccaagattgtagaaggcaaagttcttattttgcattgcaaagctgctgctaatctttaaaattgtccatgagctccatgagaatgaggttgcccctatccaggttgaccttcaaatccaaaacttccacagcactccctagctctttgaagaaccccttctatcagagatagagtgccagacctagaagtgtagtccatgttgatactctccctaaatgctgaactaaaggcatgtagggaatatatcattgaagtgtctgtttctttgtccaaggaatttatccaatgaccaaaatgcgaagaggaatagaacccgttcttattcatcaccttcaaaaccccacccagtttccattggctacaacccgatgctgcaaagttccactatctagttctggttataaaaaccatttctttcaaccaaacacttttttcatgaagttgtctttggtcaagcaaggatccatgaatgttgcacctcacctcttctttcccaacataagcttggactctccacaaggcagctttccatctttgccatgttcaagaggcttctcagacattcctatgaagtaatgcttgtccccatctcgctcatctcctgtggcttctccaaatactaagcactacctttatcttcatacaccccccaaaaaaaaagtaaaaaagaaaaaatggtttctgaatttttaggtcaatagataaccagtccaataattccttcccattatcaatgaattttttcctatcatctgcaaaaactaatcattggacttatctacctccctggtttttgccatcttcaaaggatacagccaacctcaccctggttagacaactatagatgctccaatttccatctaccctctgtctaaggcaatccactattcagctggagctttccctccctaaacttcctccattgtgaatgccccttgtcctttccacaatcctcggataattatagatttcaccatgagcttaggcatgtcaggtttcttgaatgttttcaaatcaacctctatgaggcccctctgcatcacaaaacgcaaacccttttgcttttcccttcagataatcctcaaatgatttggcttgatgagcttaggtatatcggcctcttaattgttttcaaattgacctgtattattttcctctgccccaaaaagccccaacgctttgtattttcctgggtatcctgtggaatgacctttccttttatttctctctctctttctctctctctctctctcacacacacacactgaggatttcatgaaaaatcctataggccagactctgactggtgggtgctgaacccacatatttctgatattactagtgcactaccctgtgttttccatgtagcatttaccaactaaacacccttcattgatatgacttgataaataagagctaatatattgccttgttttgcagtttaaaacaaattcttttcttgccccattttttttccctatttctgctatacttaagatgaactcccattcctttcctactaattggggaaaaacaacccttcaaattaaaggataataacaaacaggttagaaatcaacataaggatgatctacaggttgagcagtccagataaaaatatggaatttctataccatacataggctgcagtcatttccagaccagatatagggacatagtcactatattggatctcttgtccatcaaagtattttttttgaccttatagattttaacttagtactatctggatttgcttcttttcaatttatatgcttctattaacaagcatactttgctttctaggctggtgggtctgtgagttcaa

SEQ ID NO: 12046 - DNA, 10536 bp, Vitis vinifera
  Intron number 5 from transcript GSVIVT01026296001 (locus G SVIVG01026296001) derived from phytozome v7.0 (chr-ID chr4 ; pos 12956517 to 12967052 reverse strand)
gtcggagaggtatgttaatgagtccatggaatttttagtaattctaagatatttactatttgcttataaatcttgaatggatggttctaattggtttaacataatctttcatataacactgctatttttttttttctttttggtgcttaattttacaaccttaggaagttgtgatcacagttggatcagcattgtcaggagagggattatttttttgcacgatgtgtgaatttggtgggattaaggagcagtcagttcaatgtgggatgatgttgtagttggccctagttacttacattagaattttatctggtctattggctcaaactttctttattttcattggtcagtttgtgtgttggtttatgaatgatgttaggtcaacattaggggcctatatataggtctactaatgtgatttaagggattaaatgatcatgagagaatttctaccacaatgagcaaatcacaacttagaggaaatggatccaccctatcaaatgatctgttacctgctccactcttgccagcaggaatgttgctgaattttcttaatcctaaaggttgcttcacaagaattttgagaataggaaggttaatatgtgggtgtgttacagacaatactgaactgctgaaatcgtcttctcgaaggataataaggcctttttccccctatctagtccttttgatgttctttctaatgtatgttggcaccctagtattcccacctaaagtcgagatatgtgaaggctacctagatgctcctagttaatattgagaatgggaaaggtactcttttaattgttggtcttaaggatcgatactagcatattcaaatatatgtcctaatgttcttctatcctattaattcaacctttattttattattgtgaaatttcctttgtggtttctacattttattaagtgagggggaatgatgttggaaacactttttgaagtcttatgaaagaagaggaaaaaatgatttagtacagttggtttagtaatttccataatttttattttattttactttagtagaattgtattcaatagtcttttttagtcaaattttctatttgctttaacttctaatttgctttgagaagaaagttatattcttactaggaaatagagtcttaatcttaggaatgagaatttttagtaactattaaattaacaaatagattctattgagaatttttagtaaatatcaagcttatgtgaaggttttgattgccttcttctaagtgagattgcttaggaaccccaaatgggagtacttagaaaccttggtgtgattgttaaaaattttcttttcctttttagtcttccttgaccttttcatctcattctataactctagaaacttctattgttctagaaatttagtgatattgcatcattgagttagtattgtcattaaaatctccgtaggatgaaaagtggaaattccatgatagcatcatccgtaacattcatgctcacaattgtgaaggagataatgaatggactatttcttgatgcacttgattgacacacctcattattttattcattggaactagatgcaagtgtgaaattttgaattcattcttattcctaaaaaatcaagagatacaacaaagtatatatctagcctccctgtattctaggaaaggataattcatgatacatatggtaattcaaatcaattcaaatgtcatagtaactaatttacaattgtacacaaagaatccgaaaaaaaaaaagtccttactaattcatagttgtacaagaggaatcttaaaaggagaaaagtcctaactaatttatagttatacaagaagagtcctacaaggagaaaaatcctaaattataagacctaaactttcaacactctccctcaatttggtgaatagagattctttattcctaacttgcctttaattctttgaaacgtggtattagctagccctttagtttgaacatttgcaagttagcctcttgtcccaatatatagagtgcaaagaagacctctatcaagcttctcctttatgaaatgttgatcttcctccacaaactttattttggatcatgttgtatcggattatgagcaatgttgattgcaaacttattatcacaacagagcctcatagggtgtgtccacttgattttactatcatctaaaataatcttaagccataacaatttacaaattccattagccattgctttgaactctacctcgtctcttgatcttgcaaccattggttgctttttacttcaccaagtgactagatttcctctaagaaaagtacagtaccctcgaggttcatcttttatctaaagttgatctagcataatttgcatccatgtaggcttccaagcgcaactccatacctcatttgaatgacaacctttcatcggaagttcctttaacgtaatgtatgatccaatacacagcttgaagatgagagtctttgggattcttaaggatgaaaatattagttttgatggttatattggtaatttgattttatggatatattgagaaatattggtggatattgacacaaaaaattgatgaagagaaaattgataaaaacttcataaaaatataaaaattactccaaaaatgataaaaaaaataataataataatacatgtattgaagttgtttgaacaaagaaatcaatatatattgaaggatataaaagacaatatgtatatatatatatatattgtaaaatctaaagaattggaagttaaagaataaatttcttcttcttaaaattcaatctgtacatctccacatatttatacaaatattcctagaccaacaaatggaaacttttctaacctaagtctatcaaatctccttgattatgagattgccctaattctctccttatttacaaaaatacacaactataatatttcctaattacattcttccacactccctctcaagttggtgaatagatattttccattcctagcttggatacacttgcttgaaatgtttactgcttaaagctttggtgagtgtatctgtaagttggtgtttagtagatatataaagagtacaaattaacctactatctaatttctccttaataaaatgtttgtctatctttatgtacttcgttcaatcatgttgtactagattgtatgcaatactaattgcagatttattgtcatagtaaagtcttattgggccatcccatcgaatcttcaaatcttccaaaataatcttcaaccatagtagttcacacactccttgagccattgcacgaaattctgcttctgcattggaccttgccaccacaccctgtttcttacttctctatgttactagattcccaccaagaaaggtgcaatgcccagtggttaattttctgtcaaccacaaatccaacataatttgcattagagtatgcctcaagtactagtcccgagtttcatttaaataatatgccctttcctagaaaccccttaaggtactgtaacactcgattagcagcttggaaacttcttttggactgtgcatgaactagttaataacactcacgacatatgctatatctggttttgtgtgagagagataaatgagtcttcctaccagacgttgatacatccctttatctattgcaacatcttccttagcctctccaagcttatgattaggatctattggtgtgcttgttggtttacacgccaacttccctatttccttaagaaggtttgttacatatttctgctgaaaaatatgtgcaacttcgattcctaggaagtattttaaccttcctaactctttaatctcaagcttcttggtcaagcattgcctcaaagtttgtctctccttttcataatttcttgtcacaatgatgttgtctacatataccaaaatggttgtaactctcctgaatttgaatgtttgatgaacaatgtatggtctccctgactttatttgtatcctatgtttttcattactttggcaaaccttccaaaccacgcctttggagattgtttttgcccatatggagctttcttcagtttacatgtctttttagctgttaggtcacttccaaatctaggaggaacttcaatataaatttcttcttcgaagtttccatgcaaaaatgcatttctaatgtcgaactgttgtagatccaagttatgttttgctaccaatgataacaaaactctgactgtgttcatcttggcaatcggtgcaaatatctctagataatccatgccatatgtttgagtatatcctttagccaccaatctcaccttgtacctctctaatgtctcatctgccctatacttaacaatatagacccacttacatcccactggtctttttcctgcaggcaaatctaccaactcccaagttttatttttctctagagcctccatttctgcattcatggcttgtctctaattttcattagataaagtcttggatagagtggtaggaatatgaatattgttcaaacttgtaagaaaactcttatgggatagagacaacttttcaaatgacatatcatgggaaagtggatacaaaggacgtttagtatattcccttgttcccttcctaatggcaattgggaggtttaagtccatgggtttttcaaattgaagttctaagtttgtaagggacaatgagagaccgttgcctcatttctagaagttggtttggattcttggacttgtataagttgaggaactgcaactttcttccttgagtacactttgctagtcatttgattctcaggagtagattcaatgggtgacaattgaagttcagacacaggctcaacgagcacaagaacaggaccagagactttcgaagggtcaatgatgaagggatcaatgagataggaattctgatccttatcttccttgatggaattcttgccttgaagataaagagtgagaaaataagactcactttcattaaaggtaacatctgctgtgacaaattttttagatggtcgatggtaacacttatatcccttttgagttgaggactatcccaaaaaaatgcatttgactgctcttggatccaattttcccctatttgaaccgtgaacatgaacaaaggtcacacacccacatatcttggattaagatggtttgtggttctcatattaggataaaatgatgagagaatttccatgagacttttgaaacctaagaatttagaacgtaatcgatttatgagatgagtggcgattagtatggtttcccctcaataagatttaggcacatgtttttggaacaaaaaggctcgtgttgtataaaggaggtgaccatttttcctctcagcaactccattttgttgtggggtgtttacatacgatgactcatgaattataccttcatgatgaaagtatggagtcaagacttgattgaaataatctttgttgttgtctgatcgaaaccctttgatagtgacaccaaactggttttttatcatgttatgaaaatttgggagaacaaaacttacatcagatttgtgtttaagtaaaaagatccaagagaccctagtataatcatcaatgaaagacacaaactagcatgacccatatatattttggacaagagaaggacccgaaatatcactatgaattaaatggaaaggctttgaacttcttttattattgattgaaaaggttgaacgtttatgtttggctaattcacatacctcactgtgaaagctttcaacatccaatttcctaaacagagaaggaaacaagatcttaagagttctaaacgacggatgtccaagcctatgatgatgaagccaaattttttctgtaagaaggtgatgatcataaagaagagatacaaatgatttgcttggtgtctcaaggtagtgtagtccgttccatattgtagcaagtccaattattttccccaaatgctggtcttgcaatacatagtgagtagggtaaaaaatcacattacaacccaaatcttgtgtaagtttttgtatagaaacaagattagtagatagctttggaacatgaagcacatttttgagtgagtgtaggactaatttggatatctctacacttgtgacagtggtgaaagaaccatcggttgtggctattttcctactatttggacaagggttatagttgttaaattgatatgatgaatgagtcatgtgatctgtggcacctaaaaccataacccatgagttggcaaagatttcatccgagacttttaatccaatgggaataggaaaggattggtgacattcaaagttttcaccaaccacaccaagaacttatgatagaaaagtaacggttcgaatagcatctactaatatcaccgaaaacattgttaaaatacttttatgagaaggttttatcgaaaacatgaggaaacatcaggaaagcaacaaatatttttcggttttaaccttgcgacatagaaggaataggaaaggaacatatagaactattttaaatttaaaacggatcagtcgacctagtctatgaatctattctgactatcaacgaattcctagaattttaggtggtatggggattgtaattctttctacttctagaggtataatgacagaccgagaggctcgcctagaaagaattggtggagaaattttgtgttatatatggtaatccttctaatattcaaattggatccggaactttcataaagacccttatgtccatgccccaaaattctgaattatttttgctcaaaaaaatcaagaaatgcactagaatatatatctagcctcccttattttaggaaaggataattcatgatatacacggtaattcaattcaatttaaatctcctagtaactaatttacaactaaacatgaatggtcctagaaggagaaaagtcctaccaatttacagttatacaagaggagtcctaaaaggagaaaggtcttaaaattataagtcccaaaccttcgacaataaatgaaaatttggctgaaattcctgaaattttgactgaaatcttggtattgtttagcttaataccaaaacaacccatccttattaatagtccattaatcaagggaaaattgctaaattttcacgtagagtaataatatcgtatgtcaatgtcagccatcgtctatttacaatttattgtgatattttttcgattaaaattagaattaaagccttgtaagagacacgacctgaaactaggcctcttttagagcaaatgtcgaccatctcaccaaattgagattgcgtcttgtatatagtatacttccccttaagaatattcactattcttaaggcccactttttatacatctatggtgggattttgccttgtatataatattcttccccttaaatatatttattatttttaaggtcctttttttatgcatccttgttgtaacttctataattttagtaatgattttaaacacgtaaaaaataacattttaaaagtaaaattttttgcaacataaaaataacatattaataaataaatgaatcttaaatatctgtattctcaaattccatcaagctacatgttgtatacataaaaaccaccttactttgagaaagggcatgtttgaactttcaaaaaatgaagagggcttaaaaacttaactattatagatgtaataccaacacatgaaaatgcatgaaaatctaggatgaactcaattatggctattttccatttggactatttctaaatttatgccatttagatgtttgttacttccatttggatttctatttttttttatcaatcatatttggcaaattctattgattgatttcatctattttgttggctagcaatactgtttactgctggaaactctgttgcatcatccccaacatatcatgagacatttgtctcatttcttgccagagtctatccccaagttcttgcaagtccatttgtccacaatacgatctttccatttttgattttcttgtttaacttagtgtcccaccaagcattataaaaaatacatgttgctcatagttttcactgttgagtataaaagcaaactgaacttggaaggaacagttccttactgaagcttgacaattgaatgactgctgctacattggtggctcttggttcagtgacctatacccaaaatctgtgcttctctctgaatcctacttgcccggatatagaggatttcagcaaattattaggaagagtaaagaaaaactcaaaaacaaagaatagaaatgaagagcaagtttgatttatctgcattaagttgatcatagaaaaggttatattttgtttaatgatccattgagtacctcaagactatcagctataattactgctattgggtaagtgatgcaggacaaccctataatggttgtctacaatcaaatagatggcctagggttaaaatcttttaggatttaagtagaggaacaaggaataaaaatttatggtagctgagaaattgaaagaaaataaagagagagagaaagataagaggaaatggaaactatagaacgtcactaaggccctctaggaatcactcttagaaaaaaatcaatagagtctcactattgaagaatgcaatatatgcagaaagaactaatattatttaatcactctatcttggtttacatcaattagtcttatttataggtgtgtctaacaaatccaaattctactaaaattatgataatttatcatgactctaattctaaattttctattatgattgcaataattggctactctgagtttaacttcaacaaatactaatcctaatttaattccaacttaattccaactaatactagtcatttaaagtttatttacttctttccttccttttcttgattagatcttagagattcatcctcgtcagtaagattactaagattactagctattgcacagaatattggctgtgcttatttgttggtaatttgggtttgttgagtagtaggtcacttgcataactgatgcttcttccatttatatttctggtaagttttcacatataatgagttttccatttcttgtcatctttgccacttcctttgccgactgaagccaccttccgtataccccagctgctcccatttctatgctctaggttgaagttagtttttatgtgttagttgagaggtgtgggttgtgaagaggaagtaagcacaattcatgtaatgcttgggttaaatactggtggaaacaagaaattataaaactcatgtgtacatcattttacatatgttccacactgggttcacagttagttaggttggttttcctgttgtctcaactcaagcttggcttttggattgtgttggcttgagttcagcttgtccatgtcgctgctttagcaccaagttaaatctacttctagttctagaatgcggaataagttagaatttttcccctttgttgtgcccatggttgaagttttttattatcgatgggttctagactgagttcagtgacaattgtcaagatcacataatcattttaaagcaaacagcatataattagagagggaaggataagtccccaaaagctgacaggtccagtgtcttggtagtttaaaagtggagatcgacgagcaagtagggtgatttgcaactaaaatagaaaccaatttttgtacgtctaaatatagagctgctaaaataacccctgaaatgtgcattccgaataaaataaccttctttcttatgctatagaaataagcttactgtctttaaaaagttgtgcaaacacttcacctttttttatgggatccacaccagaaattgcatccccagcagactgttttgattttatttgttttatgttatttatttttctttttttcttttccatactttgtatgcctcttaacagttaagacccgattatgaaaattttgttgactaatacggcagcatgcatacctacacttttgatcattctataggatcttttgaatactgaaagtagttgatgtatggaatgctttttctttaaatttttatattaatttaatacatagtatattcgtgctcgagtattctcttgttaggtagtgcctactattttgactgatgatgatccaaaacatgaaaattctttaaccctatatattgaggaaaaaaatagagagaaaaaaaaatgaagaaaaatgaaaaataaatttaaatttaataaattatttttacgtttttttaaactcattttatttatttttacaaagattgaataattttaaaatgattaaatttttaattaattttaattatatatgattttttttttcatatttttcatcaaataaaaagaataattccttttagtatttttttttacccttttctcaatagtttttggaatcaaacataagtagaattgtaaatttattaaatgtaggtattattgatagtctttaaaagttttgatttctcacttagaaaaattcagtaattgcaatttgatttccgtttttgcctcttaacataaataattttgttgtttgtaattggtggtgaaaatgacaaagtctcatccttggcaggtttaaaggattagtgc

SEQ ID NO: 12047 - DNA, 6440 bp, Vitis vinifera
  Intron number 18 from transcript GSVIVT01026545001 (locus GSVIVG01026545001) derived from phytozome v7.0 (chr-ID chr 4; pos 22027003 to 22033442)
caaaaggtttgttttcttgtcattttagcttgatacaaatgagtattctaatttgacacttgttttctgtgctcttatagttggtttcttaggcaagtaatattatgctagagtgcacaggatagtttaattattgagatatgcatcttcgatatgcaacattctctatgtttcatggacattgatatgtgtttagttgtagggtgtgtttaggtgttaggttgtctaaatgccaaatcttattaggttgcatcttaatgatcaagatgtccatattttcttctccagtacactagttaagatgaaatgtaagtataacatggtatgtcagacaagggtattcagtattccactcatattaaaatatccatgtaacaaagaagttaattaagcaagcatgcagacaaagttttagtgaagaattaataattcatctattcataatgacacatggtagtaatcaagtgccatgtggtggtgattaacatgtcacaaggtgaaaattacatgtgacatgaagatatgtgcatattgcaaattcagaaagcactaacttttgaattgaagcgcacttggttaatgaactcttttcctttatgcatcccaatgcttaacacttgcttgaatcatgaaagcattaggggactcctaagatattccataactcagtttcggattctccctggaggtgttgcagattttgctgcctagactgagacttgagaatctttgtttctatccgagtgtaaggactaactaaactaattgcatgtattatcgcataactaaagggagtatgctcatcttcttataaaaggcatgttcatcaatgagagccttaaaatctttatgtagagtcttaaacctttatttgagaatcaaaagagaagattttaacttagagtaacttttaagcagaagttagttagagatttgaaagacagcacagatagttcctcacgaaccttcaaaaataggacctagagacttaaaagactggtcagagagctcctagcgaaccttaaaatggaggatgcttgagggtcaaaagaattccatatgatcctttaaattaagaggctagacttggaagacagtatagattcactgcccttaagcggttaaactaagcgtactcattcatcctgtcacctcattattgaacagttggcattaccactgtgtcatcattatcatgatgttaacaatgtgcctcatcattaactacctatttagctattctagctccatcaccaatagaatcctaaagcatttaccagttactgttgaggtgactgatcagaatgattactatacatattggacgtccaattatgtcaaatctgatatccttttccaccatcactttattgatgatatctatgcaagaaagaataaacagcagatgcttgcttcaatcactgaatagaatgctgagcataaaatttttgagatcattcagttgccacaggaaccattgtcctgaagtaattccatcttcatcccaacaaggagtttcatgctgatcaaacagctgtcataactgtgcacctacttctcaaacacataaccttaccccacttagacagcaatgctagagagtagtcacaattcctgctctgttggtcttgccatttcaaatatgggagaatgaatagaattttttgtttgtgttttgctctgaaagtaaaatagaagttgtattatattgatctatcactattaccgtaaaattcaaatagggaattgattgggtaaacaagtctacaattaagtgtacatacctcatttctcctatcccttgtcagtaaatattcctggaggctgtaaagtgcaggtggaaagattgggatacagtgtaccacatcttgtattttcccagttaaggatgtcatactcttgggcatgctgatactcatgattggaggtggcctattgatgttcttgcaaaaagaaatgcttgaatttctctgaacagtctcaaagaatgatttatccaatgcaaaatactttcctaataggcaagtctgggtcagttttgttattgctcatgtacaatctgaaacaaggaagccacaacttcagtcccttgtcccttcgaaagagccttggttatactacatctaggttgtgttataatgcatctatttcaaaatgctaaggcacttgctgtggtgggggaatcctaaagaacaacttttggaactgctatgaataatatcagagcatattactctagctactgtataaagaaaagaaaaaaataaatacatctctacctttgtggcttaggttttataggcagacaccttttgtattatgctgtccttagcaaagcaatgtgatgaattgtaaggtgtcattgcttcctgtattgagagctttaggtgagggaagcagcacttttagtttgagggggagatgcggtgaatcatgcttgattgtagatggaattgacatacgacaaaatgtgggtttgtttacatatctaaagatggattgcctcattcttgatcatgatagacaatgtgtattggtgtcacgcctttgatttgcccaagaaggctaaacaaagaatgagacgactagatgaatgctatgtggtattaaagcttctgcaagtaaagtttaataaaagccccagtagtgaccttgacctagtttacgatacctgctatccaatctggacaatatataacaagaaaataattgcttgtagatgaaatgtaacattactgaatcctcctttacccactaatgatacttgttggatgttgttaatatgaagtttcaatttttttatttattaaaactggtaactcgacatatggatgtcatcagaagtttctttgatcatcaatgtaaaacttcaagcatggttgtgcttagattagtctaacacaacatatgagaaagttcaccgtttcatcacgtgtctttggacaaggcgtgtagttaggaaagtgcttccacaagaaaatttgagggaagcaaccacgtgggtaccgtcccataaggctgttcatgaatagctgaatcatttttagctggtggtaagatctcaaaaaattggggagctagagtgaaaatgagcactcttgaccatgttgattactactggaaatactataggatgaagtccatatgattttttgtgaaaaacataatgcaatacctaaatcaatacgaaagctatgagaacattggtcttctttgctttgggattagatattatcttcttagctttattctttccctagagaaataaaaaggtgaatttttgcttgaaatttgaatgctccattctgtggaaagggctgttgccttggtgaaggggatgtgcactttgaacacctcatacttgtagcattatagaatgattttcctattaggtcattcaaggattggttcaaaaaaaattttcagaatgaaggttagtatgatttaacgttttaataaatatgtatatggattgaaagaagaaaaagacttagagggtaaaagcatgtgtacactgtagatgtctccgtaaggaggttaaaatgcaattccttaacaacttaatactgcaaaaaacaattatttcagcccaataataaaaaagcaacatggtagtgtctgttaaactaataattctcccaatagcttaaactattaggccatggtccaaaaacgtatcagaagccaatttagctaaaaccttaatatcttattccatgtgcagcctcttcttgctcacactcatgctctataaatgggcaataaaaaagcaatggagtatggcctccgaaagggcaaagctgtgatacgatgttgagttactaattgaccccaaaatttaggtatgatgaggcaacaatgcatacggagccgacttaagctaaagccttaataatgtctaacacaaaaaagtttgaccaatgatcactattttgtgttgtgacatcaaatgagtctacctttgtgagttgtatgataaaatggtgaatttcaggttaatgttgatacacaacaacaatgtgatagatgacctagtagttcatcaatttgtactggtacatgacaataactaagcaatatgttgcatgggtttgagtgggattttttttaaaagattatttttaaacaaatattattgaaaaaagttgtttggaaaataaatacaaaaatacggcattttttgctgcctgttttatttttacattgaactcgtagtttggaaagatgagttcacttttttcattgaattcatcttttgttgcatgggtttgagtgggatttttttttaaagttgtttggaaaataaatacaaaaatacaacaattttggttgcctgttttatttttacattgaactcgtgttttcgaaagacgatttcactttttatattgcacttgtcttttcaaaagatgaatttacttcttacattcaaagtatttatattgagggcgaattcactttttacattcaaatttttatattgaacttgtcttttgaagagaagagttcatttttttacattgaactcatcttttgaagtaggaagtacccaacaaggatcctacattcacaattttgtcaacatgggtatgctatgtgaagtttaagggtgtgtaaagcaatgactaaatggctttagcaagataaacaaagatactaacatgaagatgagtatatttaatgcaaatttaacaagaagtgctcttaaagtgggaactgattgtcccatgaatgaaatatccagttaatagcttctttatcctatgcgcttcaatagagtcctgaacttgagcgagttagggagatgggacattcttgaaaattattgcctatttcctctgttgagatgttacagtaatgtcacctcaattgaaagtgggatgcttcgagggtcttgcttggttgctggagtgaggattaagtgagctacttatttggcctctcctgcaatcaaactcaaccatgttctttccatggtctactaaggagagtcatgaaacaaagcaaattgtgatttgtgaataatcttcctcctaccctcgacattctgggtatttattgattgcctaggaatcttctagtaatatcctcatagaggagagatatcaagccttaaagcatttataaagagaacgtgaatgaaatcctaggagctactttgaaactgaagaagctatatactagaaaaacaattcagagagctctttgtaaaaccttaaaaccaagagtgccaccgattcaatagagaatctggaaagctcataatgactgttgctactggaaccttcaattgccttgctctttcttcaaaccatgtatcctcatcctcctaccacctcatcattgaagagttgtgtcaccactgcagacttacttaactgataatacttagctatatatcaccaaaccatactaaaagattctcaaatcttcatcttcattgtgatttcaaatagcaattggtgtccagcaatggcacaatacttactattgcaactttttgattgtttcctgcaagaccttcagaattatagttttaattggtcaatagttttctagctgctactctctgattgcgttctttattttggccaggcaaagttgatctatagaaattcatcatgatctaataccatgacagtagtggatatatacattacacaaataataatattatatatgctgtttaattgcaatacttgttatttagtagtggtaaaacaagagttgtgaaatgccttggttgaggcaaattagatatattcatataattgagtttctgcattaaccatttaaagtatgttatggatgtaggttttgagaaacttttactttggttgtggggttgttggatgcttgactctcattatattgggtcagatattagttatcttcttgttagatattttcaacaaaaatgatgacttctactttggttgttggtttcttctggaaatttaattagcctcttttaaatatttccatttaatagagttatctattgcaggaagccttagcaaattggcttcttgttcattttccaggacaactagtctctactagataaattttttaaggttcttggtttcctgatatatatttctacttaatgaaaatatgatggggagttaggataaactcagctatccttctatgcaaattttgaaagcgcttgggctgttggatatgttcatttaatggatatttgatatggttctgaggagctaccctactgaaatttttcttgatttcgttgcatcttttcttttacttcaagtggtgatatatatattttttccttgtggtcatctaatctcctctttttggcccctttgttgataacctatcaaaagagatatattgcattaaaagcttttcattttcttgagagactgaatagttgatgaacacagggtggcagtgcattagcatcactactc

SEQ ID NO: 12048 - DNA, 9882 bp, Vitis vinifera
  Intron number 1 from transcript GSVIVT01000524001 (locus G SVIVG01000524001) derived from phytozome v7.0 (chr-ID chr5 ; pos 13659003 to 13668884)
gcttcagtgagttctctttcgatgtcggatcttgatttgtttcggctgaccttttcttgtgcgatctgcgtgtttgaccgtttgattttgttggaatggtggttttcttatgtgttttgatcatagaagctgcggatttgttgtttgatttgtgatataatttgtttttaaattttattgctttgttttttgattgcctctacaagatggatttggacataccttaatggtcattggtcgttgatgaaaatggggaaaaaaaagaagaagaaaaagactatttgattcttatctattctactgaattagtttttggaaaagggtgaactcggctcaattaaattaaattggttggctgaatggtcccttggttttcatacaaggctccaaataataaagaagtagtaatgaagattcggatttctaattgattttcttttagtttcatttttcgtagcaaacaagtgaaatttaatgccaaatattttagatcatgttaaaagaagtcggaccacaacagacgaaagacctccaatcattgtctacgtttgaatttcttggttggaaaaaaagaaaatttgaatcttaaatctgccgtccaggtcctccagcatccagaagttttcttaggcctttgagaaattaataatttttgtggtgaacgtaactgtgttattggtttagttgtacatgttttatacttggttgaaaggttggccatgcatttacacattgatctgataagcaaagttggcttttttcattcatagtttatctagttcttagtatatgctgttgaagacgctcttggatcttttggaatcgatcctcctcgatgctttttgacttgatccttgtatttttttcatgagtgggggttataggttgttgattagatgatgataggtcttctcaactacattagcttcaaggaccaaaatttgaagaggtttatttgctctgttttgtgtaccctgtagaacttcaagaattggttcttgcttttgttgtactataattagctgggctgctttgttttatgatgggtgtctctttttctctctctgtgtatgacatctagtgtaaattgtcaatctttactaatttgcttgactgtctccttaagatgaaattttaattgtctttctatccttattattccatacagcgaaaggaatatgaaacatagtgtgattctgcagccttgtgagtgtgtgcgtggggcttttgtttttaagttcttaggtttactagcttgttcaactatctttttaaaatggaaatataattactatcattgttattttacatggagaaaggagagtgaagcctcatgtgattctgcagacttatatgtcgtgtgaagtaggatacttttgcccccttggttgtaatcaaactcatgtgattttaattttttatgttctactgtgtgaagcaatgtaccatagtgaagtttgagtccttcttactgcagttcctcttaacattgttgcaaaattctgaagtttggccttgttttcacttgaaaagttaatattgaaggacattagaaaagcatatatctgctcgggagcaaataccgattgtggatccatatactgaaggtgcattagatgcaatggccttagtagttgcttattcgagacccagccttgtgttgctaatagtggttacttagggtttacttcggctaagagtggcacttcctatttggcaagaaagacaagaacatgcgatgagcctctaacaaacctattttggaccttaccctgagaaatttatgtgaaacattgtagtttttgtaggtcaatgaacaattttgtagctcaatgcaggaattttaactcccaagaaagggaaaaaagaggaaaaggcccactgactagtatagttgctttctgtgtgtttgcttgtcactagacttgccacatgttttcatgatattctattttgtgtacatggtacttgggtattaattgcagtggtaagagctcatgatggtagacatgaaggaaggaaaaggctggtttgtggtgcagtcaaaatcctttgtgatttttattaaggtggtgaaagttaagtttgttggcacggtgttggaaaggagccgaggcttttcaagttggattagatttagagaaaggagttttgtggcgttgcttgtagggtgaaggatttctgcctaaaggtgcctgggaagagtgaaaggaagggggcaggagttataagttggagcttcaaagtaatgctacaggcccatttatatggtttttggtttttttctgtggaatggaagaggtttaccttggtgtttccaaaagggaaaggatacccactattgtgagggcaaggaccactttggaggaggcccacttcgtgttaaagactttgggctaaaagttatcccttctgataagcaagctcatttcactagccctagaaagagaaccctgatctgcaacaagtacaagatgctagaggctttaggggaagttgggtctaatgaagctttcccaaagagcctcaatcccactttttgtgtgccaatgccccttctcagcccaagaagaaagatgggcaatagtcgttcaagaagtgtgccccctttttcctcttttgagaagcttttgacttcatcgagtgggtgtgttgtagcaaatagtgattcttgtcttcaagagagtaagctttccttaaagctgagattttttgggggaaagagatgcagaatgtcactttcttgggaggaacaaggcagccaaaagctcaagggccgatagaggaggaaaagggagctttgagcctaaatcaatcttgttcctggggtggtccagaaggggttgaggtcagagagggtcttcaacactgtgggagtcatttccaggtactgacttctactcctctttccatggttaaaggttgggttttagagggggcttctgttttgtcttcttctcctttatcccccatcttttctctgcggttccctgacccttctgtacctttttcggccccccaccccttatctttgtcgacctacttttttaggggttaacaagttcccttctggttctattggggttgtatcctatcttaaaggtgtgatgtccccagctgtcaagcctagccaagagttaaagggtgttttggtgcttagcgtatctcaaaacaaccctagtgaagctttgtctcagagagttgtatgtctttggagtcaaattctgcacagttggaagattttctttgtgaaggtatctctccttcaaaaatggattctattaagtcggttttgggatcgttgaatgtcaagattgtcaaatacaatgagggtagatttcagttcaccaaaagtaatggcagttttgtggaaaaggtctattccagaaggaagaatagaccctcttccattgtccctaggtctccttagtcttctaggtcctttggtggtttttgggctttttcatttttatgaaaatcatcagttggaatactagaggccttggttctagaaagaaaagaacggtagtgaaggatcttcgttgtcatggaaatccggatattgttctattgcaggaaacaaagagggagttgtgtgatagaaggtttgtgggtagtgtgtggaaggttagaaacaaagaatgggttgttcttccaactagtggggctttggaaggagtgacaatattttgggatgttgtgacgttcaagtgcctagaggttgttttagggtctttctcagtcacagtcaagttagagtttgaggacaaagggtcgttttggcttatcttcagtttatggtcccaattcgtcatactttagaaaggatttttggttggaacttcaagatcttttaggcctaacctttttgaaatggtgcgttggtggggatttcaatgtcataagaagaatttcagaaaggttatgtggctctaaggtaaccccaagcatgagggactttgatgattttataagagaatgtgagttaattgatctgcctcttaggaatgcatccttcacttggtctaatttgcaagagaacccggtttgcaaaaggttggatagattcttattttctagtgagtgggagtttgattttccttattgcatccaaaaagctggccccggattgactttggatcattgcccaattgtgttgaacaccaatccttttatttgggggccgacaccttttagatttgaaaacacgtggttgcttcattcagctttcaaggataaattaggttgttggtggagtgagtgtcgttttgaagggtgggaaggtcacaaattcatgaaaaaattacagtttatcaagtcaaaattgaaagagtggaataaggagacttttagagacttaaaagaaaaaaagaaaaatattcttttggaaatagtggggttggatgggaaggagcaagaagggaatttttctcttgaactagcagcaaggacttttaaggaagggggaactggaagaggtattgctaaagaaagaggtgttttggaggcagaaatctataatcaattggataaaggaaggggattgcaattctaagttttttcataaggtggcaaatgacaggaggaataggaagttcattaagtccttggtgttagaagatggggtagttttagataacattgaaagcattttagaggagattaagtgccatttcgggaaattattctccaagcctttacatggctattggaggatagaaggtttggattggtctcctatttcagcagagagtgccgagtggctgaatcgccctttctcggaagaggagattcacaatgccgtgttgcatctaagcaaggaaaaggcccctagttcaaatggtttcacaattggtttttatcaggagtgttgggagacgattaaggatgatcttttaagagtgttcttagagtttcacaataatgggataatcaatcaaagcacgaatgccaccttcattgctctagtgccaaaaaagagtcaaacaagtaggatctcatattacaaacccatcagtttggttactggtttgtacaaaatcatagccaaggtactctcaagacgtttgtgtaaagttctccaagacaccattttttttttttactcaaggtgcttttgttgagggtagacggattttggatgtcgtcttgattgcaaatgaattggtggatgaaaagagaagatcaagagaggaagaggtggtcttcaaaattgattttgaaaaggcctatgaccatgttgattgggattttttagatcatgtttttgaaaaggcttaggatggaggtcttggataagggggtgtttatcttcggcgacttttgcaatcttagtgaatggtaatactaagggttgagataaggcttttagaggcctaagacaaggagatcctctttcctcttttctcttcatcattgtggttgatgttttaagtggattgattctgagggcagaagagagaggtgatttaaaggggcttttggtgggtagagataggactagggtgtctcatttacaattcgtggatgacactatctttttttccagagcatccttggaagagctgcaagctcttaagctaattttgttggtgtttgggtgtttgtcagggttaaggattaatctaaataagagcactctatagaatcaatattagccaaagtcaaatagccaggttggcttctttgcttgattgtgcagtctttgattggccttaatcgtatttgggtcttcctttaggggggaacccaaattcgatttctttttgggacccgatgttggatggagtctctaggaggttggatggatggaaaaaaaacctttttatccttaggtggtagaatcatcctaattcagtcatgtttgtcgcacatcccgaactactttctctctcttttaagattttggcttcaattgctttaaggatagagaaattacaaagagattttctttggtcaggttcgggggagggtaaaaaggatcatttagtcaagtgggatttagtttgtaagcttaaggagtttggtggcttagggtttgggaaaatttctctaaggaaccaagctttattagggaaatggctttagaggtaccctaaggaaagttatgccctctaataccaagttatcttgagtatcaatgggatacatccgaatggatgtgatgccaacaatatagttagatggtcacatcattgctcttggaaggccattgcacatttgctctccacacacatgtgctttgtcgtgggtgataggaccaaaattcatttttgggaagatctgtggtggggggatcaacttttttgcttacaatttccaagactatttagagtcaccacaaccaaaaaccttcctatttcagctattttgggtaataacacttctttgtcttgggatttaaccttttgtcgcaatctatatgatgcggagtttttgaaagactattgtctctactttctagtgtttatttatctccttctgttctagatgcgaaagcttgggtttcgtcctcttcaagagctttcttattaaactcatttttttcagtcttatccaatttctcagattcttttcctttctaccttgttgattttttgtggaagtcaaaagtcccttctaaagtcaacgcctttgcttggttagtggcacataagaaggtaaatgctaatgacatgctatagttgaggagaccttacaaagcccttagccctaattggtgcatcctctgtagggggagtaataagacaattgatcattttttcttgcactatttgatcactttgggcttgtggcataagatattttcttaggcagggatggagtgggttcagccaggcggtattcgcgatatgatggtgatctccttcaagtgttttgggaattctaatagaggtaggactctttggaagatagcgtgtctctctttgttgtagcttgtgtggagagagaggaacgctagaattttttaggacacttggaggacgtcaaagttgatgtgggattctcttcagttttatgtttctttgtgggcttactatacaaacatttttaaaccctatcatttgagagtaatttagcttaattggctgtcgatttgcactccttagggttgggtctacaaggtctgggttcattatatgtgcatatgccttttgtctttttgtatggccctcctggtttagcggaggtttccttactttttttatcaggtttgtacatcttggggaggacttctcatccttctcatgtttttctattttaatacaattgttcggttttgataaaaaaaaaaagggagctatgtggaagtgagtgattgttggcaagtttggggaggaagtaggaggttggagttctagggtgcctagagagggttatggggttgctttttggaaggctaccagaaaaaattgggaggtttttgtttgtagagtttgattctttgttgggaatgagaggagaaacaaattttggttggacaagtggtgtggcggcaccttgctaaaagagtctttccccaccttatttgtcattaacaactcaaaggtgttgtgggtagtagataaatgggagtaggatggtgaactaggccactttagtctctgtttctcaagatagttccatgaatgggagttagagataacaaaggccttcgtgcagaaaattcaaaggcatttgattaggcgtgatgcagaggatggaatgacttggttggtttcaaggaatgaaaagttctttgttaaagctttcttctctttctagcaatagtggttcaaaggctttctcatctagagctctttggaattcgtgggtcttgatgagagttggtttttttgcatgggaaacaacttggggaaagatcttgacattagaccatttgaagagtgtttgtctttagtaaatagatattgtttgtgtaaaagggtggatgaatccattgactctatgcttttttattgtattatagctggaattttctggcagttggttttttcgttatttaggttgtaatgggtgatgcattcttcaattagattgatgtttctaagttagaatgtggttcaagtaggaaaaaggtgaaagaaagcttggttagctctcccgttctttttttcgtggactatttggcttgaaagaaattggagggcttttgaaggtgtggaaatcttggatcacttaggagctaagtagatgtgggaaggtattgtttttctctgattgccctcatttctttgttcttttcacttggccctctttgtatactcccggtatacattggtgagctttagcctttcccttttgtatcactttataatattttctgtgtgcttatcaaaaaaaaaaaaaaaaaaaaagaaattctattttgtgtacatggtctataatgatttatttaattattaaattttcttcttctcattcaacttttttcctttaaaataattactctcaatgccctcgcctctctctctctctaactgtctaccactctactgatcttctcctggttttgttgttactccattttgaaactgataatatgccagtgaaattttgtttaaattctaaggcctgactttgttatgtataaattatatattttggtttaccagattcaagttggttcctcctgcactagcagtggtggttctttctttctttctttcccttttttttttctttctttcttttgggtttttttttgttgttgttgtcatcatggggggtaggggggagcaaggatttgttggttgtttcggtgtgtagatggagggggaccttgtgcatgtcacacaatgtcttcagtattttgaagtaggcttttaaagtaggcttttaaagtactagtatcaaattgttcctttatctggaataaaggattatttcaagctggagtattattagaataaaatatgagctcattttgccatgcactttatattgtaggctaagttaggcaaatggtgaatacatatctttgcttcatcagggtaactcctttttttggttttggggggtgggggggtctcgtaagtatctggtatcacatcccacgtatggtcctgctgtcttggaggcatctttcacttttgataacaacatttaatcagacaatggaatcatgagacaagtgttgttgaacttttcttcccctattcatttgtctttatatcctttgatatggtgtaagtatagttttgtagctttgttggacttgatgataattctcacaagttgtcatatcaagaaactagtattgagacgagcaaacctgtatttctggccattctgaagtatgcttacacccaatctgggctccagaataaagtttccagtgtttaactttcagatctttgttcccagctcttcctagaatcatattttctctgtatctaatttgcattgctggtggtttttcctgtattgtggtctctgcatctccagtcaaaagttgttaggaacagtagaatgacatagtaaacaatgatatgatgtcattggttcctctgaagctcctgctcacagaagaattcttgcttgctaatttgaatgaattcatacagttcgaaatgcaggattcatcaggttatagcaactcaatgcattgcattttgttacctttcattttaaaaacattttttaagttctttggagtgttgttaaattagaggaaaatgcaagagagtggttaaaagaattgtgagaacatctgatggaattgaaacaatcccctgcccagtgttttgatctatttgagttgagatctttattactttgttcataattcccaggcctcatgtatgaatctggtattaatcttgcctctccatgttgagtcttgcagcttactgtgtagttgcagttgagtctgctggcaga

SEQ ID NO: 12049 - DNA, 482 bp, Vitis vinifera
  Intron number 1 from transcript GSVIVT01018292001 (locus G SVIVG01018292001) derived from phytozome v7.0 (chr-ID chr1 5; pos 11677270 to 11677751 reverse strand)
ctctggagaaacgttcaccgtcggcgattatcttggtaggttggttcatgtatcatgcataacttattattagtactgatttttcaatggtattataattcaatttttttcttttttttatatgatttcttaaaatatttacagtatatatataaactctcaattttactatctaagaatatgtttgattcagaaagtatagggaaaaaaaatactaaaaatttgattttataataaaaaaaaatataaaggaaaatcaaatattattaaaattaattaaaatttttacattttaaatttatttattttttaggttaaaaataaataaaacgggataatatataaaaataatttatcgctttttttttcattcctttgtattttttcttaaattttgtagaaatctcgaatttgccgagtatttttagcttaaatttcccatggactaacaaaattctaatcttcaaatccagttttcactt

SEQ ID NO: 12050 - DNA, 5146 bp, Vitis vinifera
  Intron number 7 from transcript GSVIVT01020785001 (locus G SVIVG01020785001) derived from phytozome v7.0 (chr-ID chr1 2; pos 2015236 to 2020381 reverse strand)
gaacgtggcaaggcctctccacattcaaattcccagtgagactctctctcattaattcaccatattttcttaattaatcatatttgtgattatgtgcctttaataatttgcttaggggctcatatatttattttattgccaaccatgtgacaagaattaactccaatcaatacgtgtgatgcttgctttagctggatgcatgtgatggacatgtgaaaataagtcaaatttgtcttgcaagtcagtggggaatggtttttcttcctctagttattggaaaatatggaaattttctcaagttgagaatcttacaacctagtccttaactttttttttttttctttttggaatgtaaaattatgatccatgttatgactaagtttgcatgccatgtgagaaaaattaaattattcaattgggatgttgattcttagagggaaattaaaaaattatgtttgaaggtataaccattataaaatgatatgtttggaaccaagagaaattattagcttagtaaaattatttattagttaataaataaataatttattaatgtattgatatatgaatttttattcatttaaagaatattatgtttttattgtataatacttgtacatgtatgggttaaaaattcaaaaacaatagacgtaatcaaaagctaatatataaaaggttcaagaaaatttaataaaaaaagaatagagaaattggataagatgtggtgttgaagaacatagagtaaaaaagtaaagatgtttttttatttttagaatttaaagaacagaattgtgcaaagagttctttgtacaaattgcacaagtgacatagcccataagttcaaggtctaggaagaactgagagcttggaatgaagacttaggaactattaagtaggtagaggcttggtcataacacctgctaatggatgagtaaaggacacaagttggacgatcaatgaccattgaagcactcgatcatgcacaaaatgaaaatcaatttccacatgtttggtacgagaatgcaaaacagggttcacagccaagtaggtggcacttaaattgtcacataatataaccaatgtatggaataatagaaaccttgagctcatgaagtaggaattgaatccaaactaatttagaagtagcatttgtgacaacttggtattcaaattcagtgttggaccaagagactaccttttgtttgctagcggaccaagtgattaagttatttccaaagaatacataatagccagtagtacttttgcgatcattagagcaactaacccaatctacatcaaaataaggaaaaaaaaacccaaaaaaaaatgttgcaaaaatagtaagaccatacagtgaagagcctttaagatatcgaatgagtcatttaatagcctgttaatgagtgttagtaggagcatgcatgaattggcatagtttattgacagcaaaggaaatctcaagatgagtaatggtgcaataccgtaaagctctaataatacttttgtacagagcaatgtttgagagagaagtgtcatctttaataaagagcactaatccaaaggccataggagtagcacaggttttgaatcaaccatttaagctttagttaacaagtaaaaaatgtacttatgctaacatagatgaatatgagatccaaacctggttacttcaagccctaagaagtaacttaaatcacctaaatcttttaatgcaaaccatgaatccaaatgagaaataagttgttagaattgagaggaattattgcaagtaactataatgtcatctacgtatactagaaggacaatcatgtctttgccattgatgtaaacaaacatggaagaatcggccttggattagtgaaagccccattgtagtaagacatcacttagtttatgaaactaggcacgaggtgtctatgtgattccatataaactcgttaagtttgcaaacatgcttaggaaagttgagactcacaaaaccaaggggttaggacatgtatacaacctcatttaggtcaccattcaagaaggttgttatgaacatctagttgctttaagactcatcctctactaagtgctaaggttagaataattccaatagtgataggtttgacaacagggttgaatgtctcaaaataatcaagaccatcaatttgatgaaaaccctttgcaacaagacgagctttgtacttatcaatgaaaccatcaagaccatactttaaccgataaacccacttgcaaccaataatcatattcgcaccaagaggtagtgagaccaaagttcatgtatcattctttaaaagagcatgaaactcatagtgcatactatcttgccactaagatatgttggtagcttccttataagaaaatggtgtagtattggtagaagaatgagccaaaaatagcttaggtttagaatgaccaattttggaacgtgtaagcataaggtgataattactaggagaggatcgtaatggagttataatagttggtaactcagaagggttatcaatggaagaagggattgttgaaacaattggagtgtttggagataaatgaggtgcaacagacataccataagaagaaattaagatcatatggaaatattaaggttaaggttaagtgtaaacgagtgaattgtgaatgagatgatgatgacgatgatgataaggtaaaaggaaaatcaaattcattgaatatgacatgtcgagatatgtatatccgaccaatgttgagatcaagacaaataaaatctttgtatgtagaacttaagttgagaaaataacaatgatgagaacacatttgtagtttatgagagttgaaaagtctaataaaaggaaagcaagaggaaccaaagacacaaatagtggagtaatttggtaatcaatgatataaacattcaaaaggagatttttgagctaaaagagatgtgggaaaatgattgatgagatacacaacaaattgaaaggcataaagctagtatttgagagttatagaagcatgagcaagaaggtttaggccaacctcaactacatgtttgtttttacattcaacccttccattttgtttcagagttgaaagacaagagaaacgatgaagaatatcaaattgagacaaaagagtagagagaagatgatattcccctccccaatcagattaaaaagtgaggattttaatgctaaactaagtttcaaccattattttgaactgaatgaagcatttggtagtctcatttttggaatttaaaaaatatatatccaataaaagcgagtgcaatcatccatgaaaagtagaaaatatttaactgcattaatcgaattaataggtaaaggtccccaaagattcaagtgcactaattcaaatggctttgttgcatgagaagtagattaaacaaaaggaagtttatggctcttaggaaattgacatgagacacaaaaattacaagagcataatgtaggtaaagaacaaagcactaagtactttatttataataggcaaagtagggtgtcctaacctattgtgccatagtagtgcattattagggggaagaaaagttacattagaagaaaaacaagataccttagagttggtagtactgccctaaagactcttttgtggaaacttgtaaagaccactatcaattggttcttgaaaaagaaccttcttcgaaaacaggcctttcaccacaaaaaatgatggatgaaactcaagtaaagcattattatcagcacaaaattttttaacactaattgaattggtggaaaacaagggaacataaagaacattgctaaggtgaaaataacaagaattagattataaagaagtggaaccaatattagaatgggaagttctttaccatttccaacgacaaccttgtatagacccacaaatggattagagttttatagatttatagctttagaggttagatgatgtgtagctccagaatccatgtaccacgtaacatcactaagtatagacagagttatgaagttagtgaagtagtatgattggactcagttgcttggtaattgtgatcaaattgatgataacaattcagtgcaatatgaccaaatttgccacatacctaacaatgtggcttgttcatataattaccaccaaaattttgaaaatatggccttgacattcctctaccaccagaatgtcctatttgatagcagaaattttgattagggcctttgccaccatgacccatctaaaattaccaaagttatttatcaaaccttaatttgtgcatggtgggcgactgaaattgccatgagggttgtttttatattactcttgatttttttggctaaaattgttttggacatttgccatattttcctaaattaaaaagatctcctctgttgaagtttgctgctccaaacaactttcataggccaataagagattattgatatcatcaagattaagtgcatttgtgctagaggtgatagagacaacaaatgaattgtattcatgtcccaaacctccaagaatattcagaatctaatcttgttcggtaacaaattctccaattgcaaagagattattagcgattttcttgattttgagcagatatttagacattaattgtccacatttctttgcagtttgaaattgtaattttagttgcataatcctagcctttgatgcaactaagaaataataactattttattttatagattagtcattaaaaattaaatttattatattttattatataataaaaattttatatttcataatcttaaaatatgggtataagctctaaggaaataagaatctgtttgatagtaatcgtaggaagcattttaatccttttaacacttgaaagataaaaaaatttaagtgttaaaaaaattagaaacgtttcatataatcactaccaaaagtactttaattgtcatatgcaactaattaacctatgaaatccataatacgaaacctaaaattcttctgcctccatgtgcaactttctattggaaaatttcttatctatttcaaattgattttttaatatcaaaatatgcgtgtaattcctgtcaattatttgcatcaaacctgattaatttccataacttcaattctgaccactagtgtgttctcactttctatcccatatatttgcaggcataca

SEQ ID NO: 12051 - DNA, 7060 bp, Vitis vinifera
  Intron number 6 from transcript GSVIVT01015553001 (locus G SVIVG01015553001) derived from phytozome v7.0 (chr-ID chr1 1; pos 4849028 to 4856087)
ccttgctgcaatcacaatctcccatttttgaacaggtatgttttcattttgacaatcttctgaatttatgacttgatattgatgttatttctttcagctacaatgatcctcaaaaagtatggggtgaattttgtgggaattttctttcttggtttgtactcagggttataaacaacttaatgagaaccagtaagtcataatgaattattgttattgtattggctctttcagcttgaaataatccattgtttcttgaaagttgaaaggataaaaatggtcaatgccataaaatcaaatttctaaaaaccaaagaatggattctgtggacatttttttattggtactacccctattagccacactgagtctttattaatatattaattgttagtaatgttgacagatactgtgaacagataaaaccccaaatgtttaagctctttgtaatctttttgtcattcaaataaccaagcaaatgtttcacaggtcatgaatgaaaaggagttattacagtttagatatgttcttggttgttgaattccatctttcactctctgaatgaatcttcattaatctattagttgttaaataatgcttacaaaatagagtgaacagataaaattacacatgtttaagcaccttgttatcttttggtcattcaaatgccaagcatctgtttcacagcttattaatgaaagaggattcattacaattttgatagtttcctgattgttgaattccaaatcgctccctctgaataaatcttgttttttctattattgtttggatgctacagtgttgctctctctccctctccctctccttctctccctccctctctctctctctctctggtgtagcatttagcatctttttgtagtgtattgttggccacttgctcactttttgcagtgtaccttgtagtgtttctttggagtgtattgatggtctctttctctcttttaatagtgtaccatgtagtctctttgtaatgtgttggtggtctctctccaccaccaccaccaccaccacctccacttcatgaactcatacaacttataggtgtatatgtatatttacaagcagatacacatgccatcattatgctagtgggcatcatattgtgttctctctctctcttgtttgcttacttgctccctccaccaccacttaatacaccaaatactacatatgtatttgtataatacacatgtatatacacacatacatgcgtacacacatgctatcacatgtatgctagtgggtatggcatggtttgctcttaaggtagttgtgatggtatttttgaggttggcggggggtgtgtggtaacaaaagcaaggtaataccatatttgcaaccaccaccaccaccaccacttaatacaccaaatactacatatgtatttgtataatacacatgtatatacacacatacatgtgtacacacatgctatcacatgtatgctagtgggtatggcatggtttggtcttaaggtagttgtgatggtatttttgaggttggtggagggtgtggtaacaaaagcaagctaatatttgcaattcggtgtttgaagtatgatgtgaaatggcatggtttggggtataagatatatgttaaacatgcctattggttatatatgcattcaggtgatacgttcatctaaggaaaagaaagattcattcttgtttatttcaattgaccttggaatttttttggcaatcttagtgatacactttaattaagcataaggtgtagaactagaaaattggaaattcgttatttagtcttgtctccatggtgatttgttagactaaacaaatctgacttgtaaatgtgtgtcaacattcaacacttgcacccaagaccttataataatataggatgatactaactagaaaccataaggaatgtagttgaaaattttaatagagtattagtacatttctccattcaaaataaagattgtagcatggcctctgggaagacccttggtgcataggaggggattttaatgctgttagatatccagaggaaagaagaaatgcccctagactcacagccgatatgaggagattttcagaggtgataggggagctggggctgagggatatcccactggctggaggtcctttcacttggatagggggcttgaactctcaagctgcgtctagattggaccgttttttaatctctgaccaatgggaggaccacttctctgccatctcacaatctgctctccctcgcctggtctctgaccacagccccataattctagaagccgagggtttctcctcaggcaaaagccccttccgttttgaaaacatgtggctgaaaattgatggattcaaagacctagtaagaagctggtggaatggatattcggttgaaggctatagcagccactgcatcgttgagaagctcaaagctcttaagaaggacctgaaaaaatggaacaaggaggtggtaggcaacgtctctttcaacatagcagaggccttctcccgcttgcagcggtgggagaccaaggagaatgagaacgctcttactcctgaagatctagaggctaaaaatctggatcttgaggaatataagaaatgggcccttctagaagaaacttcttggagacagaagtcaagagaaatctggttaagagagggtgataaaaataccaagtatttccacaaaatggccaatgctagggcaaggaggaatttcctatccaaaattaaagtaaacggggtgaatctctcatccttggcagagataaaagaaggtgtttgcagtgcctaccaaacccttctctctgatcctggggattggtggcctagtataaatggccttaacttcaaggagttgggagaaggcttggccagcagcctagaagttatgttttctgaggaagaaattttcgcagccctaagcagtttctgtggagacaaagccccaggtccggacggctttacaatggccttctggttattctgttgggacgttgttaaaccagagattttaggcctctttagggagttctacctccatgggaccttccaaagaagcttaaactccacgttcctcttgctcattcctaagaaggaggggaccgaagatctaaaagatttcagaccaatcagcctggtagggagtgtgtataaattgcttgccaaagtcctagccaatagactgaaaacagtgatgggggaggtgatttctgattctcagcatgctttcgtccatgggaggcagattttggacgctgttcttattgctaacgaagcccttgattctagattgaaagacaacatcccgggcctccttctcaagatggacattgagaaggcctttgaccatgtcaattggaactttcttatggaggtgatgtccaagatgggatttgggcacagatggattaattggataaaatggtgctgctccacggcttccttctcgatccttatcaatggaagcccctcgggcttctttcgtagctctagaggattgagacagggcgaccctctatccccctatcttttccttttggccatggaagctctcagccaattgttgtcccgtgcaagaaatggaaactttatttcctgtttcagagtgggaggaagaggaagtgaggggctgttcgtgtcccatctcttgtttgccgatgacaccttaattttctgtgacgccgatgcagatcagttgcaataccttagctggacctttatgtggtttgaggcgatttcaggattaaaagtcaatctgaataaaacaaaggccatcccagtgggggaaggcattcctatggagactcttgcggtggtcttgggttgtaagatagggagcttacctacatcctacttgggtcttccccttggagccccctacaaatccattagggtgtgggatgcagtggaagaaagattcaggaaaaggttatctctctggaaaaggcaatacctctccaaaggcggccgtcttaccctgctgaaaagcaccctctcaagcctcccaacctactttctctctctctttgtgatccccaagagagtgtgcgtaaggcttgaaaagatccaaagggatttcttatggggcggtggagccttagagaataaacctcacttggtgagttggaaggttgtttgtgctgataaaaagaaaggtggcttgggcattcgtagtttagctacttttaacaaggcccttcttgggaaatggttgtggagatttgctaatgagaatgagctcctatggaagcaaattatccttagtaagtatgatcttcaagagggaggatggtgctccaaaaatgcaagaaaccggtatggggtgggggtctggaaggccatcagaaaaggttgggagaattttcgttctcattcccgcttcatcattggggatggcaccagagtgaagttttggaaggatttgtggtgtggaaatcaatctctggaagaagctttccccatcttgtttatcctctctgtcaataaagaaggatgggttgctaaggcttgggaggaagacgaaggaggaggtagctgggggcttcgttttaatagacaccttaatgattgggaggtgggagaagtcgaaagcttattaagcaagcttcatcccttgaccattagaagaggtgtggaggacttgttccggtggaaagagaacaagaatggaaccttttctgtcaagtccttttatagctcattttcaagggataccaaaccccccttcccggctagaactatttggatgccttgggttccaattagggctagtttctttggttgggaggcggcttggaataggttgctcaccacggaccgcctgaagagatttggttggagcatccccaacagatgctttttgtgtaaatataaggaggaaaccacagatcaccttctactgttttgcgagaaagccagaatgttatggcttctaattttctccctgtttggggtgcaatgggtgatgcactcctctgtgaaaaatcacctcttagggtggcatggttcctttgtgggcaagaaaaggaagaaagcttggagagctgcccccctctgcttgatgtggaccatttggagagaaagaaataggagggcattcgatgatatggagaagaacgatcaagacattaaatccatttttttgtacacttttgtgaattgggctagggtgtatatagaggaacacactttgtctttgatagattttgtagactggctagccaccaagtaagggtcatgtttgttttgtccctttgttttttgcttctttgtctttggtatattccgtgtatgccttttctctagcctttggctcttaatgaaatctatttacctatcaaaaaaaaaaaaaaagtgccaaatccaaattatggtggaggttgttgaaaagaattctaccatcatgagagggtcttattggaaaagcaattggaaaagcgatttaatgtgggagtttaagctgtgtggtgaacaaaataagtttagccattaaacaggagcaaagaatacaatggggaggagtgttattgaagaaataatattttaatggggaaggttaaagtgcccatggcggagctccatgtctagtttattatattttttacttgaaaacaatatctcttataactcgtttgtatattttacactgttaactttatggtgtattccctttttgtttcttgctgaattctcatcagtataagcaagtagctgtactctgatctatttctatctattgaggattgcagtgtttgttgggtcaatcaagctggacatttggtctgaccctatagttcaaaactgggaagaaactggcttattggctgaacacaccaataagtcttatttttcttttaatagataaccctttttttcctggtcggaattgaacctggaactccctacatccccaacttaatcctttgccacctgagctaggctcaaagggctgggcacaccaataagtctaaaaaaatgtgaaaaagctctgcatgcataagaaaaaagattggaatgcgataaatgtaaaacttgtgatggtttgcttttagcaggaatgcctgaatatgttttatcaccaaactttaggttcagtatttctctaactcaggctaaaatatggaatgcctccactttctcttttattttagtttattttggcgagcataatgcaaccttttacctgattggaaaggaatagctttctttttcatgctatctcacacatctgtttcctatgttaaaagcagaaaagtacctatcaaaaaaaaaatgttaaaagcagaaaagtgaagtcatgctgttggttcttgcactaaatggaacttttagggtctaatcgagttctgttaattgcccagattgccaggattgactggccagctattaaactaactggtttagtggattttattttcccccaagaaatttgtggtccagttatgttagaatatcattccctcatattgattcttggaagtcttcattttagcactagttttagctaattttcaattaacatctagaactattaaggttttctgtttttgttttttattatttattatttattttttgtgctgcaatagaaaattcctctctacgtcattttttttttggataggcttctctctacttcattttatttaatgctatagttgtttgcttgttctatgcctatactttttgcagtgcgtacgcactcacaaatgtacatatctattgtgttttatattcattcttctcacaaattattacaatatgcaggttttgaaaattggaattataaacacatgcacacacgcacacacgcacgcacgtatacctatcccaacttaatatgtatttggaatttaatatttgttgtgtcctttatatgaagcctaatagtgaaattttggttgcattttctcaagtctgtgtcttacatcatagcatgaagttatacagtattattattattattattatttctgaaaattgaattcttatgggtaaatgttttgaaatttgaaatggctactcttgtttattgtatccataggtgaaatcaaggagca

SEQ ID NO: 12052 - DNA, 4604 bp, Vitis vinifera
  Intron number 5 from transcript GSVIVT01004941001 (locus G SVIVG01004941001) derived from phytozome v7.0 (chr-ID chr1 ; pos 21707780 to 21712383)
cctatttgaataaaattggtgctaaagcacgccaagtatgccaattcctttttacttgtgtatgcttagtatggtgttcttgtttcactttatgtgaaattcaacatagtgtgtcgtgttcttttagcttattataggaaagctatgttatgaagggtatgagcattctgaccttatgtattagatttggaatcaaatacgagaaagaggggtaaaggccgcatatttgcattgtgaaagaaagaaaagaaatctgtgttggcctggactcatcattttgcatgggattccataagtatttttttttggcttactcatccactgtgatatatgctgacctaaaaattatggagggtgagatcttcaagttactggtaaatcttgaatcctcttaatttatacacacacaaatgtatatattcatgaatggatacatatatacatatattcatgaataggtacccagcattagtgcccattgaattaatatttccccaagtagtggccttgtcaattaagtcaattggaggtaagatttatgaagactcacgaaaaagatacgctcacctgtggtttcatccgtgagtaccacaaggctgaggtgacaagtctacttgaaaataagggatgctccatctgtgttttcaaaaaaagggcattttgtcttctcacaaatctggtatttattcaaagaaaggaaagatgagattccctctcttaattagaataggacattcttacacttctaagagaaatcatgcctctaagttgaagtttgaaaggggccgaccttatttaactcttagcttcaactctctcctccttgcaacttagatgtctcaatggaggaatgtgattgatttattcaatgggctttcattgtaggtagctaaatggcttttcagccttcccttttcctttctttcgtcttttatagagaatgttccattcttatttataatagaatgagtttgctatccttttgggaaatatggtattctctctttataattacatgagacattatcgtatgagcttcacatgcttagccaccaatgagaattcctcctatatgtcttcagagttagtcatggctcatttctgttaactgccttcttttaattaaatttcaaagtttatttcccagctattgtgattcattgagaagtattctatagggatctcaactcttgctgaggaggaatagtgaccctctttaaaagtagtggcatgcttcctttttgaataggttgcatgtcctttttctttgataggtgacagctttttttggtcctatatgggaacatttccttttattgtcaataaattccatattcaggacagacaaactgtcctatcttgataaaagacaatttctgatctttctttgatgtgtagtttaccaaatttgccttgtggttctactaggctttgttcacatgggttagacttcttcatgggttctggccaagtattaaccaggctgaatctcgatataacatttttagcctatcctcaaagtgtttaatcttttagatcaagtggtagtttaacatgacagctgagtgttggtttgcaaagtttccagtctgatttgcacaatatatcattcctcatttgttaaacacacctgtcaaagaagcctatagattggtgaccagacccaatgatattgtttttccttttagatgcatttgggtggattcagtaccaaccaaggttgcattctatgcttgggaggctacttgggggagggtgctcactcttgatagacttcagaaaagaggatggcagtttcctaattgttgttttctatgtggttgtgaagaagaaactgtaaatcatattcttattcattgtatagtagtcagagttctgtgggatattgttcttgggttatcaggtgtgcagtgggtctttccaaaaactgtaaaggaggttttaactagctggaggggcccttttgtgggaaagaaaaggaaaaagatatggaaatccattccgttgtgtattttttggacggtttggaaggaaagaaataggctagcttttagggggggagtgttagatatccaaaagcttaagaattcttttgtttgtagtttgtggagctgggctagattgtatattggtaaggagcgtatgtcccttatagggttcctagaatggttggcgtccaactaagggatggtgaggcttgctgtttttttggctttttgaggggcttgttgctttgtataccccctgtatacttgtaactctttgcctcttcattaatatatcttgctttacttatcaaaaaaaaaaagaatagattacatgtgataaggtgtcataagtatttgttgttcaatgtacatttttagtctatcttgtaatagcttaagtttttaggttaactagcagtttaatagtttttaaataccttgtgtccaattaaattagtgggcaatgccactattaggaccagtgttaattaatggcaaggtcatgattagtgccaccttttcatgtcttttaagttctcatttttgttgaacccatgtgtgagagatgcttgctcttgaagcaggttgttaattgttaatcaacttgatatacatcatcagctcattcgttaatagcttaagctatttcaaaagttaagtgatagtttaatggttttcaagctggacccattaaattagggagatgctactatttggaccaattttaatttaatggcaaggtcatgattagagccacctattcatgaattttcaccttaacatttaccttccaaaacatattattttccttattgattcatttgcccttcaaatggatggaagaggattggagaacacatccttagatattgtttatataaacattagaggtaagatctaatctcatgtatggatagatgctttaaaagagtatcttgcccagcttgtcaactattttggatcttttcttgcgattccaaagatgttatattggggaagaagtgggaggttggtaggtgctttggaagggtggaattaggactaactttgtggaaagctattaggaaaggatggggaactttagagcaagatcaagctttaagttaggaaacagcaaaagagttaattttggattcaattttgcatgtatctttccgcacattgtattccataactatgtcaaaggatgcttgggttacggatgtttgggaggtgatgggcatgagggtgattggagcccttgctttctgagacaattccatgactgggagtgtgcatagagtctcttttttgaagacttaaagaggacaagcttccaaggaattgtgaggacagtttagtttggaggagctccaaggaagattagttctctattaaatctagatgatgatgttgccttcctgcaaaagaggtttgggtttcattggcccctgcaaaagtaggtttatttgcttgagaaatggtttggggtaagattcttactttagatcaacttaaaggaacaggttggtcttttgtaaatcggtttctcctttgcaaaagtaagaagaatcatcttattgtattcttttacattgtgcaacagctaagagcctaaaagattttattctctctttttggtactgcttaggtaaatccttcttcaatgagagggaccttattgggttgaaatgggagttttgtgggcaaaaggcagaggaaagcatggaaacctgtgccactatgtttgttttggattatttggctggataaaaatcatagattgtttgaagatgtggaatagttcaaatgctaaaaacctctcttcatatgtgcccttctcctttgctgaagagactcccttgatgctggatctttgtctatgttagattacattgactggttggcttcttcttaatgggagagtgctggttttttcttttccatttttactttgggcgcccattgcatacttcttatatatttgggttgtgccccctcttctgttaggtgcttttagattaatttatcaatgtctacaaaaaatatatgggtagatgattttatatcccagaatctgagtcgaaaaaatctctttcctgttggtcagcatgcttgttgatttacttggggagtcaatcacttgacttaagttaggctaaataacttatttccttctagttactaattatagtatagaatgtttaacctgaaagctctctcctagctctgagtcaaaaggttcttcatgtttattagttgaaattttggttgagctaaagaggttactccatgacctctttgcaggtgcttagttctatgagagccatgcaatatgagaaactataggctaggttgaagaacttgctttctattcttcttactatttggccaatgtacttctgctatatgagagctcaagctgaaaattttaagtttgtttcagaagccatctttgtcatgtatgtttaggaattctgtttggtatgatagatttttctttcaacttcatttacactggacctatgtttctcccaatacattacctgcaggcttattctttactcttcttgctggtaggaggttaacaccctttctaataatagctgattatgctattacataattcattgcagt

SEQ ID NO: 12053 - DNA, 7946 bp, Vitis vinifera
  Intron number 1 from transcript GSVIVT01010157001 (locus G SVIVG01010157001) derived from phytozome v7.0 (chr-ID chr1 ; pos 16525848 to 16533793)
aaaatttcgaaagaaaccgtcgaaatttcgtgtttcgatgaggggcgatgcaaaaaaaagggaagaaatatcgaatggaagaaattttgaaaaaaatgagcaaaaatcactgaaaaatcatcgaaatatagatgaatacctattaattgacaaaactgtgaaaaaatcgccagattttacattttatcgtcaattttccaacaaaattttgacaaaaaatcatcgaatttttcggtaataggcgcgaagacgttgtgcagcattgccagtatccttgtgctctgctgaagctatggttctagtaaccgacaatattcgctagaggttggagctacataatccaccatggtggactacgaagttcatttgcggacaacactctttgtttggttcctgagaaaccaaaatggtgctggaaaagaaagcaataagacgttgttcgatcacttcggcatacattgcctatattttgtaagaacttttcgtaataaaactagatattaggggtgtattagtaatttgaacaacttaaaagttgtgtttccgttatgtggcaagaaacatatgtgtattttcttttggggatgttattttcgtagtcttttatcctttgaatatgtggttgagaatggagagtagtagttactcatcaggccgatttttctttggactggcggtcaactgaatttttgggtgattgattttttgggtaaaatttttggctcggcaggggcaagaagcaaacccaagccaaaaacaagcctaacatgcatcattttaataatatgtgcactaaaataaatctatactaacaccgtgaaaaaaacaaaatattttaataaataaattaattctaattattttatttttaaatttaatttaattaaccattaaaaatataaaaattatggtgataattttttttaacttttttatatcatttttatattaattaaatatataaatatttaaaaaaaattatacatatattatcatttattttatatcatttaatacaatcgaattaaataaatcataattttaatattaaatatattttaaaattgaagatattataattaaatattacaatattattgtgaaataatatttgatataatttaataataaatatacacttataaagttcatatttttttattgatgtatacgatattattattaaatacaataaattatatcatacatatatcaaattcttaaacaaaacaaatttaaaatatctattatatttctaattacatttcaatgaggtttttattacatttttatgaattttgatcaattttaaacttatcgatagtttttttccaaaatatctgtcaataaatctccaacatatccataaaatcgaagtagcgacatatctgttattaccaatattttcattattggctgcaactagggcacaaggcaagcgcccagctgagtcgtctcagcccgaggcacgtcggaagacatggtttgacatcgccttattcagtaccatggaagactaccaacggtacaagcagtattttgttcagagacgagtaattcttgggagaaacatcaattttccccaacttcagcactttggatttgagggattgttcacgaggatgagttggttataatgaaagtttgatatttgaatatagattgtggatcaagcacatgctgtcatactgacaggaggaaccctgcaaccaattgaggagacaagggagcgactattcccatggttaacatctgatcagttccatttcttttcgtgcagtcacattatccctccagagagtattttgcctgttgctctttctcatggcccctctggccagtcatttgattttagttacagctctagaagctcatcaatcatggtgagtgtgttacaactttactcttcttttgatggggattactataataatcctcattctctgatagcactatttattcaagtttattgtttgggtgatcgactgtgtattttacttccgcctagaacatctattactgtttctgagctagtttttccgacattcataggagcattctactcaagggcgacttatgacatgggtggcccgatcacatctactattaaaggaattgagattcgtctagacccgaaaagcatctgttgtatctttgatattgctccagttggacttagagtatacaagtccaagatgtggcccactatgttgggttttgagcctagagaggctatttagaggatttgtggacttctggatgcccacaggatgggcaaaccctcagcacaaaacttgacagttatcagtagagtactacatcatatgttgtgttttatttttctaccacagggtggacactgagatgaggtctcctattacgaggcattccttatagatttcattttgactaggagacggatccatttgggatatttgatgatgatgcacatgattgcatgttgcgagagcataactcatgtactcccctatggttgctttcttactagagtattcaaggatgccggtgtagacctgagtagagagacaaattttgaggccctcaatacatatgatacatatgatgattagtctataggaaagatgaaatttgaggaggccttagatggttcttgggttagaattagtagagagagcaccaatacaggctcggggataggaatagtcacatcctagagttgaggaggaggaagatatttgagagatggagggtggagtagaccctcagagaggccatcagcagagagggccagagcttgacattcctccacttcagacagagactccctcacagaccagaggtgttcagtttaagactaccttctttaagctgatgatgattgagtcgacttttacagatggtccatatactcaaccgtcatacactaagccttccttctctagacctgcattcactgaacctacccatactgagataccacctcctcaagcacctcccactcctgaccatgctccatggatggacttatccgctcatatcaactttcttggcacttgcatggaagatcttgttgtggttagtgatacacacttttactccatggacaatcgtatggatcaatattaggttggcttcacttcgtagtttgagtaactctaataaagaattgatcatatttaggatcgcttgaagtgtctgcatgaggagatgatgacctatctacattctatctttttaccttcacctccttagccttgattcgttggagaccccccttatttcttttttatgttgccaaaggggaagatattttaggatctaggaagctagatataggagactcatacatgcatatcatttttttttttggattgtacatattggacatatgatgtactgattgatacatttgtcttatgatatatgatatgcctatatatttgaggacttacattattttcatgttgcaaattctctctaatatgtcttgatcatcttggttttaaattcttaaatattgattattgatccatgattggtttgagagggaaattctttctctcctagataactaaggtttgtcatcataaaaaagagggagattgttagctcaagggttctcctaatcgtgttttctctattaattagcctttattttctcattatggttgagaccttaaggtggtcacatatccctatgaatttaatcattattgatggaggttggtgacaacaagcattctcaattgaagcaccatgttatctcgtgagagtgagatagtgtgttcctttgggtgatccaaaggacatgtgatctagaaaactatgactacagcatttcacttagtgaaatttgacatatgcttcttgaaattaaagtatttcaattgatcgcaaaataaggatgatctataattcaaggattggaaaggttattttgataagtgataatactactttgttagattacgaacattggttcatggaaagtctatatgtagtagataataagtcatagattcaagctttgtctcgttattatttacataggacaccagagtgtagttgattctctatattgggatgttgaatcaacttcaaaattggattttgaagtaaccattattgtcttatggatcccaattgttcctgttcgagttcatgtaccttgatgacacagtttatgagtgttggacaaactttaggtgtatttatgtgcataagagtgttttggtaattatataatattgtagagggattaatgaacgatatttttggattgagctaattaattaattagacaattctattaaattaattaatcaatcaattagacccttttaggttagattaagtgacccaagcccatgtgggctcaagtcacttaatcctaatggagaaccctttacataccctatttgagattagggtttccatagagtcgtcttccacctctaaagagtagaaagagagctttagcccccactctcgtaaacacccactatttggagtgctaagatcaagattgagtcattgaacgaaagattgtgagtttacgagacctctagagacttcagacttcatttttttttttatgcaaatttgatttgagaatgtccaaatcaaagtaacgttttctattgcacttgaatctagatttgtattgtttaaaaatgcatgttttacttccattgcataagatttagaagtcctagagagttttcatacacctaattaaggaacaaagaggtccaagtttccctatactatcaagggcatattttctaaggctggaaaatgcatcatgctagaaaaagatctccaatctagaaaattaagacaactagccccaatggtagcttatctcgctaaggaatcatcggaccaagctccttaccaaagaccaaaggacaaaaacttatatagagcaaccaagagaagacaagaatcaaaacatcataaataattgaaatatcataaatataggaaaaaaacttaaagaaatgatataagaagcaataacacgtgtgtttgcttgttttaatgaataataaaaaatatatatataatatacaatatgtgacatttactatgcgtaatttgagaacatatttaatactaaaagaataaaataaataataataactgtaattatttttattttaaaatatttataactttatttggaaatttttgtttatcttatataattactatacataaaagatacaaaacttattaacaacattatcattatgatttttaaatttttaataaaaatttgaaataaaataattaaaattaatttaattactaatatatcaaaaagtaaagaatagtaattttatttttttaatgcaaaatcaaatatgaaaatcatatttatctaaaagtatatttgataatgactttataaagtgtttccaattattataatacataaattttttctctctagtattaaaagtattttttaaaatcataatttaattatgacttcaatataaaatctggagtagaaaccatattttcaacatatggttttaggacaaaatgaagagcaacattttcaaaatatagtttcaatcttgaatccaattacaataaaatgcaattggatctagtatgagttgacgatcagaacgtatatgaatagaacttataacagggtctcgaaaaacaagtaatttctgctggacctttatcatttttttaggttcattagggttcttattggttggaacttccggttatcttggtagcaatttgatatctttatttccgtctcaggaaataattttttttccacaaggatcgtgatgtctttctacgggattgtcggactctttattagctcctatatgtggttttaggacaaaataaagaggtgcattttcaaaatatagtttcaatcttgaatccaagtgtaataaaaaagagatgcgcgcctcgagaagatatcaaagaggactactttaataatatttagggcataaagggcattaggcccacattcaagaaagcagggagtggggaataatgggcgaacggtagccatggaaaagggggagtaggcccgagaaggtggggacaaaaggaaagggcgtggtggatgcagcacatccattgaatctgagggtgttatagaataaggtacagctaatatccaaatggcctggcagccatttcagaatcttatcccttccctcatctttccttttctttttctatgccacacacttccatgcaccaaacgccaaacccacccccattccatatgtccaatcaaatactttaagaggaaaatggtatggtgtcgtaatagtacctccatttttgggaaggttggaatattgagattatagtacaaataatgagactttttaccaaccttcgtattaaaccttcatttttttagacatgattgtctttgtgaactcttatgaatatgataaaatgctttgtaatattataatgttgaagataccgaaaaatctctaatcacatcttaaataattcctactcacataccaaaaatgcatttatatttttgaatttctattataattagtgttttgaataccaaattaaatcaattgatccaactgataatcgatgattttttcagtccacttcgatcttgtgagctgtttaccattaaaccaatcacaaatcacttgaattaatggttggactgagaaatcagacgaatctactgattcttgaagaactaaacaatccaatgcccccctctttttattcatttaaacggactaattcattaaataagtttacacaccactcgattacatcgaacttgttgtttcatataacaaacaaagaaatatattttttactaaaaaaattataatattaaatagaaataatatagtatttttttatattataaatttaattaaaattaaaaaattaaattttctttcatttttaatatattcatgtttaaatattacacatatttcattaaataaaatttaaaatattaatacatttatatttatgcacaagataaaaataaatattattgatttttaatttatttatatatattttaaaaaatttataattatttttaattttaataatatataaaattatatatttataacatcattgcgattgaattatttatttgatcaataaatcgtgaaatgataacttttactatttaataattgatgcgattatgaaaatattaatctttacaattaataaaatcacatcatagtcagtgctgatagtagaatactaataaaactatttttaaacaatggaagaagtttcacatacattaaaaaaaagcttcaatataaagacagagttggattgcttccttcttaaggttttattatttttattttattaataagcaatacatttcaataaaattattcaaacatatcatctaatctaatccaaacgtgtcaagcctgatcagttctgaaaaaaaaaaaataaaataaaaaaaaaaataaaaatctgaaactaacctgggaaaagtaatgtgattccatgcttcgggccgactctgacgggtgagataattttgattattaaataaattaaaaaaactcttaattttcatcgcacggcattccattttcgtttgtttagaggagtgtcgggggaatcgatacccatagcgtcaatcacatgctctttccacgaaatattctacgtttttcttaacccttctgctataaggcgtaattccatcattgcccccatctcggttaaaaggatgctatggctgacgccatcattacaacttttaacgttcaaaaaaactgagggtattccagtaacttcatccgtcaattgggctgggacgcatccaaggcaggtcctcatggtaaggccgtgattttctgaaaaagcaatggcatatacccaaactgttcgtcgccacgattataaatttgctttctcgtctccattctagc

SEQ ID NO: 12054 - DNA, 4022 bp, Vitis vinifera
  Intron number 7 from transcript GSVIVT01026606001 (locus G SVIVG01026606001) derived from phytozome v7.0 (chr-ID chr4 ; pos 21122960 to 21126981)
gtcccatccaagctgctgaccgaggatctggtgcggtttctccttctgcagtggtgcatgaatagcaacaatatatcatactgatatcttttatttggaagaaattttcaagaaatttttgtatgtatatacaaaattcatttctaccaaccaaatatcttaaaaacagtgtacccgccccgtatttcctttgcctaaattgtaatattttccggtaataaatgattaatgtttcattcaatctattcatgtcacagtgtgctaagttattctggtggtgtaacaagtcctacagctgctgctatgcatgagagtagctctatcttcttaccctatcttatatgtgtatcgttttctatgaaattggaattccaaattatagaaaattgatacctacattggcattagaattacaaattaatataatcatcatataaactaacgatgcatgttttggtcatacatctgcggtctccatcttacatatatacatattttcaaacaaatattgattgattaagagtcaatgtgggaatgattgttggaagttagaagtgtttggcaatagtaaaaatgatttttcttaaaaagttaggaggcatgacaaagtattataaatgaattttaaaagtctagctaatcacttctataagttttgaaataacattggatgctggtgtctaacaatgactttttacgggttagttttactatgaaaaatagtaaagaaagtcaaatataattaaaattattaaaaatttatatatttttaaattatttaatatttatacagaacaattgaataagtaaaaaaagtttgaaatggtgtaaaaaaataatttattaacttaaatttttttttttctctttacttctattttttctctttgttccctttctctcacatttttcttcaaacttttggataataaaacataacctcgaggtttgacaaatattttaaaattatatttgtaagtcaagaaaatcacttcaagtgattcttgaattagcactttgatatgtgctacttcatctaaaaatcattttttattatataatacattatccaaaaatacttaattatataggaatactatcttctatacacatccaacaccaattgattcttcataaaaagatttaatagaagtgttatcaacaaaagcattataagtttcttcataaaaatatagtattaaaatatttactatggaagtgatgccgataaaaacattacaaattaaaaacatttttatcaaaatcattctgaaatcagccttactcatgcttccaaatgaaacatctcatgagttttgtccatttgcatgttggcatatcctctctacaaacaacttcaccatcaattaattttcagttaatgataagaaaaaattattttttaaaaaagatttttagattacatcattttatgaacatacttgtacaattgaagtacaatttatcacatttcttacaatctaataaaaattttaaataataataataataacaataataatactcaaagaaaataaaactatttttcatattctaaaatacacaaactcttcattttaatttcctctactaggtgcaagattaccctaatttacatattagatagaatgataggacacatgatgaaaatggtaaaagtaatgcacaaaagaaggataagaatccacttcaaccaatatttctataaataaagagtaattaaatattaataatatttcattatcttaacttaggaaataatatttattttccttaattttaagacatttattatttgtttattttttataatttacaatacactattgtataaattttttaaaagaaataataaaattcaagtctttcattgcaaaaattatcaaattttttatggtattagaggaagagacttaaacttgattcttctccaaaagtgattgaatatcataaaagtattggtcaaaatacttgaataggtacaaattttcagtttggagggaaaaagttttacctatactacgtattacaattctcgacaaaaactaaaaaataacctttctaagtattacaattcttaacaaaaactaaaacatagaaataataataataataataataatttaatatttatatgatgtctttgatatttttatcaatcctttggtatgccttcaccaagtttcaaggtaagatggacattcatatacattctcactctagagaatatatttaaaaaaaaaatatttgaaagagcatattaaggaaaagaataaacaaagaccaaaaatgacatatacaccgaatgaatagtaaatcaaaagcaatcaaatattaataatatttgattctcttaatttaaaaaataatatttatttatttattttaagatatttataatttctttttttctataatttgcaatacattattttgaaaacaaattataaaattcatcaaacccttcaattagaaaacggaaaatgaagaaagaaaattcaagtttttagtcagtgatgtctaccctcccgcccatggctcctctaagcaaagccagaagcgaagaaattacccctttgagtgggagaataggaaaaattagcggaaaataagtgtgctataaaaggtgtgcaatctactaatatgtgtgccttcttctattaggtgcaccaacttatgtggcacatttctcttatttttctttaaaaagttgtgtacactttttttaacactaagtgcaccaacttaagttgcatacctcttctttgtagggttttacccttgaatgcgccacttaagttgtacacctcttctctatagggtgtgtaaggttattattctcaacactccagtgccccaacattttttctgcaaggtggcactacttaagttgcacacatcttccctataaggtggggtatctctgtgtgtgccacatcccaattctcaacatcccaacaccccaatatttttactctagtacaattatactctcaatgttatatttatagttttattttaagtaaatgtcctcatttattatgtcatttatgtattattttttcatttatatctccatctattttaattttataatgtaaataatggaatacctcatatttaaatacaacaaaaaataattttcaaaagctaattctaagtaaatcaaaatcttatttttcaaatttagttataaattgatagtttttgctaaattttcttcgaaaaaaagtttccctaactaaaattagaaaagataaaaatcctaaaaaaattatttcgaatattaccaacatgaaaaataacaaaattcgtcactttttaccttaaattttgaaacatttaaaaataaacctatttctcatacttggtaaaatttttacacaactaagacaacaaataaggtgaatatgaaagttttcaatccattataccattttatctattctcttaaacaaaataaaatttaaaattggaaatttgtaaaataaagttttatgctattgttattatttgaaaatatatatttaataataatcataaaaaatctagtagttacgtgtacattagaactaaaattcctagaaatgagagtaaatgcttagcatatgacatattataattaaaccatagttttagaatttgagatgtaacaaattcaatattaattgattttttttttcatctagcattaggttattagatagcttctagctataagagtagataggaatatatatatactcgtagaccacctaagaaggaatatttattttttgattcttatcctaacataagaagtccaatgggaacaatacttgaaatagtgatccataaaaaaaaaaccaatattgagattggatagaacaaggttagagccaaaaggaattatcaaataacttagtagaatttatatgactactatggatgatccaatacttaataaacaagtatatcctctagatggaagaagattctctttgaaaggtagttttgtgccatctactagagcttgaagaatt

SEQ ID NO: 12055 - DNA, 11214 bp, Vitis vinifera
  Intron number 5 from transcript GSVIVT01023942001 (locus G SVIVG01023942001) derived from phytozome v7.0 (chr-ID chr3 ; pos 2286663 to 2297876)
gtcccctggattaccgtccaatatcttgaagttagtgagcgtgaatcgtccaccacttcgtatctatttcaataatgtggtttaagtacaaagtactccatgttgaaggaaagaaaataaaataaaataatataatggatggtatttttcaaagtttttaaaggtgatggcctaaggtgaggcatttttgtgcccatgacgcgcgtaagccgagaccctcattttataattaataaatattttataatatataaaaaataaaaataaaataatataaattaaaaacatgaaaacaatctattagaattataaaaaaaaccttaattgttgcatacttttacaatagaaaataaaggcaatcatattaatagttccaaacaaccataaccaagtcacaaaatatcaaatagagttcaacacatattgttagagcgtttcaacttaaattatcatctccaatgtcatcattattctcgtccaatgtatcaatagttggaaagttcctactatcaaaccttcccaactcatctaactcctcatctttatgaattggtgtcaaattcaactcctttcatttgcctttacctccacttttacttaacataaagtataaattaggtgtaaatattataagtttattaataaatttaacaaaatttataacttaaaattttgagtacttacttgcaaattcatcatgttttcttttgttggaatgtgaaaaaaccatattgtctaatcacgcttaagtctcttagttttgggatgacacaattttaatgacatcaacattaaatagttcattatcttcaagccaacaaagatcaagtgggaagaggggatcttctttttccgcaattcactcatcatcctaatcaatctcatctaccaaaatcgaattaacattttgtttcctttgtagactttgttctctcaatctagtgttgtacctcacatacactagagcatttaacctcttatgttcgaatctatctctatttggtatgaatctacaaataataaagaaacaaatttatatattaaaattaaattaaagttctctaacattagaataaaaatgcatatactaaatttttttaaaaaatagaagtattactgattcaaaagtgctccaatttctctcacatcccaaagcactacaagtgaggctaatgactcgaacaacaaacttctgcaactctggtgtggaacccccaaaacgcatccaccaactcgtaggatttcttaatcttcgagaatcaattgcaattcggcctccaaattcactcattgcttggtcatatgaattcaattgaatgtcaacttttaaacgttcttgataatctaacatcttatccatgcattcaaataatcccttcctcacctcatccgcattagagaacttatcttcatagcacaattgcagattaagataataacctgctgcatgtaaaggctgatgaagttgtggagtccatcttgcatctatttttctccaaatttggtcatatttcctctccatgcccccacaattaaatggaattttcttgttgactgagtccatcaactcataaatataacccatggttggtctttcctctgaattaacctcttttaagacacttactaatggaataatggtcttaatacaaaaaacaacatgagaccaaaaatttggatcaaacaatactgcacttcgagtttttacactttctacattttttgcccatatactagaacaccatttttctaaggagaacattgctataagagcttgtttttcctcataaagactttggagagtaagaaatccagtagcaaatcatgtaattgttggacgaataagttcatgattttttgtaaatgttctcatcaagctaagaacccaagtatgcccatatatgaacttcaccacttatctaactcgcaaaagtgtattagcatggacatttagcttcccaacatcaaatctatgcaataagagcacaaagagtccaccacaatattctcatcttttccataagcctcattctggtattcacataatttgatgcattatcaataataacttgcacaacattctcctatccaatttcttcaaccacctcatcaagatgctcgaacatcaattctccatttttttattttatcagatgcatcaattgatttcaaaaaccatgtgccaacaagactattcaccaaaaaaattataagacatctatctttccatctgtccaactatctgacataattgaacatccatattgcattcaagcttttttctgttgttccatcatgatatttatatcatttacctcttttttcaaaatccatgtcctcaatttatgcatagatggaggcttaaactcaaacccaaaatttgcaattgcattaaccataggaacccaataaggatcattcattgtattaaatgggagaccttttgagtatataaaccagccaatttttctacacacttccttcctttcttctagcttccacttagaattcaaagtattttgtttaggttgtgaaatagtgaatttatccatgggttccttaggtataggttctccactcccatttacactcccactaccattctcactatcactaccactctcactctataaatccctcattgttttagagaaagcactctcatttggacccacaccaatttcttggagcaattcatttcttttttatttttgttcattataattgcatgctcaatgccttgtggcattccaatctaacatcttcactaactttggtacatggtttcataccatgataagttccggctaagtgatgtttgagtctattcacccctcccgcgtatctttgattacaaaacttacatcatatatacttctcctcggagacttcaataacatatttccacacaaaatcttttcgtgaagttttcgaatcagaggaattcattctaaataataataataataacaataataattaaatttcattatataattgaccttaaaaataattataaaacataattgaaatatcaaattaacaattaaaaattaaaaataaagcatgaaagagttgaaaaacagtgttgggttcactatttagaaaaacattgctaggtgccttatttaaaagatattattgggtgcctatttaaaactttagtattgtgcattatttaaaaaatggtgcagtgcaccatttagctttactacactgtgcatgcgtaaatgctgctactaggtgcaataaaggctgctacatggtgcaataaaggttgttgcggggtgcaataaaagttgctactaagatttatttgagattattgtgagaaaaaaaaaaataaaggtaaataactagagaaggaaaatagtgtcattgaagctatgagaagttggacattgaaaagagtgaaaaacagagagagagaagaggagatgagaagggtgtgactatgtgaaactaagagagggtgaacgacaaaaaaaaatacctacctattgagaatcgagatgaagaagatgtcgttcttcatgttgtgttgccgctgaaggagaacttccgtcgatatgaagtcgtcaaagtgagaaaaaagaataacacttcaatgttttttcccaagaagaagttgatcttcaggttgctgaagaagaagttgatattcaagtcgtcgaaagtacaaaccatgaaaagctagggttagggttaggtttctcccccaactcgttctctttgttccctcttcagtcttcaatgtgtttatagggttatacagtcttcaacggtaagttgggttttttttttattagccatctcagcaaacccaaggctcacactttagtgagcaaggcgtaaaagacatacgcagagcgcgcctttgaagcgcttcaggcgaaaaggcgtttgccttttgtgttcaacgttgttgtgccaacgccttaaggcgttttctggacgcctcgctctagagcgcgccttaagagcgcatttcaaaacactggtatttttcaacattaattacattaagaaatatgaagtgtgagaattgaaagaaagctgaatggaataaaattgaaaacagagtaaaacagaggtttcttgaacttttgaaggactttattctttgagatttcttctactttgtgagaattgattttatatatttatatgtatttgaagttagttataccttataattaattatctaacaataccataactaatcatctagatacaagatttctaactaatttggtttagttacaattgtacatggcttaacatccacctttaaacttgaaggtctagctagaatgatgagtttgcttcgtagattgagaaattgttgaacaagtaaggctttggtaagaacatcggcaatctagtcacaagaaaagatgtgttgaaccaccaaagtcttattgagaacctttttcccaaacaaaatgacaatctagttcaacatgcttaacttgagaatgaaaaataggattggcagcaagaaatgtggtcatagaacataataggagaagaagaaggtgaaatagagagctcctggagaagatgttgaatccattgaaattcagaagcaacatttgctaaggctctatactcaattttagtgttaaaacgagacacaaccttctgtttactgaagctccaggagactagattagagccaaaaaagatacaatgaccactagtacttcgacgatcatcaaggcaactagcccaattagtatcagcataagtagtaagttgaagatcaagagaataatgaaaggaaagaccaaaggaagtagtgcccttgagacatcgcaataaccgtttatcaacttgccaatgaagatcagttggtgattgcatgaattggcaaggtttgttgacagagaaagagatatcaggtcttgtaatggtacaatattgtagggctccaacaatgttgcgatattgagaagggtcagccaagatagaaccatcaaagacaaataaagtgtgagaggtagtcattggtgtaacaataggtttacaatctgcaagaccaacacgatttaacaagtccttaatatatttggtttgtgaaatatgaagagaagatccttgccaacatacttcaacacccaagaagtaattcataatactaaggtccttgagagcaaactaagagagtaaataagaaaccacttggtgtaccaacacagaattagaactagtaacaataatgtcattaacatagatgggaataatgatcatgttaatccatttccaaaagagaaacatagaggaatcagataaagaagaagagaaaccccaagcaagtaatgagttcttcaattttgtgaaccatgcccgaggagcttgcttaagaccatacaaggctttgtgaagtttacaaacaaaatcgggtttagaatgatcaacaaaacctagaagttgaaccatgtaaacctcttcttctaactcaccattaagaaaagccttattaacatctaattgtttcactaaccaaccacgagaaatagcgagagaaagaccaagttgtatggtagttggtttaacaacaagacaaaaggtttcaaaataatcaataccatatgtttgattaaaactctttgcaactaagcggtctttaaaacgatcaattgagccatcaactttgagtttcaatttgtatatccatttacaaccaataatgcatttgtcaacagatttaggaaccaatgaccatgtggaattggagagaagagcaacatactcggtcttcatagtagtttgccagtcatgatgcaacatggattctttgaaagaagagggttcatgagcagtagtttggacaacaaggttgaatatttttttgggtttaaaaataccatttgcaatatggctgctttgaaagaagagggttcatgagcagtagtttggacaacaaggttgaatatttttttggatttaaaaataccattttggctacaagtaacaatagttcggtttggaagtaaagaaggattagcattggaagttggagaaaaggattgtggtaaagtaggagaaaaagatggattagatgggactagtaggaaatcagacaaagtggaaataggaacaaaatcaataggaatagtaattgaagaagaaatattaggttgaagattattaagattccttgaagattgtgtaggaatagagagaatactagaatcaagaagtgttgaagaagagttggatggtgatacaagtcgaaaggataaaaaccttgttaaaaatggaaatcgagtttcatcaaatacaacatagtaggaagcatacatccgagagaaagccatatccaaacagagaaatcccttgtgcttagcactataacccaaaaaacagcaaacaacagatttgtttgtcatcttgtgaaaagcataagggcagatataagggaaacacaagcacccaaaactttgaagagatgtatagtcaggtaaacaattataaagaactccataaggagaattttgtgaaagaacaataaagggaagccaatttatgataaaaatggcagtttgaaatgcaaataaccaatatttgaaaggcatatcagcttggattaacaaagaaagactaatttccacaacatgacgattctttttttcaactctttcctttcgctaaagagtataaggacaagagacttgatgaagaagaccatttatagctaaataattctaaaaagcctgaagctcactccctcatcagactaaacacattgaactttaggatcaaactgtctttcaaccatggcttgaaaacattggaacataagtaatgcttcataaactagcaagaggaaatatcgagcaccattaacataaactataggagttgcaccccaaagatcaacatggatgaaaccaaatggttttattgttctagaagtagacctttcaaatggcaaacgatggcttttagccatctggaaacactcacaagcagagttattattgtcatgtttcaaaggtattttacaaaaagatatgattttgtgaacaacatcaaaagaaggatgaccaagtctattatgccagagcctcaaagaaccaatatgtgaagtactactagtagaataaaaggctagtggatgagcaacatctcttattgtagcagaaagtttatagagactcttctcaattttttccttgaagaagagcaagtctcgttttctgatccctcaccacaaaatgaaaatgatgaaattcaataaaggtgtcattgtctgagcaaaatcgttgcacactaaccaagttggttgtaataaagggaatatgcaaaacatcattgaaaaccaaagaaccacttgaagaggcaagataaaatttaccaatatttgcaatagataaacccttaccatctctaacaattactttgtcaccaccggtaaatggattatggatcatcaaattgttaagatcagatgtgagatgatgtgtagctcctatatcaagaacccaagaagtgtctcccattgttgcagaagttgcaatcatagcctgaggattattagaagtggaatgcttagaatatcttggttgttaatcagagttaaaccgataccaacattgtaaaacagtgtgttcgaacttagaacaaatctgacactaaggcttgaaagttccagatgagttaccaatattgtttatggtccatccagtagtagaattctttgttttaaaattttgattgttagaatgatggaaggtgccactaaaaaattgaccatttcttgaaatctgtctggtatttggacgaaaaattagaattgtcaattttcttcctattcttttgttgttaaaatagaacaacatttgattggatcaaagtttgttcttctacagatctttgtcgttcaaaaaccatgaggtgactttgcaattcttcaatagagattggtttagcttgtgaagtaatggtcactacaaaagaattgtattcagggcctaatccacctagaattaccataatttgatattgctttgacactagttctccaataacaatcagattgtcacaaatattacgtattcatagcatatagtcaagcatgcttaagccacatttgcgtatagtttgaagattcaaacgaagctccattatttgagcttgagaagcaaaagtgaaactatgtcgaaaagattcccaaatttcatgagttgtattgtaaatcgtgatctgagtcatcatcagttcggtgagtgaggattaaatccaactcatcaccaatcgattttaacactaccaagtgatgtattttggatttacaactagagatttgattgttgtggaaaatgtagaatttggatcaggtagaaaatgtggtgaacatggtcgggttccatcaagaatatcatcaaactcgctttcaatgaccacattaagcatttgattgctccaaataaggaagttattgcgatcgagtttgattataaaagattgaccgagtgatggaaatgattgattcatcatttgagaagtattttgtcccgtgatcagaccagatccagcgattggaatttctctagaatcttgcagtggagtcacattggttgagtgatctttcattgttacaggctttgataccatgtaagaattgaaggaaagcttaatggaataaaattgcaaagagagtgaaacagaggtttcttgaacttttaaaagactttattttatgagatttcttctactttgtgagaagtgattctacatgtttatatgtatttgaagttagttataccttataactaattatctaacaataccagaactaataatctagatacaggttttctaactaatttggtttagttacaaccgtacatggcttaacatgaagagattggattattaatttgttcttggcattgtgaaggagatgaagagaagatcttcttgaagggtttgagttatccattagctaaaattagggatgacctatgaactgcaaagatgacatgggatgtagttttagtgatttccttatatcgagtttggtaactgttttttaaaacagttgttaagaataatatttcaaagtagtattttgtaaaacagtttctatttggaacttgaaatatttttaacttattttttatattttaaaaataattattatatgtaggactttattttaatcattctttgtgtttggtataattattttctaaaataattctcaaagaataactgaaaacaactaatagatattttcttaaagcaccttattttttgtttttaagaataaaatgtatgatttttagagatgacatgttagctgttaagttcaatgagttgttaaatttagagattgaaggtgactcaaaaatagttatagacagttataacaaaaagagtgacatctttagttctattatgttgttaatggaaaatattggaaagataatacaaaactttgtcatcaaatttatgaagaagccagtagaatagcatattgtttaaccaatctttcacttggatgttagattttcctagagatttatatagtttggctttaaagattattgtagtgcttgttttaaatcgaatatatagatactatgttatgtagtatttttccattaaaaaaaaaaaaaaccaaaaagagaaagaaagtagccaactaacaattacgaatgggtaaaattgggataattcgtcgaaatattggaaaaataagcgatcaccgatgtttttccgcccgatgggcctatttttcaactaaaaattcgctgctgcacgcaatcatcatataaaataggctattttttagggaagaacttcatttttcaaaaaaatatttatctgtttttaaattattcatttctaattaaaatatttatcttttttgttttgaaaaaaatcgttgatttttagcaccttaaaaaaaaaacgccaatttttttttataaatatttatcctttttttgtctttaaattattcctttctaatttatcttttattttaaatttatattatccttttatttttatattatgattttatttttaactacttttcatatttatctcattaatcttatttttaaaaatcactatcacctcaatttcaaatatttttatatttatccttttaattttatttaattttaaatgtttcttattttacaatattcaaaatataattttattcaaaaattattgaaatataaaagaaattaatgaggttctaatattttataaattaaaattaatttgataagataaatttttaataattttaattattaaaataaattaatgttaatagaaaaaattttcattacacatttgtaataaaattttagaaactaaatctcaaataaattattttatgtaaatcaatttcattttttatttaaaatgtaataaaatatgttttaataaaagttgtttttaatttttaaaataaatgaatataaatatattaaaggaatttgcattattttttaaaataataagtattatttttaatcatatttatgttaattacatttataaaataaatttttgcaagtttttttttaagtattttcatgaattttaaacaatttttgttctaatcgatatttctccggtaaaatgtaaataccaatatatctatatttacacatatttcaaatattggttataattacaccaagtgtaattgtgttcataaaatgactctaataaaaaataatgtaaataattttgatttgatttagtcaaacatcatacctcaaacccattcatatctaccaatgacttcaataatatcatatgattcatatcgtggtcattcattaataaagttatgaattcaagtgaaatttttatttttcttcttattttaaccaaaaaaaaatggggatttgatcttaagtgagctgcaattcttgttttatccttcattggtctctcatccaaatttaactatctcatataaaatcttaaagatatcgcaccacctattaagaagattatacaaatatgattatctgatacaaaatcttaagaatattatattaaaacttaaggatgatatattaaggaaaccaccctcaaggagagagataattgaagaaaaaagtctcattagtgatagatctgtcttgatgtgatatcgagatgaaattgatctatatgatcataaaagttatagaattataatttaataacggataaatggttaagatatta

SEQ ID NO: 12056 - DNA, 4219 bp, Vitis vinifera
  Intron number 3 from transcript GSVIVT01016383001 (locus G SVIVG01016383001) derived from phytozome v7.0 (chr-ID chr1 3; pos 4330567 to 4334785)
tggtcacaaagcacacgagtgccctaactctccaggtatgcatcggtttcagatcttctcttttcccctttgtcattaaacaaacacattttgcagttattgacacctggtttagcttcaatatttgggccataagaaaccaatggtctttttcctaaagaaactcaaagctaaggatgactatttacgtccaatggttatgatgtcatatggcaacactgcatagttactaaaatccaaatataaagaaaattcaaacagcttttaagaagatgtcggtttccatgctttgtttggcattgtgcagttaatgcgttcttacagtggcgtatgttggactaagtttttctttttatttaaagcagtcctgtttccatgacctgtaagttcttgtggctcagcagagtggttgtgacctttaggttctacaaagaaaacatgggagagcagttaaacgtctgacacttttggataatctttgcatataatttctaaaaatattcttgaataggtgaatctcagaatgaagcaagaaatcagagtgagttatgaatcttagacatagtggaaatgaagaataggaaaacttttggataatctttgcatataatttctaaaaatattcttgaataggtgaatctcagaatgaagcaagaaatcagagtgagttatgaatcttagacatagtggaaatgaagaataggaaaacccagttagtcacaaggaacaaaaccataaattcctgaatatctggcagaaagatgctataaagttctaaaccctgaggggtagctcagttggtccggccttgggtttgctccccaatgttcaccaattcgagtcccctcagggctactggaggtttacccggtcgttaacttcaaggccccgtgggattagtcgaggtgcgcgtaagctggctcggacatccacgattataaaaaaaaaaaaaaaaagatgctataaagttctatccacactctacctataaggctagaaatttttttagaagctagagtatcatgtaaccaacaagtgtaaaggaagtgtagtcatcactaggactagtcgtgtatggtattggttactcaaaaacctgtattgatgaacttccattagtgtagaaacatttctttctgtgcccctttttgttaggcgcttacatcaatacatttaccctatttgcatatcaggggaaaacaataggaaaaataatatcttttgaggtggttgttactttttagtctctgaattttatctgttcaggtttttaggtttggacagttagggtatgagctcacaatttatgtaagtctaacaccattcagacgtggagagacaaatccttatatgagaaacattaagctattaattaacttaaaagcttaaactgttaggcagcagttacgtatcacagataaatataaaataaataggagaaggggacttgaactctttggttaattataactcttataccatgttaaggtactaactttcctaaaagattaagctgttaagatataggccaacaatgcatatcatgctaacaaaaaagatgtgccaataaggaagggcttagtgatgaaacaaggacagttcatctgcaatagtgtatcatgcatgtggactgtattttatgggctatatgttagttggaatgagttgtggggtttcttcagacacttcattggaagtcctttgggcaaatgctgaggatgttatgatttgaaggtggattgagtgttggaagttttcggtttaatctttctatggtgcccttaatgagaaatttcatttcctaggaaaaccatttggaggctttctgcttctctagggttcatgtatttttccttgactatgacatagattaagatctttaccatgaatcctaggagaggatttggtacaatcccaattgatgcattacatatagatgctgggtggatcgatgatctcttttttcattaccttatggatttagaagcctggtttcacatcttgtttcaatttcttacatctttgattatgccaaaattcatggattatcttcttcttcttcttcttcttcttcttcctcctcctcctctagcatttataaaagcacatccttattctggttccatgaaatggatattactgaaacaggattctttcttcttcttcttcttcttcttcttcttcctgcagctatacatctataaaatcacatacttcttctggttccatgacatgatcttcttcttccatgaaatgaatgttactgaaatgtgactctttcttcttcttcttcctgtagctatacgtctataaaatcacatccttcttctgcttccatgaaatgaatattactgaaatgggattctttctccttcttctggttccatgaaatgaatgttactgcaacaggattctttcttcttttgtggatattttttttttaaaaaaagaaacttttttaaactaatgcaatccctttatcccctctctggataagaactcatctgatgttgctggggataaccatactctctattgatggccttgaggcctggctcaagtggtaaaggaatgggaagggtttgggggaggttccaggttcaagccccaatggggacaaaaatttacctatcactgaagaaaaaaaaaaactatactctattgattttgtttgaagcattagtttgatggaagattggaattaatatttgagagagatatagctttctgtggtttggtgaagaagtgctacagaacctgtttaacaactaaaagtttccttagttgctgattggaatagacttgatggttttgtaaatatagccattatcacttcagtacctagaattcactccattcttctttatttctagctcagaaaaagcatctctttcttggctgtagtttagatggcataaagcttttctgcctcttgctactttcttttgtaactgaaagttggagcttactgtctgattcagcacttatccatagagatgatttcttttggattatatatgtgtgtgtgtgtgtgtgtgtgtgtgtttgtgtttgtgttaatttttagacggactattttctttaaatttcctattctttgggtttgttggttcctattaattttcgtattgtattgaggtaattaagttagttatgactacaattgttttctttctaggattttttaagtttataaatacattgatttagtaaggagtgaagagatatgcttgttgttaatgaataacatcaattttagaattccttttaagaattatggtcacctattattcttaatgttctttcattattatcaacaaaactacagatgcctagttttttgttatttactttaagaaaatcaactaggtctagaggatggtttccttcattgttattcaactgttctgaaccgcacacagcggcacttgttaatagtgtgtggggtaagtgatattagagtcggaatgcctgctgcatcaccacctgagttgcattgaaatttggaagtcaagtggggcaaggcaagatgaccttagttgaggatatacagatctattggtggcttatggatggaaacaacttacctagtaatatcatgctactctgcatccgtggcataaaatttgatattttttattttatacgcagtccttgctaatataccattttgtaggtctataaacagctagtgttagattgtgggctgggagtgaatttatgaggaattgttttctcaggagaaaacttgttattaaattttggagatttctgccactggtcttgaatgacccctgctaggcagtttctatgcatgtcatgtaaagatcaagtaatatattgttttcttgctaggaacagaaaatcaaaatttagtgaatcccacagggttacaagttgaaaggctgttgtctgcatcacactttgctgcccatctaccttgttttttagcaaacgccttagaacccaacattttttttgattcatgaagaaatgaatcatttgatttctgtatgaaggctatccattgttatgagggagaatacctcgagtaggtcatcggtttagccattctgtgattgtgtgtgtatgtgaagtttgtccctttctttgtctttttctcatttttaccttttctattttttgtcaaaatctacaaatgcttcctttcatcttttaaatttagatgtcttttttggggtatcgcaggtcctgggaa

SEQ ID NO: 12057 - DNA, 15970 bp, Vitis vinifera
  Intron number 7 from transcript GSVIVT01020162001 (locus G SVIVG01020162001) derived from phytozome v7.0 (chr-ID chr1 ; pos 9583486 to 9599455)
gggatattgacatacatttgctatcacttgtcaaggtatttttgctgaataagttcttttgaggattatttttatttttatatttatatttatatttatatttatatttatatttatttttatattactttattttattgttttatgtgtgcgtgctatttttgtattccaagcaaattaacaaataatggttatgccggttcttttaggtaaaaaaaatactataaaaaaagatatcatattagtaaggcaattgtcttttattttgttctgtcttaaggaagatggatctgtttattcagatttgtagaatttgtgcatgactctgaatgtagttttgaatttttctggcctctctagaattaatggcgagttttccatgactaaattgcttggcatagaatagaccattttttgtgtaattataattgttataggtactcaaggaagactttttcccccccttggaaattctaggttgcctaggtactttctatccccccctcttctctttctctctctctctctctctctctctccctccctccctcccaaactcctgtttcctgtttcttcaagggtctccttctctacaacatacccttaacctaatgcactagaaacactaaccttaatgctcaattgaagtgttggatttcggaagatcttgcatctctctcttgttcttttgtgtttcgggtgctttttttctccccaacaacccttaagccaatccacaacaaatctttagctccccttggtttttgattctaaaccccttaaaatcacttttcttataattttttttttcattaatgttcttaggtagtttcacccactttgatagctattttgataagtaggtaagatgtaatatttcaaaaatgttcaatgttcttttttctgtacataggagatggttcaatgtttcttattgattttgttgagtggttgggtacttatcaagggagggaggtattttctctaattccacgtaggttgctccttggctcttttcttgttgttttctttggctctttgtatgcttctggtgttctttgttgtgtttttgcatttttgatgaatttcattgttgccggtaaaaaagaaaagtaatttttcaaaaataattttcggagaataaggatatctactttaatatattttaatttattcaatatgctgtaaaataatttgagataccaactttggacttatgatgaatattggttactaattaataatttattttatttaataatgtacatattatattatgttattaatgttttatattgaattatatagtaaattgtaaatatttttgatgtatgaaattattatatacacattaatatttgattaaattttattttatagaataatattactttaaattatattatttattattttccaaataatttaattttttggatcaattttttttaatatctgaaatttgttgttgaatctcctatattataacagatcatttaaagaataatattgttgtaacattaatgagggcatcatattgaatgttagttgatactctttcgttgtcgatgtgtaatatttgttgaaatttatatttgatactatttattctaaaatataaaataaaaaactattactataaatatttacttcaaattgattacaatagaaaaatgaaattgctttttttttttttaagttgctttttttttttaaatgagaatattaagaattgatttttatatggtataataatttatttaattaaagactattcatatatatatatatatatatatatatatattaatatgatcaagagggaattaaaattggtagagttgggagccattagaggtctttgggatggtgcttaacagggaattttaatgtgaattaggtttctcaggaaaaggggaaattgcccctagattgtccattgacatgaggggcttttaagagatcatagaggccttgagtttgaaggaactttgactagctgaagggttattcatataaagtggtggtcagaagtttcggttttcttcaaggcttgattgcttcctactgtcaaatgcttgggaggatcatttttctagattaactcgaagtgttttacctaaatcgggcttagatcactcccccatagttctagatggtggtgggatgaggaggggcatgtctccttttagatttgaaaatatgtgacttaaagttttacttataaaaaaaaattggagtccctatgccatgtcagcttttgggacttaaagtaaagagaagtaaccctttcttctgaagattttgaggctagaagtttagtgatgattgagtttagcaagtgggccctattagaagaatctatgtggaggtagtaatcaggtgaactttggttaaaaagaggggggtaaaaacaccaaattcttacacaaatgacccatgttggagaagacgaaatttcttgtccaaagttaaagactgaatgggggttgactgtttgaggaagcaaatataaaggaaatggtattttggccttccgtcacaagtgggtatgatggatcaaatggtgcatttctatgagagctcaagggtttgaggtagggagaccctctttccctatatcttttcatttgggaatggaggctctcaactagattttgaggagtgccaaagaaggtggctttgtctcgagcttccaagtaggaggaagaggagaggaggggatgaaagtgttccatttgttcatcgatgacacctttgtcttttatgttgcttatggagtgcatttggagcaccttagttgtggcttcatgtggttcaaggcaatgtttggcttgaaaataaacatggagaaaagtgagcttattccaattggggatgtcacaaatgtggaggatctagcttcggtgttgggatgcaagataggaaatttatcttcctgttgaaatttggcattcaaagttagggttttaatttaggaaagtattttaggaataaaaaaggagagatcatttaggatgattcggtttcctaattttaggagagaatcaagctagattaatattttcttattcagttatttgtgtatatatatgtgtatggtgtgtacctaaaaaatcaataaaggaattcagaaattcttcatggtatcagagccagttttctgaaaccctattcccttctggccacctcttattcaggccatcattcattccggccaaatctctctgggcatctctcaattcgaccatctctctctctggccatctctcattccggtcatcagtccctattctcagagccaagggagaaaacgctttccggtcggtcgaatcgtcgtcagaaaacattcaccgccggcaacttttccggcgaattttccggcgaactttccggcgaactttccggcgatggttttttctacaccgcaaggagcgcctggaggagatctccaatttttcccaaagcaccggagccagaaaaccatccatgcgccggccacgcgcgtttttccggccgaccactgcatctcacgcgccggtgcgtgagggagcgtgagccactttccggcgacgcgcttcctcctccaggctcgcctgaagccgaccagccacccttcttacctgtttctgccatccgagccctgcacgtgcctcttgtggggttcttttgcctccgcgggccctccgattagtttttccggcgtcctccgactattttttctcaactccaatccctgcacgtgccttgggaagtgttcttctacctttccggtccatgacaaaatacggaatggcatcatcacaagtatccagcgtcacgtcaccagaatcagggggcagatatgaaattccaaaccttggtggcagtgattcatctcctattctcatcacaggacacaaattaaatgaccataactatttacagtggtcacaatctgtgttgctgttcatttgcggtaaaggaaaggatgagtacctcactggagaagcagccatgccagaaactacagaaccgggtttcaggaagtggaagattgaaaacagcatgatcatgtcatggcttatcaattccatgaacaatgacatgggtgaaaatttcttgctgtttgggactgcaaaggacatatgggatgcagccaaagaaacttactcaagttctgaaaatacttcagaactttttcaggttgaatcagccttacatgacttccgccaaggagagcagacagttactcagtattacaacacactcacaaggtattgacagcaccttgacttattcgagactcactcatggaaatgttctgatgatgcagcaacatacaggaaaattgtggaacaaaagagactgttcaagtttttcctaggactaaacagggaatttgatcatgttaggggccgaatcatgggcattaaacccctgccaagtctcagggaggctttttcagaggttaggcgtgaagaaagtagaaagaaagtgatgatgggatccaaagagcaacctgccccaacattggatgcctctgcccttgctgctcggtcatttaatagtagtggtggagatcgtcagaaacgggataggccttggtgtgattattgtaagaaactagaccattataagcagacttgttggaagcttcatggcaaaccggctgattggaaaccaaagccacggtttgacagagatggcagagcacacatggctgccaactctgagagcacatctgttcccgagccgagttcattcaacaaagagcagatggagatgctacaaaaactattaagccaagttggcagtggcagtaccggtgtagccttcactgctaatcgaggaggaatgaagtcgtggatagtggacacaggtgcttctgatcacatgataggagatgctgccattcttcaaaattacaagccaagtaatggtcattcatccgtccatattgctaatggttcaaagtcaaaaattgtcgggacaggttctataaaacttactaaagacttatatcttgactctgtcctccatgttccaaacttggattgtaatcttttgtccattagcaaattggcccgtgatctccaatgtgttactaaattctatccaaactcgtgtgtttttcaggacttgaaatcggggaagatgattggcagtgctgaactgtgttccgggctctacctcctctcatgtggccaattctcaaaccaagtctctcaagcaagttgcgtacagtcttagagtatgttagagtctttcaattctgtgtcaaattctaaggtcaataaagatagtgagattataatgctacactatcgccttggtcatcctagctttgtttaccttgcaaaattgtttcccaaattatttatcaataaaaatccagcatcttatcactgcgaaatttgtcagtttgcaaagcatactcgaacagtatatcctcaaatcccatacaaaccttcgactgttttctctctagtacatagtgatgtgtggggtccctcccggataaaaaatatttctggcactcgatggtttgtgacattcgttgatgatcatacatgggtaacatgggttttccttatgaaagaaaagtcagaggtcggacacatttttcaaaccttcaatcttatggttcaaaatcaattcaattccaaaattcaagtcctcaagtcagataatgcaaaggaatactttactagtagtctcagtacttatcttcaaaatcacggcattatccacataagttcttgcgttgacaccccacaacaaaatggggtggctgaacgcaagaatagacatctcttggaggttgcccggtgccttatgttttcctctaatgttccaaactatttctggggggaagctattctcacagctacctatttgattaaccgtatgccatccagagtgcttacctttcaatccccacgtcaacttttcttaaaacaatttcctcacacccgtgcagcctcttctgatttaccactcaaagtatttggttgcacgacattcgttcatgtgtatcctcaaaatcgtagcaaatttgctcctcgagccaatacgtgcattttcctagggtattctccaacccaaaaagggtacaaatgctattctccaaccaacaaaagattttacaccaccatggacgtctttttttttgaacatgtcttcttctatcccaaatctcatgtttagggggagagcatgaatgaacatcaagtttgggagtctcttcttgagggtgtaccttcttttcacttagagtcaccaaatccttcccaattcgcgcccactgagttgtccacacccatgccgtcatcagtccagccagcccaacacacaaatgttccttctcccgtgaccatccagtctcccatgtctattcaacctatagccccacaacttgctaatgagaacttacaagtttacatcaggaggaggaaaagacaggaattagagcacggatcacagtcaacatgtggccaatatattgactccaattcaagtcttcctgaagagaacataggtgaggatagggctggagaggtgttaattcccagcattgatgattctactctgccgattgcattgaggaagggtgttaggagatgtacagatcatccaattgggaattatgttatgtatgaagggctatcaccatcttacagagtatttgctacttctcttgataatactcaggttcccaacacaatacaagaggcattcaaaatttcagaatggaagaaggcaatacaagatgagattgatgcacttgagaagaatgggacgtggactatcacagatttgccggttgggaagaggcccgtggggtgcaagtggattttcaccataaaatacaaagcagatggatcagtcgagagattcaaggctcgtttggtagctagagggtttacacaatcctatgggatagactatcaggagacttttgctcctgttgcaaaactgaacactattaggattcttctctcattggctgtcaatcaagattggtgcttgcaacaattggacataaaaaatgcgtttctaaatggtgacctagaagaggaagtctacgtggaaataccacctggtttcgaagaaagtatggcaaagaatcaggtttgcaaactccaaaaatccttgtacggccttaaacaatctccccgagcctggtttgatagattcacaaaagcagtcctgaagctgggctacaaacaaggtcaggctgatcatactctatttgtcaagaagtctcatgccgggaaaatggccatatagtctatgtcgatgatattattctatctgggaatgatatggaggaattacagaatttgaagaagtatttgtcagaagagtttgaagttaaagaccttggaaatttgaaatatttccttggtatggaagtggctagatcaaggaagggaattgtagtctctcaaagaaaatacatacttgatcttcttaaggagaccggtatgcttggatgcaaaccaattgatactcctatggatagtcagaagaaacttggtatcgagaaagaaagtacaccggtaggcagggggagatatcagcggcttgtcgggcgcttgatttatctctcacacactcggccagatattggctttgcagtgagtgctgtaagtcaattcatgcacagccccactgaggaacacatggaagcagtctacaggattcttagatatttaaaaatgacaccagggaaaggtctatttttcagaaagacagagaaccgtgacactgaagtatactcagatgcggattgggcaggaaacatcattgacaggcgatccacttctggatattgttcttttgtctggggaaatcttgttacctggaggagtaagaagcaatcaattgtagccagaagtagtgcagaagctgagtacagagctcttgcacagggaatctgtgaagggatttggataaaaagggttcttagtgaactgggataaacgagttcatctccaattctgatgatgtgtgataatcaggcagctataagcatagcaaagaatcccgtgcatcatgacaggaccaagcatgttgagattgacagacacttcatcatagagaaggtgactagtgagacggttaaattgaactatgttcctaccaagcaccaaaccgcagacatcctcaccaaagctttacctaggcctaactttgaagacttaacttgcaagctgggattatatgatatatattctccagcttgagggggagtgttgaaatttggcattcaaagttagggttttaatttaggaaaatattttaggaataaaaaaggagagatcatttaggatgattcagtttcctaattttaggagagaatcaaactagattgatattttcttattcagtcatttatgtatatatatgtgtatggtgtgtacctaaaaaatcaataaaggaattcagaaattcttcacttccacatacttgagccttactttgggagctcctcacaaatttgtgagggtgtgggaatccatagaggagaagttccaaaggaagctctccttgtggaagaggcaatacctttaaaaagtaggaagactcactttgatcaagagcacattgtcaaacttgctaatttattttatatctccctttgtcattccaaaagcatgagctgaaggttaagagccaatctaaaggaattttctttggggcgagggagtgcttgagaaaaagcttcatttagtcaagtgttccattgtctatgtggatacgaagagtgttggtcttggtatcagaagccttcctacccttaacaagacctttcttggcaaatagaattagggatttgctaatgggggagaccttttggaaacaagtcatagttagaaagtttggagtggttgaagggagttaatgttcaaggggggtgaggggggctatgaggtgggcttgtggaaggctattagatgggtgggaggacttcaggcgtagatcttatatcattatggtaatggcataaagagtaaaatttttgaaagataggtagtgttgggaaaattccttctaagtgtccatcttggagttatttcctatagttgtggtaaagactcttagatagcaaaaatgttggagcaggtgggagaggagggtcgatggagtcctcgcttccgtagacaattccatgattgagaatagggttcttctaagttgaagtcggtgggggagggacttcctcttttgatggcctatttagtaagttggttaattttagtagctatgtaggaatgctagtcctggattttgaatgggagattatctccctcttgaggaagataaaggcaaggagagggtgtggtgttagtgttttgggtggaaaaggaatccaaacttgtcttcctttttaagagtgatatctggaaattggagtgtttggctaattacaaaagctctcctctattagttaagagaagggggagaaacattggggatccaactcttgttgcatgaggaatcaaaggtgttttagttgttggttctattagcgtttaagctagaaaagggttgtttattggtgctgtgagcaatgggggcaggagagtttgctagggatagattggtttctaggttgttagggtggtgtttgtgtttggatttttttggttcatgcttttctctttcttttcttgcaagcctttaggtgccttttgtatactttgtgtgtatgttgatgggccttttcctagcacttttatgtgtaattttttggactaggttagagtgtgcatcgatgattcctctatgtccatgacatagttgtgaaaggcgcgtctaggctccgggttgtgcgacgccaccctttagcgccttgcctgaaggcaggcgacgccccttcacgaaggcgctcgcctctggcaagccacaatgtggtccataggtgcgtctcaatcccctatcttcttcttcttcggcgacaggttgtagagggtagagagaaacactaatttctttttttattttttgggaccaaaatgacatcattttgaccctttttatttttaaaaaaaaaaggctccaaaacgacgccgttttggagcctgttccttaaaaaaaaaacaggccaaaacgatgctgttttggccttattttcccttccaactcccttttttggttgttttcaacctgacaagcctcccaaattttgccctagcctcagccgtgtagtggagaagtgaagaagatgaagaagaagaggtatagtggggtgttgctggtggtatagtggtgttatgggataatagggtgttggaattggtcgacttagaaaagggagtgttctcaaatttttgccattttaagaattgtgaggatggtttcatttggacttttacaggggtttatggtctgaccttgaggagagagagagagagtgtttctggggtgagttgggtgccataaagggtctttggaatgggctttggtgtgttgctggggactttaatgccatcttaagccccgaagagcacaacaagggagggagtttgaattcagacatgagaaggttctcagaagtgatagaagacttagagttaaaggacttgccgctgcttggggttccttttacctagagtggaggggtaaacaatcagtctttatcaaggctagatcgatttttggttaatgaggagtgggactgccgttttagtggtttgaggcagtgtgtcctcccgagacctgtgtctgaccatttcccgattcttttagacggagggggtttgagaagagacccctccccttttagatttgagaatatgtggctaaaattggagggttttaaggatcttttgaagtcttggtgggagggggacaactttagtggctcttcaagttttattttggctgaaaaactaaaggtcttgaagtctaaattgaaggagtggaacaaagatatttttggcagggttgaatacatgaaggatttggctttggatcaggtagagttttgggatgctaaggagaagactagcagactgtctttggaagagttggaagctagaaaagaagcgagggaagaatataaaaaatgggttttactagaagagattacttggaggcgaaaatctagggaagtgtggttgaaagagggtgacaaaaatacgaggttctttcactagatggccaatgctcacaaaagaaggaacaatgtggacaaaattaggattaatggtgtttggcttttggaggagaatgaaatcaaggaagggatagtcaatgcttttaggtcttttctgtttaacccgggggactggcgtcctcctttatccgggttgcagtgtgagaccttggagaatatggatgcttgtgctttggaggtgccattcacggaagagggggtgtttggtgcgctgctaggatgtaatggggataaagctccgaggcttgatggcttctctatggctttctagcagtttgcttgggactttgtgaaggatgatgtgatgagtttcttcagggatttctatgaacacggtaaatttgttaaaagtctaaatgcaacttttttggtcttaatcctaaaaaaagcgggggctgaagattttagggattttaggcctataagtttgttgggaagtttgtacaagtggctggccaaggttttagccaataggctaaaaaaggtggttggaaaggtggtctctaaggctcaaggggcttttgtggagggtaaacaaatcctagatgcagtgttgatagctaatgaagccattaattcggtcctgaagaataatgagaatggtattttgtgcaaacttgacatagagaaggcatacgacaatgtggattggtattttcttctcacagttatgcagaaaatgggttttggggagaaatagattgcgtggatcaaatggtgcatatccactgcaagcttctctgtgttggttaatggcacctctatgggtttctttcaaagctcaaggggattgaggcaaggtgatccactttcaccttatttatttgtgattgccatggaggtttttagctcttttcttaaaagggttgtggatggaggtttatgttgggttgtagggtgaagggtaggagtgaaaaaggggttcaaatttctcatttgttgtttgctgatgataccttgtgttctgccaagcttctcgagaccatctgacctaccttagttggttacttatgtggtttgaggccgtgtcggggttgagaataaacttggaaaagagtgaactcatttcaatagggagggtagagaatattgatgatcttgctttggactttggttgtagagtgggtagtcttccgtccacttatttgggccttcctttgggtgctttgttcaagtcagtgactgtatgggatggagtggaagagcatttccatagaaggttggccatgtggaagagaatccaagggagggagggcgactttaatttgaagcactttgtcgaatttacctatttattttatgtccttgttgtgcttgccaagctcagttagacagagactagagcaaattcaaagggatttcctttggggtggcggtaacttggagcgaaagcctcatttagtaagatgggagttggtgtgcttaagtaagaagaaagggggtttgggggtcaaatgtctattcattttcaatgagtctcttctttgtaaatggaattggcgtttcacaaatgagagagaggccttgtggaatcaagtgattagagggaagtatggggaagatagaggggattggtgctctcaggaagtgagagaggcgcatggcgtgggggctttggaaaggtataaggatggactgggatttggtgggagttaggattttattccttgtaagtaatgggtggtgggtgagtttttggagggatagatggtgcggggattcccctttgtgtgtgtcatttcctttcttgtttgctttgtttgttgataaggaagcgtgggtggcggatttttggggccccgtgactgaggggggttgaaatccctatttttcaagagccttcaatgattgggaggcggaacgattcttggagtggcttcatgggaagagagtgcttggagatgtggaagatatggtgttttggactgaaataaagagtggaaagttttcggtcaagtctctctaccttgctttagaagcgggctgcccttctttgttttcttctagctgcatttggaatgtgtgggtgcagcccaagattagtttctttgcgtgggaagctacgtggggcaaagccttaaccttggatcttgttcagaaaagaggatggaccttggcaaatagatgttttatgtgtcttgagaaagaagagaccatagaccgtcttcttctgcattgttaaaacacaagggtcttatgagatttactctttactttgtttggggtgtcatgggtactgccttcttcagttagagagactctccttagctgacatggttcttttgtgagcaaaaagcgctagaaggtgtggagagctgctcctctctacattttttggacggtttggaaggtgagaaatagagtggccatcaaggatgatgtgttgtcaatccaaagacttaaatactcttttgttctttctatttggtcagaggttaagttgtttatagttgactgccctctaactatagttaattttattgattggtttggctctaactaaggttgtttgctgagccagctgggtatttttttctattttggcctttttggcggtgagtgtataggtattgtacaccttgagtcgcttttttggcatctctttttatatgagatttttctttatctatatacaaaaaaaaaatattgctttgtggattcgggtgtatattcatgggaattctttgtccttaattgattgtatagattggttgagtccttcctgagggtgggagctgttttttgttttcccccttgttttaatttttgtttttgtttttctagctcattgtatacccctggcgtactctttttctctttaatacaatccctaacttacctaaaaaaaaaataaaaaataaaaatccttatccacttcaaatggacttttagcttattctcttaggtgttctccttgttctgtgtttaattggttcttccatttcagttagaggctttctcataagatgacatggtgattctgctgaaaccaagtgaaaggtaatgtgaaggctggtaaagtgtaataggagaatctttgaaatcaaggaacagtcaagctgggtgatgaataatgtagttattaagactttgtttatatggttggagttggactaggatttgggctctcctcctttctcattgttagactttattgatagtatgaggattagttagcttgatagttgttttgttttatgtgcaggtgcactacttctataaattgtgtctacatgggttgctcccctttttgttagatgccttcaatgtatcatccttttttacctataaaaaaataaaagaaaaaatatagtaatgctattttttgacttcctaacaattactataaacaaactggtcttatggtggtatcacagattcttttcccttcaattctcttcaatttgacattgtattgtttgtgggaccctttggaaattccttcttccatcctactctagtgttttaggtagcatccttctcacttactatgtttgatctaggtttatgaaaatgggcactatttggtatttatttgctgtcagtcgccacctttccctttttattcccaattttacaacatgttctctcatttctactctgactctatgatattgcattgcatgtatcttgatttagcaccttatattaccctcaatactaaagcatttctttgtatcttaattttgcaattccctaaacttacagttcacttgattaaaactagtttgttagcaaacaacatactcacgtgacctctttcaggttatgacctatcattttatttagaaagcttgcaaaagcataggagcttattgctgactgttgatggatgctgttgtaatctgaaattcagttgtatcaacaactgttctcatgctacatgtatagatcatgtgtaatttatttgttatttgctccactcatctttgatagaataagccatggtatttctcaaaggtccttcagtgaacacttattgtaggtacaaggctatagcctaatgtaaattggtagggtagaatagggtttgtgtctgtctccaatctaacgtgatgaaacttgttgtattgaattgagtaaataggtacataatgactttgaaatgatgagatattaacctgtggagttctcctttgcatgtctaacttctttttttcctattggaaaaatgttcaaattcagagatgggtttcttcttgttttcctattggaaaaaggttcaaattcagagatgggttatttagaaatatatggttggggacagagaatgggttagtgtaatatgaacataaaagtgggttacttaaagatattgctcaaaattgggagatttttagccatttaataagtaaaatatatgatgggattccaagaaattcattttgttgcttccagcatgatgtgtgtgccatctgaatattttgcacttgctccactttctattcttatctatttagaaaaggattaaatctgtatgttaatgatcccttgagtttatatgattatttttatttgtgtcgcttatcttatttcttcaatatgatccatcaatgtaattttaaacccaacctcatggaagtggattatgaaaagcagtatatgcaaaaaaaatatattttgatagaaatttaattattaggatggttgtgatatttggagtgtatgaatgggggtctttgttatttaaaatctatattgaatattttgaaatgtgctttggaagaattcttagcagtttaatattttgaaatgtgcttgcaaccaggagagaggatttcttcctttatcagctgcactgtt

SEQ ID NO: 12058 - DNA, 2285 bp, Vitis vinifera
  Intron number 3 from transcript GSVIVT01020061001 (locus G SVIVG01020061001) derived from phytozome v7.0 (chr-ID chr1 ; pos 10930373 to 10932657)
attggggcagaaagcaggtgatctctaatttggggcttctcctttttaattattctatgaaaatgtggtttaagagttgggcaaaaattccaataagaagttatcttcagacaatgaaattatgacagaagccttgctagttctttatggtttagaaattattgatcattttcatgctgtttcttgttggttggtggtgggattctgccataatttttttctgaaaggcatttggttgttaatctcttggaaaaacttgtttttcactataagaagttaaagcattattgttgttgtggtggatgttcatttcaattttctctatgtaggctgtttcaaaatgcatttaattccccatagatttctaattcaaaggttcaactcacacatggcctttgaacccttgatcctgattataaaatcctctctgtcttgatcacttatcatacatcatggtccagattttattaaaaaattgtagttcagtggaatctcaatatactcaaacccagacaaggaaacaatttgtctttgtttggggcttttaggcctttagttttggaagcaatattagtgacccataaaaaacatttaaaagaatcatattacgatctgaacatggtttatttggtggatttatgtaactgagttgcataagtttttatcctctttttctgagactaattgcgttagcttccatgtttgtcatttctatttttgcactgtgtcatttgctgttttatgaaaatgctcttttgattgtcagaatttctcttgcttgaatatctgattattcttatttatttcctatgttttcaaatggatttttgaattttttattcaatatatataagtttggtagctttcgtttgttttttgtaacatttcatagaatatcatgattcttggtgctgaagagctacccactaggatctggtatataggaccccattgctcttatttatttccttgcaactccccatttttttttttttttttaaattatgggtttttctaaaattttataattttaggtgatgttaaagacatgtttaagtatacaaattttttgtaattttttcttttattatattttatagtcatgattctagattttattcttcaattttgatcctgaagagaccccaataatttggttctttactccagttttgagaacaacgttagagattaggtttatgtggcatattactttcgcaagaagtgatttgttatattatgtggattttttgttttactaattgatactatgtggaggtctttgtaaatttgggtttttgaattgagataaattttagtgccttaaatgccctgatgtttaatcaagggcaacattcaaaccactgtggactgagattcaatttggtgtgaaagatcttcactatgaagattacaacaatcatgcttgtgtccttggtagtatactacaatgttgaactagttgtgatcaacatgaattgatgtttctgaggacatgattacacatcaagcttgattttggcatgaattttctagtgatgctactgaatggcatctggagaaacttcgatgcagagtatgtctccagaagcagttccacattttttcttcaaattttccttaggcatcaactattgggtttggcatcagaaatatgctacatttcaactgtataaaggttcgaaaaatggttttagagttcataatctggaatctttttgagctgtgttgcatgggcacttcaaagtatgccaagtacccatgctggataggaaaatgacctgggtttgagtaggagatatgtgtctagcatgactatatattaggtatgtatccatacataaaaagggaacaaatttctagtctgttgtaatggtaaacattatggatgttctatattagttagacacttgaatttgttctatggtatggaatgagataaaattggaaattaggttatttagtagtggcctgtgtcccaagatctggggattaaataaatttagcaactacccatgcccaggctagacacttatatttgaagtccatgtgacacgatatatgaattagcatgactcaaacttctaaagtttaatgcattgtgttgtatagataatgtatcttcatgttaaaagttagggagttaacaaatatgcaaagtcaggaaacgtgattagcatgaaagttgtccttatattatgcgaatgaaatttcaaacttcaaattatttatgatttcacatatctccaggtgttctcattatctgtgactgaaattggaagtct

SEQ ID NO: 12059 - DNA, 3440 bp, Vitis vinifera
  Intron number 1 from transcript GSVIVT01001898001 (locus G SVIVG01001898001) derived from phytozome v7.0 (chr-ID chrU n; pos 6919466 to 6922905)
cccgctagggtttctattggtatgttttccctttttcatttcctttttttggcctctgtttggttgcttagttaaaacttcaatttttcttttccccgcatcttctcagcaaacaataactggaaatatgaattgcagcaaatttactgatttaggcgctttaattctcgtctggggttgacttgaattttacaaaaacctattaggtggtgggattaagtggtggtttgagtgttgttcattagttgattttgatttttcattcctctatttttcagtttcctcggttgagtttgcagtaatgctgaattgtaattgttagctctgatgaagtaattttaagtgtgagaataagtttataatctgtaacactcagtgcttggattcaaatctgtgttctgaaagtggatttggctcactggaattcataccacatgggattaatcttccaacggcagtgaacagcagaaagtgctctgacagacaattcatggcccaaagttgaacaatttctatgttggaatctcatctgtgagggcagaagtttgagattttttggaatggattaggggttagggttttctagatttagagcattgaatcacttactcatccttggctctactcttccccttttgctcttccccctttgatccatttctcccctcattgagcatctctatgaggacattgatgctgatagacttgattgagtacatgtagaaaaatattattgtccttttagtatttcttattttgaccatagtattcaatactttcaactagaatctataatcccagatattcaattgattatctttaaatattggactcctcctctagtgggtgttgttaaactgaattttcatgggtgttctctgggtaatctgggacaactaggaatcagaggaaggcccacaaatcatcttggaactttgtataagcattcttgaaacatgctggagaggagctagccattgaagaaaatactctagcaatgttgggaggcttgaagctagccaaggcggaaggtcttaccaatcttttagtagggggagattcaacattagtcatatattgggtgaataagaaataaagaggttcctggaagttatatggttgccttttcaaatctttgatattgcttcaaagttggagtgctccttttattggattccctgtttaactaatcaagtgacagattcattagcaaagaggggaccaaaacatttgatcttctttgtgagggattttctactttatttggaattgatttgataattatagcatttttcttgcttttggtcaaagcattgtaacgtcctatgagagaagtatttctcatcgaacctttgcacttaattatttgttcacaatgaaatgtttgtttttgattaaaaaaagaaaaaaaaaatgattatctttaaatatgtcatgcttttgtttatgcatccataagaactcttgtgtgcatgttacaacatatgcatttcaagtataaaaacacaatctcaaaagctctagatgtgctcatgcttcaagaaaactttagattatgctacacttgttcttagatcttgctatgtgccttactttggctttgtgctttgacaatagtgttctgctattgtttttttttgataggtaaagagaaatatattaaatagaaagaggaaacaccaaactagtgccctctaggtatacagggagtatacaaaagcagcccatagactcgaaaccaaggaagggaaaagaaacaacaacccctacccttacttagagcctagccactcaaaaaagctaacaagagaacaagggctcaaaactataaacaccctaacccaagaccaaagattacatacaaaagaatgtttcagcctttggagtgaaagcaccccattcccaaaagccaacaaatttctttccttccatattgaccaaaatatacataagggggtcatttgccactcctatttacgggttttccccacaaacgctccatgccatccaaggagagtttcgttaactgaaccagatagaacccaagtcacgccaaagagggaaaaaagaagattccacaatgcccgcgtcttaacacaatgaagtaaaaggtgatccactgtttctgcttcaaaaaggcaaagaaaacacctatttgtcaaagagtaccccctcctctggaattactccaaagttaagattttgccctaggaagcttcccaagcgaagaaagctaccttaggaggcacatatgctctccaaatactatcataagggaacaaagcagaacctccgggctccagaatagaattgagcgacttgactgctattgtagaaagaaacaactctcctattctatttatcacactaatttgttactccttttccccctaagtatgcctacttaaaggataattatgtaaagatgttttactaattagtatttagtagaattcaattcatggtcttgaattattgtagaaacttattaaaaaaaaaggagaaaagaaaaaagaaatgctcttagtagcttaccaatttacttcatgtcccctttttttatttctaagtgggtggcattgaggctaggggaggaggggcttttgagaagagacgtcatcttgtgcattggttgttgatctacaaagataaaaagatggggaggtctaggtatcaaggagcttcacattctcaataaagccttgcttgggaaatgatattggtgatttgttttggagaaggatatcctttagagaaagatcatagtgggtaaattcatggaagagccaagaggacggtgctctcgggttgggagggaaggatatggtttggcttgtgcaaaatgataagaaaaggatggagagtttttaatatattcttagtttccaataaaaataataattattacatttgagaaaagatggtattagattttcttttgggatgctacatgatacactgtactgcatttgggaaaaaaatgaaggaaaaaaaaaaaaaagcaaacttttaagtctgacttatgcttggtgtgcaaggtaggtaaagtatgcatgtgttgtcatgttaaaacaacgctaactatgaacttagaatcattacccatttaattgtcttataagcagtttgccgacaatatcccaagcaaatttattttttaattccaagcatttagcaacttcgtagaaatataattctacattgtttgtatgtctataaagagtttggaaaggcaagagatgaggttcatgattcttgctttcaatttttcttttttctctttcacattttttcacttttttccttatatatatatataaagcatgatctgactttttatttttgcccttcattgttttgattgttcagggaacaaataatggaatggaataaaaaagaatgtggagttttaactttgcttccctgcttgcagcatcaag

SEQ ID NO: 12060 - DNA, 9641 bp, Vitis vinifera
  Intron number 5 from transcript GSVIVT01026343001 (locus G SVIVG01026343001) derived from phytozome v7.0 (chr-ID chr4 ; pos 14439189 to 14448829)
tctattattattattattattattattattttcgagttggcataaattagtaagatgtaatattgcacttctaaatccaccatttgccaaaaaaagccttttgacatgtcataaagctaaaatagattcttcaatttctcttttcaaaatttttttctaaatattattgggcctaattttaattacctaaaagctcttatgaaccattagatgtttaggataaccctaaaacattgaaatgtaaaaggatttgagatctaattaaactcttcttttgataaaattaagaacgatattgaaggacaatcttaggaagaaatttatgataagtcaaccttgactaagccctaaatgataattcaaaagctcaaaggaaatcaaatctattagagcttaatacaagcaattttagtagcctcaatatcaacattccaagtttgacaatggtcaatcattccataaatagagaagtgtaaccattagtgtcaaactttaaaaagtatatggctataagcatggggatcccatattcaaggctaaataaagtttaaaactcattgttaccttttgcaatgtgtgggagaacaaaaatctcatgtcacatggtaagatctaaagagcaacatcctatctttatatgctagttatccaagacagaatcaagagacccaccctactatatcacaatgaatgtgattagacaaccaacatcattgtttcacaagggatgacccctaatttattacgtaacagtcaaatccttagggacagaccaaagccttaaatgagacatcttattgattacgtaattgatattcaaagcttatgtcattgataccattcaaagcaatgcataactaatgcctccacttacaaaagaggtttgatctccaaaacaagttacatacaccaattcatttttaactattgatctcacaattcaagtcatggctaacttgatcctcatagatggttcaacctaaccattccattcccctcacttccctatctatgcagatccacaacagaaagagaaaaatgtgttaagtttgactgaagctaaaagaggttgcaacaaattggcttcatttgtgaaaatcaaatgtaaaagccatcattctctttcaatcaatttagtcatggttcaaatttgaacaaatagtaggcgtccacttgatgaccctccacaatcataaatctaagaaaagattgaggaaatgaaagaagattcttaagggaaaaaaaataactcaataagttaaacaaacacaattaagaacttgttcatgaaaatgcttgactcatggagaaattacaagaagtcaatcaatggacaagcctccctagtaggtagccatcccccacaaaaagttgagttagaaagactaaataccaaagaagtcatcttcctaattagcgagagtccacaaactctaaataagcgcaatggagtcccaccaatgttgttgatctcttttattggccaatatgcaaacagattggactcatagaagaaatgataaaaccaccctcatatcccttcaataggttagatggaaaatcaatctgacccccataagagaaatcaccttactcatagtagtgagacctatcacgtattgcacattgttcatgatggtagatagatcgtccctataaaacatcaacatgggatgtcctagatacataacctacaagtgtctctctcttcatactaccaaaacatcaaattccctaccaaagaaggaatgtatgtcctttagaaagattaagaaatggcctaaacatgttgcacaatagccatcgcatttgcctcttattggttaggaagggatctcaggatctttatcacttttctcggattttatgtggacctttcataatgctcgaaggttgtttactatttctataaacttagtaaacatctcaacaatgtctcattatatttcatgttaacaaattcataactaggcataaggatgctaattttttactctttaacttggttagttcctttatgagtactttccaacaacctgtaaatatccttggtaaattcacattggtaaacacaattatgctcattcctatcaactacataatataaatagtatatacctcaagcatgcaattgaactttctttttgtcaaacttatttcattcttgagtagattttggaatagccacctcattctcaattttagttggaacatttggatcattttggatgaattccaataaatcatcatcaatgaatattaaaaattaagtcatcctaattttccaatatgaataattagttctcgaaaagaatgaaggtctattgatcgagaactcttccatatgggatgagtgtgaggattagtcatatcatcttagattaagtcttctataagaggtctatctttgataccaaatgtgaagtctaactagccctacctagattagtcactctagaggagaaaggagaggtaaattgagtgaaggccaatttttattaaattttaattaaatgaatgcaatgacaatttaatcaactattaggcaataaataagacaacaaatgtaaaaaagagaacgaagagaaatttaaacacaagatcattgggattttgataaaataaagtttaaaactttagttattttaaaaaatagaataaaaatattttatacaaattaatttggtaagtcaaaatcttttaattaataattaataatctttaatatttgtcacctttaaataacaatctcttctgaagtctacctttaattggaaagtcttccttaccttttggattgacaaagaaaaattttgtcaactctctaaaacctaaatgttctctttttatgttattttgttctcttcttgagaaatgagatgtggatggtttaatcaatcttcttatgaacattctcgtagagaagacataattaagagttattgaggttgtatcatgaagcaattattaattattggtacctgcacattggaagggtaatagtagtttttagataacgtgtctatatatgtctctccaaatcaagccaactttttttttttctcttttaaatttgttgatttcaatgttgatctattgtgtaatttatgcatttaaatttatgagtttttttgtcaacatgtaataatttcctaacaatctaaagctactattattcaaaagtgagaaattggaactaaatataatattgctacataatttttatttttttgaaaaaagaaaaaaaaaaaacaaaaaatgagtttcttgtgaattacttaaaggaaggtggaaaataatattaaatttagtttgagtcttattattagaattagttgatagagtttatttggttaaaatttgtgagccatatttcaacatcccattttccctatcccgtaagttctccattgacttaaaaacagaaatatttgtattactttattataaagttttctatggtttaagtaaaaaaatataaaagaaaaaagtgatattatattcaaataaggaagttgacatgagaagtttatttaaagaatctataattaaataggattaccgtttatttgataatcatatgtttttatgagtataaaaaaatgtttattacagtcatgtgtacatgttatggtagttgaaaaataaaaaatgtaagaatattaatttaggctatgtttgattgacagaataaaataggatatgataggtatatcttaacatatcgtatttgattagatgaaaaataaatatcttaagatatgatttctaataagatatgataataaatatatatatcctatgaattttaaggtggtatatctaatgggatatattatagtatattatatttatatttaatttgtaaaatgaataaaaatataatatgaaatatatattatttttaatatttaaaataaaattatgtcacataccaatattttttatttaaaaaaatgaaatttcttttatatttaacaatatttatgattaaaatatttaaactttataaataaaaaaaattagataatgttattcaatatataaaaataatttataatatcaaatattaatattattttattttattaatattttttagtttttttaaccataaatttaatttataataaaataattattttacaaaataagaatataaaaaagaaaattttgattaaaaaaaaataaatttatgacacatgagatttgcagatctcatatcttagtatgaaattaacatatctcatgtggagcggattaaaaaaaatggataatgtattccaccacttatcatatctcatatttcttaaaaataggatatgataagtaagaataacttatcatatcacatcactaaagtttaaaataaaggtaaatatggatatatcggtacttgaatttacggatatcggaaaatatatgtggatattttatattggtaaagtaaaatttttcaaaattcatgaaaatatttgaaaaaattataaaataaataaaaatttacatttttaagttattttataaatttaattgacatagatattgttatgaagaaaaatatttatatgcaaggatatatcggttttaatatataatttattatttatcttatcaaattaattttaatttataaaatattagaactttattataatcattattatttatattttagtttttttaaataaatttatatttttaatattttaaaataaaaacattcaaaattaaaatgataaatataaaaaatttaaaaatgaaatgataataattttttagaatgagataaattatgacacatttaatattaaaactataatttatttaattcaaatatatttagaacccgtttgatagtgattttacgaagcgtttttaatatttctaatacttgaaaatttttatcattcaagtgttagaatgctaaaaacacttcctaaaatcactcctcaacgcacttttaatagtgtaaaataaataattttatatgatttttttaatatttatattttttatatttaattatcatataaataatataaaaaaagacattaaaaaattaagaattgatttttaaatttttattaatcaattaaatataatttaaaataaaataattagaattggttttttttttaatgattattaacattaacaaatttaaattgaacatatattatcaattatcaaagagcattataatccaatggtagccaaggactgaacccaagggttcgaacccccgactgcatttcagaggaaaattgttctcatgatttgtttccttctctcactcgaggcatcaagaagcccttttctgaagttgcccttcacacgagagaatccctaaaaaggccctaatttcctctgccactctcaatcctcgcaggtactaatctaatcatgttattatttttttttctgcaacccccgtttgattcccaagaaaatccattccccattcgatttccgagaaaatccatgcaaaacccccaaggaaaataaaaaaaaattgcttttttttttgcttcctgtgttttctggatctgttctaggggtctctttgcttttatgccattggatttaaatttcacgaaccccaaatccacgatttttgagccaggctgaaaaacacaacctttgcctgcaaatcatgatcagattaccaaatagcatcttatttttttttattttttatttttaaattggatagattttgtatcctgtgcgtgggctggactagtaggaaatatcgggaaatttcccgaaaactcggtaaaaataccgaaatatcggcgatatttctgaaaaattaccgaaatttccgtcgaccgataatcggtgaggaatatcgtatcggagcagagcgaaatttctttctccgatatttccgaaaaattacaaaaatttccgtagaaatgtcgtcgaaatttttcgatatttcaaacactgcacatacttaccaaacacaagataggatataatattcccattcttatcttatctcatctcttggtatatcctgcgaaccaaacatgatcttagactacttttttataatatgagtaacatgatcttagactactttttaataatgtgagtactactttgaccaaactttaattatctttagagctttgttattttgtaattatttttagataagtgtgtgaaaacataatttttccttgttttcctccataatttgaataagttaaaacttttttatgttacttcttaagttggatttatagagtaaagctgaatttaggaggaaaaaaaatataaataaataaatagaatgattattaatatgaaatttttttatgaaaatataaatattcaaaacaaatatagaaagtaatattgcatatgctagattaaatatttctttcataaataaataactataaagaaaatatttttgtgattgtgatatgatgaaaaagaaagggttacttgtcaaaatacgttagagaatccaaacaagacaattttttttttatttaaggaaaatttaatttagtgattgattaatattaaaagagaaacaagtataaaatgacaaacattaagaaggaaaaatgtttgaacataagaagtaaaatatgcttaatgttatgatcttcttatatacttgtttacttaattgggcttgataggaatatctttatccttacattgtttccttttttttaataagacaattcctcgataggaatttattgagataattttggaatatataaatataattgaaaaaaaaaagtgatttatttggtgatatgagaattattttgtggtaatgaaacaaaaaaagtaattaaagatgcaactaaaaatatttttattaccttgaaaaaaaacttctaaatgaataactttaagaaaatatgtttggtactaaaaatggtaaatgcaatcttgtttgtgcttttttatatgaaatacgagtaataaatatcttagatgtaaggattgcatgtgtgatgtcaatgtatttatagaaattgaagaatactagatactttgtgataatttttgtatgtgatatcttactaatgtgttcttcaatgtgcaaaaagttctaataccataatgatgcaaagaaattggcagaagtatttaagatgagaaacggactagcaagtaagttagatccatattcatcgagaaggatggaccaaactcacaaaagagttacctttagaggtaacccaatctttgtgattggagatcctatgaaaaaaggtttaatgggtagaaagaatttgcatgagtgacttgtaagcaacattaactttgaaaagagagtctcttccctattcctatgacaatagtgctaccaatgtgatgttaggaagggttttgctctgaattagcccgaggtaaaaagtgttgtaaggtacaagttgcatgtgcccttagaggactcacctaagtgaaagaggttatgaggccgcagctatgggattgggctatttcgtagtaactctcatgagaatcaagatactagcacatgaccatcaacagtgcggaccacttagaacaaagttttatatcaatactatgtgtgagacatgttgaaatttggttcaagggtctagttcaagacttagttcactaccctacaccaattacatagaatagagctacctaatcttttatttatttattttttattttaaatttcttaattaattcattattattgttattattattattattattattattattattattattattgaagttttaaactttatgggagattgttggaattttgataaaataaagtttaaaactttaattatttttaaaaatgaaataaaatattttatacaaattaatttggtaagtcaaagtctcttaatttataattgatgatctttaatatttgcaactaataggatgagagttatgagttttaaagagaatcatccattacatttataatcggctcttcttaattctctaaaatctaagtttttaaggaaaacttccttgattatttataaaactaatacattacatataaatgtaaaaattaaagcctatttggtaactgttttcaaaaacaattttgaaaattagtttttgagagtagtttatgatgttttgtagaataaaagtttgtttggaatctaaaatgtctttaacttatttttaatatattttaaaaataatttttatatgcaatgttatattttttaataattctatttgcttatataattattttttaaaatagtcataaaaaaaaaaaaaaactgaaaagaactaaaagattttatttgaaaacatcatattttctatttttaagaacataaaaccgaaagcaatttttagttgtcaaacgtgtttgtcttttttgttgaataacataaaattattcttgaaaatagtttccaaacagaccgtaaattgtttatccaatttgtaaaaacttgacaccaacttaaacataattaaattaagcacgaatcgaaaatcttaaaaacgaaggtggggttggattgaacttgaataaggagatgatacgcattagaaatcagcccacttacagcctaacactttgaaaattggaccggtccagtcgaggctattattacctgacttaacccatgtaggggccgtctctatttacccaaaagaattcaaccatcccttgtccaaatgctgcgttccctaattctctgccttctttcacacaaactttctgagttcaaggtactgttccaatctctattctcaatccaattgatcgtctgctacgttagatataaattaatcgtttggttgcggagaaaataatgagaaaattaaaggaattttttaatcataaacttttcgccatctagggttcgagcagaaaattgcactttatctaaagctcgtaagatttttaatttttaaaatttcttttttgtttgttttggatctttggcagcaaagaaagtgagggagataacatagcaattaaagtgtggttttcttttttttttttttcccttcattttcttggtgaccaaacagactgtcggatttcatagagtgtcttttaagttgatatgtatttatatgatgtatgtttgtttcctctcaatgaactttctgtccatgatgagtaaaataaaacctgtttcaagattatattatagcataagtaacaaaatcaagttagtaggaagaaggttcactaaagaatgtaacacaggttactgatttctggtgaagttaaattgctttcatgtggatgccttgttgattttactactcttacaagacactacagactctacatggaaaattttacactctgtacgttattggtgaactgggttttctgctgagttccaggattcaattcatttgataatctttggcagtcatcagtcataatgagtattagtttatttaggtcaaagtgatgatctttatgaatttctgtttttaatgtgtgctttctcaactatttgatgagtgctataagaagcttcctctattgctttctaatctgtgttattgagaaagcacctggtggggatgctaaaattgatggttcaataataatctctcagaaattccagtgttgagtttttcttttttttttttttttttttttttttttt

SEQ ID NO: 12061 - DNA, 2243 bp, Vitis vinifera
  Intron number 13 from transcript GSVIVT01023884001 (locus GSVIVG01023884001) derived from phytozome v7.0 (chr-ID chr 3; pos 2716050 to 2718292 reverse strand)
acagccacctagcccctttttacagaattgaacaggtgttagtgtcatcttttacttattcttcttcatttgtcatctttaagattaaattataagttcgatttctgttgtctttttttgtctggaaaaagatataattccctctgcatacattcactaaacataaaattaagttcacttttaggatttccctctgatttttgaagaatttgtatcagttgtatgtcttggacactacttattatttttttgatctactttgtctatttcaaaaattaagggcctgtttgataattgttttttaaaacagttaggatttgtttgataattgttttcgagaacagttttccattttctagaataagaaaacaagaaatcaagtttgacaaccagaaaactgttttttgtattctattcttaagaataaaaaatagtgtgttttcaaagaacatcttttaattgtattttgataattgttttaaaaaataattagacaaacatgtataatgattaaatataaagcagtagatataaaaaattattttaaaactacatttaaaaatattaaaaacattccaagtttctaagcaaaattttattctacaaaacatcaaagaacaattttcaaaaactattttttagaattggtctcgaagacagttatcaaataggaccttattatttttgaagaatttgttttccaaaaacagttattattttatgtttcaaaaacataaaattaagttcacttttaggactttcctttgattttgaagaatttgtgtcagttgtatgtcttgacaccacctgttattttttggatttagtttgtttatttaaaatattagggtctgtttggtaattgtttttaaaaaaagtgttttgttctccagaacaaaaaaacaggaaaacatgtttgacaactagataacaaaaaacaattttctatccttaaaaacaaaaataaagtattttcaaagaacatcttttagttgtttttatggttgctttgaagaataatcatacaaatatggagaatgattaaaaataaagcactatatataaaaattatttttaaaacatatttaaatatatataaaataggttaaaaacattttaaattctcaaatagatatttgttttacaaaacattagggaatagtttacaaaaattgttctcaaaaattgtttttcaaaactgtttttgaaaatagttaccaaatggggcttagaatctgtttgggtcttgtgggcctggataagtttgtttaagactaggtccaatatgcttcttttggtctaggcctaggttgaaactgtctgacattaagataatcattcagcatcctattttggtagataactaagagatcttggagcagggaaaaaaaatgaaaataaaatataacagcaattgaaagagctaaaattatttggagaacccttttttttttttttttaaataggcaaacaaaaatatataaaatagtgccataaaaaaagggaatgcactctatgtacacagggaaactgtttggagaacttgaataacctttttgaccgatgaactcttgcttcgtttggttttttgagcttgagtggaaggtgttgcttttaagtcaatgcaatgaagttctttgtgttttaaaaggagtaaagaatgcccctatttgtgagggtgagtgaagagcatgagcttttaggtagggtgtggagagcattgaaagatgcttgatcatcctgaatgaaacatctggaatgaaaaaatctcatgtgattgatgaagccaagcctgttgaaacatctaatttcatgttcctcatggattttcatcatcagatgagatgtaactgtgagttactgtgtaagctatctgtttgggatgttggaattggcaaaagtttggctctagttgttgatagatgtgagtttataagatgtaattaaaggctgataatgctgttattaaagacctttttatgatgatgctacagttaatttaacaaaagatttaatgatgaaaaataaccttttttgctggagtcatgaaaagatgttcagtttctagatgttttattgtctagggcagaattaatttctgtatttatatgcgattatttggtttacactttgcccttccttttttcatgttactgtgtgtagaccatattgttatagtttcttgtggaagaactgacatgtaactggatgattgttacattttccagctcatattggccacc

SEQ ID NO: 12062 - DNA, 3182 bp, Vitis vinifera
  Intron number 4 from transcript GSVIVT01017418001 (locus G SVIVG01017418001) derived from phytozome v7.0 (chr-ID chr9 ; pos 8271245 to 8274426)
atttggaaagctttcaactattgcaaggtacttcattaacttgctaaaaaaacttataatattttgttattaaattaaaggtaagattaacaaacaatttcttcccattagttacttttctttgtaatatcattaaatttgatataaagtagtctaaatcatcctttcaatttataagttttaattaaaacgcatcaagcatgcacaagatgtttaatataactaatattttcataagtaattgaatttttttttatgaattaattaacttgattatcaataaatacttacatgtataagattaatatagtttcataagtattttaaaattgtcttacaacacacacacacacacacacacagggaaaatgaaaggtatgtgatacctttatgctatgtttggttcccaaaaaaattgagggaaaatgaaaggagaaaaaagtagagaggaaaaataaaagaaaagaaaaaaagtgaagaaaaatataaaattgattaaagtaaatacattatttttatatgttactttaaacttgtttcacttattttaattcttcaatgtaaagatgaaagatttgaaaatgcagaagtctctaattattttttattatattttattttattttatagtttttacaatacaaccaaacataataaaatcattttctttaatttttttttcttttcttaatacttttcatgaacccttaagttatgtttggtttgcagaaaatatgaggaatagaaaatagaaaagaaaattagaaggaaagaaaaaatgaagtaaaataaaaataaatttaaatttaataaattatttttatatgctactttaaacttatttcacttattttaaattatttaaactcatttctaataaataataatggaaattgtagagaagtttgtgttattcaagctttgcaatgacttttcaaggtgaaggaaaatattcttgctgaaattgaaaaaggaaataccttcttaaatagcctattgaccgaaaacacattgccctaacatatacacacacctttattatttatacaatcatgtaatacttaatccagttagtgggattctagtggttgtttctatcttggtttccaatatttctgattgatagtgttcgattaatgaaatatcataaattttgaccctaataaggaccaatccctattaaatgtaattgggttgacccaagactaaatgttagacccaactaataaaaacccatctgtttgttggagtctaaataacccggccttaggtagggcccatgccttattattttaagatgtagtccaactggtttgacactagattgagtaaagcctaagttatgagcatctgtgcatttccatccatccacaacctattggcatgggcaaactttggtcaattaaacctattataactgtatacaaaattttaagttcaaaagataattttccttatttagttaagattcatattaaaaaggcacaaagcacgaattttcatgtttaaattcacaaatatcatgaaagctccttcaagctctatggaccattttatttgtaacattattttactcttaattatcaaattaaccaacaaattcttctcattacttatttttcttttgtaatgtcataaaatttgatgtaaagtagtattggtcatcatttcaacttttaggttccaattagatgcatcaagcatgtgcaacatatttgatataactaatatttttataagtaattgaatttttttttctataaatcaattaacttgattattaatgaatactttcatacatgatattgatgtagtttcataaatatttttaaatagtcatagaagtcttttatctgattcactagaaataaaaataaattaaactattctaatgaaaatacttaatgatttgaagtgattgcttttgattttatttgattgctaccattattaattgttagaaattggcaacaaatacccattttgcatcacttctatatgcatagggggaatgaattatatttcatagagctaacagggcaaaactcatacttttggaattatggaaaaggttgctagaaagctaattaaccatttatattatgattaagactagttgggttagaaataattcatatggagattaaaaaaaactatgtaatttagtttagtagctagggtgctattgtaatgattaatgatctgcaacttgaacacatctactagtgctttctacttgtatagctaaatttatgttaccactttgaactacagtacttacatgagaagaaagttattccttagtgataatgcaaaagaaattaactatcagtttttgttaaactaacaagtgatagtttagatatggtttgaatacacttcctttcttctatttttttattttgaaaaaaaaaaactctttaatgaaatataagaaatcttatatgtataaaaagtaaagacttaaacaaaaaaattcttcaaatttgaaaattttcgagaagtatttttaagaatttgtatttttagtataataattcctatattttgtataaaagtttttgtttaaaaaaatagaagtgtatccaaattacaaattaattgttcaattaagaatgtttctcggatcaagagataatgaaagttgtagagagtttgcattactcaacctttgcaattactttttgaagataaaagaaaataccttcctacataacataaaatggcaggttctggtttgtaagaaacaaataaatgatataggatatgaataagacttcctttataatagatatgtagagaagaatagtcgatgataggaggtgaaaatcttgtaataaaatatcaatatcggttataagataatcaacattttctctatttcttgtacctatgtgattaagaatcttgtagctcccttattgaaatataatataaaaatataaataaactatttagaagtgcatgtagttttcaacatgaggaagttcaaaagcaagttaattatgataattttctgttgtctatattgagcacaaattatttttactaaaggttcaattgttctatgaaggttaaaagtttgaattgtttacatatgcaaatgtgaaatttgaaattttataattttttataattttcttgtagattcaaaaagcttgtccatattcaaaaagctcgag

SEQ ID NO: 12063 - DNA, 5529 bp, Vitis vinifera
  Intron number 6 from transcript GSVIVT01036408001 (locus G SVIVG01036408001) derived from phytozome v7.0 (chr-ID chr1 8_random; pos 4750178 to 4755706)
ttctttcatcttcttcttatcttattttgattttggttacatgtcttaagatcgtttagagtagttaaataagaatttaggaacttgaagaaaaagtgatattctttcgcacatgttctatttcatacttaaatcatttaatttgcatatgtaattagataacaaatacattaattccattaatttacatcaaacaggttcatgaaaaaaacaaatcagcagaatacttcaatttctaaactttttggaactctattttatttcctattttgcactgagttattaggagcgtttgggatgtgtgttagtggtgttattgaccagtcttggaggtttgaagatgttgggtggtatgcggccaacagagttcaatctcttgctggttagtacctttcatttgatttgaatagtttaggcttgataatagagagtgactggttaattattaattagcagccacttcaaattggcagagaagtgatgtagttttttagattgtttagacctcccttttggtctaattttaaggacagaaccattggatactatacattaattgctagaatacaagattgatcacagattccatcaactgtgattgtaacttgttgggattttctgtatgtatgtgttgttttgctgtgaatgatgtgatccatggaagctctcgtgatatattttgtgagttgaatgatctccattccttagaggctggtttcttcagcaatggtttcaattgggatggagtgatgagggggattattctagtggaagtgggtggtctagtcaaggagcagaggagagaaaagctcttgtaagggaaccccgtcttctaatatttaactgttgggctattgctattgtttttcctcattttagaaatcggatgtcaaggaaattaaagaattcactctaagtgtccgtttagatatatatatatatatatatatatatatatatatatatatatttaatgtttttaaaataaaaaatctcttgggagcttgcatttaaacatcaatgattgtggacctggatttttcatgtgtccctattagtcgatgagacttgcttttatttgtgaaaaatcgtatttttattaaagacttagagtgaccttttattttatttaaaaaagggaaaataaaataagaaagaaaacgctaaaaaaatgtgacttcgtagttttaaaaaaacatatattcgaaaaactcgagcctaagtccaaagatcaagttacctatcgggaaggtacctcaaataagcaatacctctctaagcactaaagaggtctctactagctagattaagcgaaatatgacaattaattgattgacctagggtaccaaaaagagcttaggtgattttaaaattctactaacactagcatgccaaataagaattgaaatcgtaaccataaaaaagagttagagtgtgtacctagattgcaatttaatgtgctatgagtaaaacaacaatggttagttcagaaaataaaacacacaacatgtattttatcagtgagaatcaaacaagcatttaggcaaataaggataatatcaaacatggatataatttacaacaacatacatatttatagaattttgaaattgaaggatagagaacgtacttgagtagcaagcttagcgcttcaatgagaaacaagattagcacaacaacaggtacaaaacaatctcatatatattacagaacggatcaaagtcgatcaaatatcaaataatcatctcacttgaatcattatcaaagtgatatcatggatgttgggcccccaccaaggcccaatttattttttcatgaattaattttatgaattccattattttttaaatcataaaacttttttcatgcttgttaaaaattgataaaatcatgaaaatttttaaatgagacaaagaaaatgcatgccggaaagaaatttggcagcaaaaagtttattaaaatcaagtttttaaattttcaaaggatgaaatttaaagaaaactggagttgatttaatggaaaagatattgaaaacctgattgaaacgtgtaaattcacacaaaaaatgaaaaacatcatgaaaaggatagtgcatcaagccggccatgctggagaagggcctgtgagtgtgactgagactgcattactgatggtgttggtgctgctgttattctctctgaatttctcttcccactctccttgtgttttctttctctgccccatattggtctatgagctgtgcttgatattctagtgcccttcccataccttgggctcttccatacggtgagtcagaatcctcttcagcttagataaccacgatcttcatcatatatcctaagcctattggtttgctggctggctgagtttccttgaatccaaaatgcttcaatattcctccctgaagcatcatgtaagagcatcaataaccctcaacgcacatcaatatgattgcaatgacctagtagaactcttcttttctgtaaggttctaatacctgattgcagtttcttgcctgttcccttggttagtactgatttccggactgatctgaccagggatccttggagaattcacagattaaaggagcagaaaaaaaaaaagaaaaatccatcatgaagaccttgtcgtttgcaactgcaccagcattatctaaagcaaagcccacaggctgctgatcttttcccagaacagtaagcattatcccatggctagactgaactagttcctttcattgttttggagtagccaagtccattgagaacaatcaagtccccaccctgaaatgatggtcaggacccagcagcgtatgaacaaacgttgagaggtttttcagtattccaaaaattctgttcctgcattttattagtttcctgtgattcaagcaggacatggacaacctgctcaaggtggatatcaggattttctgggtatgacagtccctgctcttctatttttttgatctgggcaaggcaaacagaatcagaatcttcagatggatgacaaaagaaaacctctctgatatacgaatgggatatttgtaatccaattgggtgagccccctggaaatacttcgatatttaaagtcagagtgtcctgctttcttccaattgtggtgatttcatctggcattccactatgggagaaaggttgagaacactaagcttgaagtgcttgatttaaggacatttcagcacctggaacagtgataagtggctgcattagtgatgaatttaccagagatagctcttgtgaaagtgagtccccattggtggatatacatacctcattatggaggtcacctccaacaaagtttgttcttattttgaggcaacagcatcagcagcttcatcattctctctatcggactcaccaaattgtttgatatcagacacattataccctttccaggctgcctgtttccataatggatttatgggcctttgccctctccaagttattggcctcaattgtctttccatttaaagctatgacaacgtttccaggccttaagcctgttctgcttaccattttctcataagctgagacaatgaaatgaacttccactccagaaggtttaatttgaacaacggcttttgctgcacctagaactgtagctgaacccccatatcaaacttcatttgttcaaatatcatagcaagtccaatctattcagcctgacttcccaataaattcctgaactgtcatcttcatccttgtaaagattgcttccagcatctgaatatctgtgctgtcaccttcatactcagaatcatcatcatcaccttctggactgtcgtgatcatcatctctctctgttggatccccacctcttctacatggatgaaatgtagaagtgccaaaggtgggaatgaaagtgtcacattcaaaacttgtctcaattcttgtgatgtggatggcatcatatccactagcattcaatttcaccagaattagcagagttttcctgaaaacaaaaatagtcttctgttgtgtctgatttcagtaaccagtttacccattgtatcccagctttcccaagtgtccttattatcacccgcccttgcctgaagtatatagtgactgatccttgttcaaatcaacactatttttggcaaggccttccacagatagttctggtgaaacttgatcaaattgaagttcagcttgtgacgttgatgcatcagctattttgtcattgaagccaccaggaagaagctggaatcctacctcccttgcaggcatcggttttccaggttataagactgtaatagacaactaaaggcatcaactaaacgtctccatatgattgcatctccttccagagttactcattcgccatccctggcctcactgctgaatatcgcaaccattttctcctaacagccacacttcattctgttgccccctcagcatttcttggatgaaggcctgcaatgatctcaagcatactgccatgcatgcatcggtcgtagaatagggtgaaaattctgatgtttttttatcagatgctagcttaaagtccaagatagatgagaatttctgtcaaaaagatttaagcccactggactctccatgttgtaatatccttgctttgtgatcaaatactgccaattgccgcaagtcaactagctgaatagaacctcttgagctgctatatgccaacagattacagtgaattggatggaactcagatgctgttatcacctcagtaagatcctccctgtttgatggtttcatgatattaaaacatcgatcactgatttccaggttccacacgtttaattgtcttgtttgttgaaagaataaatagtgatccactgggtgttgcacaccaccttactttgctgatcttctcttcaatttcctagctccttaaagaatcaaactagggctcataactctaaaattcagtctttggcagtgaaatccaatcactcctgctcatttcaagattgccactaatttaaattatatcttgttttcgggctaacacatacttcatgaaagaatcagatgccatctcagaagccgctctcaccaacattcctcttgtttcagctctaagtctttagtccagaaacttctcttcaaagcatataatagcctggaggcaagttcacattgaaaggaaacacgtttcttcttcaaggactcctatttcatgaactcattaagcttgaaattaatgtcacaaacaccagtagataacatcaaaggccccattcagtgtatctgttttcatatggctgattattcaacagcgttcatatacacccaaagaaggtttaaatccaaccgaagcttaggccatgagtttatactgtgactcatttaactccatcaacccgtattccttcccacgaaaggaatgttatatccattgaagcatcattgcttgaacaatttaggtcagaatggagcctggcacaatgggcaagctgatttgtgagaagtggaggaccacttgcacaggctagctgaatggaacttgtgtttgcaggccttgagaacaaagtgaggaaggct

SEQ ID NO: 12064 - DNA, 29412 bp, Vitis vinifera
  Intron number 1 from transcript GSVIVT01037788001 (locus G SVIVG01037788001) derived from phytozome v7.0 (chr-ID chr1 9; pos 7872965 to 7902376)
atatttgtattttatttgacatttgatttattgtagtaagatatgaatataaaatttattgaaatgtgaaaaaaaaacttacgttgagataatgtggtggtggaagtatatttgatttattatatctgtattataaaaattgacttaaatgatttgatttaatttttaggagcgagtgcgatgctgttgaagttgttagaaatcaaaatagacctatcggaacttggatacattactagtaagggaaaatagaaatacgtaaaagaatatgttttatttatttatttatttgtggttgttatagttatatttgtttgaaattattttgtagtaacgatcaattggccatgatcaaagaaaatgatagaagagtgaagataaatgatgatgtaaggagtaatattgttgtggttaatataattaaattttaaattttgaatttgaaataagtgacaacttagttcaattgaggaaaaaattgagcaagaagtggaatgcactttcaaaagtagaaaaagaagatttcatgataaagtcaaaagaaagttcaaaacaatattcgcttcaaaagggtgtgggtccaaaggtaaattttttgtaatgaataaaaaatttcattacttatatatttgttgcaaattatatttatgtaaacatgtttgatgctcccacgagcgagtaattagagttattgaagaattagaactaaagcaaaaaacagccatagaagaaataggatttggtagcctcttgcaatttcgatataggaaaattaatcatgggttatgtctttggttgataaatagtttcaatccgaacacctgtatgttagagttgtataatacttgtatcaaattatcctcgattgatgttgaatttattataggattaagggcaagagggttgaagattgacatgaacaaagatgttagcaataagaatgatttatgtaaaaaatattgtcataaaaaagggcgattgccattagtgatgttagaaaatcaaattagggaggataaagaaggtggaaatgatttcaagttcattttgtattatttgtgttgagtgcattattgtgcccaacaatgaagtttttgtgaaatgttttttcttatatcttatggaagatatcgattcaataaagaagatgaattgggatgaatttgttttgtcttatcttgtgcacgggatcaaagagtttaaaaggaaacaacaaaatggagtttccagttgcttattgttttttatggtaatgtccttatacataatttacatcatagtgaatttcgaatttgttataataaattttgtgaactaactatatatctatgtaaaatataattgcagttattctaccacaagcatatatcgttccaacagaaatttccaccattatatactcaactttttcctcggattactgcttggggagatgatgaagtactggatataaaatgaagattgaaaaaactcggtggatatgcaaatgacaatgtaagttatagtttcgaaatttgtttaatatttgtttttatttttagtgattttaaataggatatgtgtgatatattgatgaatatattgtaagtgaaaatatgggtgatacaaaatgagataagagattgcgttgatgaaaatgagatgacaatggaagaggagaatgaggaggatgagaaatttgaaatccatccaaacaaagatgttattaaacgagtaagtgttacaatactcatcgtgagtataaatattagtagtgaacccttgtattatgatgttattaatcaagttcctatatatcactaggttgatggtgggagcttaatggagatggataaaacattttaacaattaaagacacatgtaattgattagtgtcatgtcgcaagtagtagtagctgtgaattttttttttactgaatttgaagagaaatatacaacattgaaagaactcttccttgagttaagagaaaaacctttgagagagcacgatgagggaacaaagagtgaaattctttcatgcgagaaaagtgtggaagagaaggacaataaaaaaggaaatgaacattatgttgacactttgtcaattgacaaattatgcactaaggacatgaatgaaaaaaatgaagatgtgtgtgctacatcaattgaaatgcttatcattcccgatgaaaatgtagatattttaccacttctaatcaaaagagctagaaaagattatggaaaggtatatataatataaaaaaattatttttgttacaactacttaaccattacatagtaaatatatgtatattaatgacattttccatattaggaaccattaccagcactatatggtattcctgagaatgtcatgaaaacacgtacattgagggagaggaaaccaagtaaattcaaggtctccccattcgtacacaatttaaggaagatgagaaaacgttaagtatcaaatgtataatacaaatagtttaataccatgttcttatttttgatacacaaaatatgtagctaataattatgtcttgttttcgatttagtcaatccccatgtccattcgtgaagacgtggtggatgctcaatcattcaatgtacttcaatctcttgttgctgattatgttttcaataaatcattgtcaacaaggtttgtagtatctagaatattcatagatgcgttgttacaattttagccttcatattttcctatgtgtgtaaaaaatgttttatcatattattgttgtagtgagcttcttgttgacttcgatcatgaacattgagtacatggagatttagagtacttacatcccaggcaaaatttgttggatgttgtaagtagatatttgatttatatcaaatgagttctttattaatgaaataaatttattaaagttattggttaacaacaggtaataaatctagaagcatcaaagctaaattattttgagaggcaattcataagcatacgagtataagatgctatcttcccaagacattttcagtaagctcacatttgtcttgttgtttagttacatattaagtataatatactaatattattcatattatgttgtattattagcaaatgattttgtgcaggagtcttcaaccttttttttatagaaaaacatccatcgtgagtaagtatattaatgaattggatgattgcgagaaggttagtaattatttttaatgtttaattgcatatatcaaagtttgagtgtatattgttttcacctacaatagagtagatattttgtgcactaatccattgatattgtttttctaactttataactatttatttcaatgcatgaaaattgccccggtcattggtatctttgcgtcattgactttaaaaactctcatatccaaattttggattcattgtgatcaaggagtcgggatgagttttgatttaagagtgtcaaaacagtggtatgctttcaactatttttttctccatcttacaattattaacactttcaaaataaattaggttgaattttgtcaaacgttctacaaactctttgacatagggaaaaatgtcttccaattctccattgattaggctccttcgattccaacccaagataatgggttagtatgaatatataactcacatgaatattatttatctgagctataattatacatccatttataagttgttttgcttttcttatatttttctttggtgggactgtggagtgcatgtcattaaacatatgcagacattctaaaatggtgattgcatgaaggcctctaacttatgtaattttttaaaaatactgtgaaaccaaggtttggttaatcttgattttgatgataacaaaacaaggtttaaaactgatgatcatatttcaagtgtgattaggtaagacgatttccaaagtggcaatcataaagacaaatcaatccaaggagaaatcatgaagaagaaaaccacctcaaagataagagtttttcaagaccaaagcttcataaaatctctttgtaaggctattggtgcactaggactttcaagcatttcattctttatttatgcaccaaaatcatccaagagtaatattgttttaaatatcttaagaattggatgatttcatgttttcaactaaaaccttgtgttaaatgattttcaaacttgtgttaaaaggttttaagttgaaaaagattgggtgttgagccaaaaaatggctcaacctgtcgaccggttgtgctcgtccagttgaggaccgcttgagggaggccaaaaagtttctctctctcccagtgaccttctcttcccagtcaaggttgaacctcaactggttgaggtccggtcgaggtccggttgagacccaacggtcacttgccaagcattaaatgctaacggctagtcaaccggtcgacccctagctcgaccggtcgaacccccaacgactagtttgacttttttcttctataaaaaagcttcaatattcattgtttcataagcttaaccttcccaaatctttcttgattatatttgagccttggaagagtatttttgagtgcactattatttcaaaacttgcatattcttagtgcaccattcaatcctagtttttcttgtataaattaaccttaaagttcttgtgctaggatttttgtaatatcttttaattgtaaacccttgagagtaagttgttcaagagagggatatctcttgagaagtgtaaagggtgcttggagccaaaagtccgatagggtgaattggaaccataatccaattgtattgcttgaaggcttgggttggaagccttggattaatgaaacctcaagctcgggattgaagttagaggagagtggatgtaggccgggttgcgtcgaaccactataaactcttgagtttgcattctctcttccctactccttaatttatatgcaattgtctatatattgcttattatatacttgcatataattgtctcttgcattcacttgtttaaatttgcgaaaagagaccatcaccctattcaccccccctttagggtgattaccataggttggattagcctcaaattcctaacaaatacgttgggaaatagcaagtgatttagttttacacgagggaaacagagaaaaacaaaccattttggctattgtttgtacaaatacatccacaagagcaatgagaagattattattatgacatttgttgtttttccaatatttatcatttccatatccacatatggtcatgttcatgggaagttctgacattggatgagcatacagggttgatgattagttcgttttatttgaatatgctatacttttctttgaatatgctaggcataatgaaattgtaatatatagcatcattcattttctacatgtatgattttctacgtttgttaggtatttagatgtttttttctccctctatactttgggttgctttttcaaatatatatatatatatatatatatatatatatatatatatatatatatatatatattcatttatatatgcaaaaaaatatagtataagagcttttcattcaaagggtatatagtgagtaccggtgggaagataggttagccgattcatatttagtggtcaacttgtgtgaattatatcgaggaattgtaaaggtagtgtgtattggttccattataattttagcctatatgtactggtcgattggttccaattatttcacatgcaagtattggatgcagtgtctatcaattgaagatttcacacgatcgacagaacccatttctcaaccggttgagaaactattagatgtagtgtctaccgactgaggagttcaaacaattgacagaggccatttcttaaccagttgataaactattggatgcagtgtttaccggctgaggaattcacacgactagcagagaccatttctcaactggttgatgccaattcaccagttgagttgttcaatgcaatcatgcaatttcttccagtggctaccgattaagaaataactataatcggtagaggaaaattttcaaccaattaacattggtgattaagccattaagtacatttttgaggatgagaaatgatggaaactataattccaaattaccaaattatgatttactcaaattgacatatatcattacatttaccaatttcatatgaattaaatcgaatcaattactttcctacaggtaattcataacattaaaacactatacctaatttttgaatcatcattataagtaattgattacattaaaaagtgctagtatgcttccacattggtataaatcaattaatttatggtttcaatgaaattaatttaaagtaagagaatattgaattacaattaaaaaaataaattaacaccaataccaaattaattacattgaaactccaaacctatactcctacaatgatataaatcaatcactttgtcattgcaatgaaattaattgaaagtaagagaatattgaattacatttcaatttccgacttaacaccaataccaaatgaattacatttaaatattgatactatacttctacattgatatgaataaatcaatttaccactttcaatcacaagttttttctttgaatcccaaaattatgcaatactttatttaagattacatattcaccaaagtgaaaatatcaaggagcataagtactcatttgtatcaactatagctcactgcattaaggaataccaatacctaaacttagcctatgtgtttgtttagaagaattttcactagttgttttttgagccgactggtgaggataggattgtggccatctatggttcattccattttccttttcatttaatatccatttaccatatgcatttaaaatctacttttaaattatagtatgcacatcaactgccaacgtgtactggtggagaattagttgaacatgtaccactagagaggtggctcggattatttatggggtccaaagtcaaaggcaaacaatacctatctagcttgaggggatctaattccattgtacatatctatcggtagtgcttggatgacccctaaatgttgtagtgtgaaccggttgattcatcgaactcaaccaattatgtagcgatcaaccgaaataaagtcaatctcatgggcataaaacttgtagtgcctagtggttgagaaatttagtctactagttgagaaatttcctcagcaggtaggactctattggttctacagtaatgtacatatcaaatttgggggaaataaatggaaagcatgaggccaaattatgaagttttccatttagtggtatagtttgaacttcacataattgtaaaactttaaccacattttcctttaattatattcgcatgcataactatattttgaaaatgatataaatgaatcgatttctcgtttgatcaatcattttaccacttgtaatcaattaaattataaaactagaggatagtgatttctatcaatcaacttgactatagttccaaattcatacttataattaaatacttggtttaaaagtacatattacccaaagtcttaacgtcaaatgatagaattactgatttaataacttccatcttttactccattaaggaataaaaaaaaggctacatatcattttcattgggagtatcgtttggatacccaccttcacatggtgttgtaatagtttcttcatattgctgaaatcctggtacctacacatggacattccatggttaaaattgacccgtctaattccattgcaattacttcaaaaaaatcattcagtaatccatagttaaaattaatgtttgaaatgtgtttgtttgtcgaagttacattgacaagtgcgccgaaatctatatacatgttaaatgggtcattccacaaatgctccgctcgcattccctgcattttcaaagattaagtgatgtcaattactgttgaattagatgttatcaaagtttatgttgttatataacaagcctattgtacatgatgtaaggttgcaaacatgtcaactgaacaatttgataaaggcatcaattccatttcaatgtcacattgggaagacaattactttcctgcaccatactcataatgtaatgaaaacaattatgttagttatatatgtaagtacaactaaaatgcataagttttgtggcaaatgtttattgaatcttacataccatatcacgctgattaccagtatgagggattgtagcttttggacacttttgaattgtgtgacctactattttacaacgactacaccgtcttccattttgaaattttgatgcaactttgtctggatttcctttagtgttcactatatttggatcacgaacttggtgaggacttgtggctccatctgctgctaattttttcaatttcaaattattcttatagagttcctccattctcacccttaaattttctatttcattattcacttctagaaataaagatgatgtatgtgatgcatagtaagagagcttgttgcacattgaactcaatgaagcatatcgtacaatccaatccatgtcgttatccgtctcattcaccggtggtgatcttggatgcacctttgctaactttgtccacctcttcaaaatacatgaaagaagaatctcttccaaatgctctaccttcataacaacaaccatgtgacaacaagggatgccaattgactcaaacatcatgcatgagcattttaatgttacaatattcaaccaaaattggacttcctatttaaagttcgggtgtttaaacttagataatgtgtatgcccacattaaatcatcacttacaagctctactacaaagaataactctacattcttcattttctcacgaaatttaaggaaggtttccttcgtgtatatagttgcaacatgattttcaagtatggatagtttggttgaaagaacgagtgaagaattgttcgactcaaactctgtctttgccttatttttttgaattctcattatcgccctatcgaattgttatacaaactcatatcattgcaaacgaattttcaagaatctatttagatatgcattcgtactttcacacctttgtgtgcttctcatctctctaaacaaatttccctgtaaatactcctcaacccatcttttgcgtttcgcataaatctcggtgacccaacgattcccattaagatccaacttttcaactatttcatgtcaagcctttttgaattcttccggattctctcgtatgaacatgcaccttacaaagatgcttgtaaaatccttaatatacaccttcgtgaatgcatttcgttgcagatgccatgaacacatgcgatgacacgcatcgggaatgactttttttaattgccttacacattgctttatccccatcaattgctatagatatgagtttcttattcatcattgcaataagaaatgtttccaacacccattcatatgtagcaatactttcatccatcaatagcgcacaaccaaataccattgtttggtggtgatgattaacaccaaccaacacgactaagggttttttttattggcatttgtcctataggttgtatcaaatgctagcacatctccaaaacacacataattcatttgagtagttgaattaacctaaaacaagttttctagttgacttttttcatcgactttgaatttataaaaaattgaagaatccatttctaactttccacacaagtaagccaaaacgacttctacattatcatctttaattttaattctacacattgcatcaatgtgattgtatatatatttttgtgtgaaaccatcatgctgatgtccttctgattgtttaaccttatagtccataatttgtgttgttttaacaccaactttacatagaacatcaacttatgcctcatctggattacttactgtccgatgagattgaaagaattgtgtgttgatagcatcgaccaaatgatgattatgttctcctctaaattcctttacaatctactttccaacttttctatccaatctaatacgaaatgcagcttcacatccaactctagtcaacgatcatggctcacactgtcgattgtcaatttgaataaactttgtcacttgatgtctttctttggaacacacccactttcgagatattatatatccattcttgtctcgtttcaaatcatctttttgaatactaaatctggtaactttgaaaaacaagttgtaaaatgtttcaacctcatctatgcaattgaattgcaatttttagaattcttcaatcgaaatacccttcaacaccttctctttcaaaaaatttgcatcatagtggtaactcccgctagtatatgtattatcatggaccatatcatcaagtttcacttcaaattcctgcttgattgttttctccatcgccgattgcaacacctacattttagaaaacatgttaaaaatcgttggaataagaccttaatgaaggatcatatcacttttatataaatcaattacataattccagtcaacctataatgcatacgtcatccatttttgaggttgtcagtaccggttgtcatggtcaattcgaccggtttcaaactggtcgacctattggtgtttatattgaaactgcttttactttgcagtgtttattggctaaaggaaaaagtcaaccagttgagaaaaaattcaaccggtatacactagacacatgagtctttcccccattaatttgaaataaaaaatgtcaactgatgaatactactaagaatgtgttatagacaatgataaccttcatttttttaaacaatatatatatatatatatatatatatatatatatatatatatatatatataattttaaaattacaaataggtttgggaaatattttccccatccatttgaaggttaggggtagttacattgaaaaaactattatggttttgtttaacaaatcattattgagttaaggatgataccttgacaatggaaagtgcaagtgtgatgcaacttcaactgaagaattgtcttctggatgtttttttgtatgcaaggctccaataaagagaagacctcgttcactctccagctctcttagaaaatgttgctttccaaataactactaacatatctaggtggttggttgttgaagtaattacatatttgaataggttgccacatgtagaaaaacaacttgtacaatggtacacttggtggttgaaagttaccatttttgcttcattttattaggtgacattaaatagaacaataataggtaggagagaaagtcagcctaatgtggatgattacacatttaaaatggatctatgtataactttacaaaatataaagtggagatatggacttgatttataatatttacatttctcaatggagtttaccttaattagtttaattaagttgtcatactatatcctacatatgagaaaggttagttaattaacctgaattaatttatataagctatcgtactatatcctagttattaaaaatttaatcaattaaccttaattaatttaattcacgtatgatgttatatcctaattatgagaaatatttttcaattaacctgaattaatttaaaggccgctatcgtactatatgctagttattctaaattttaatctctttcattttggctaatttaattaagacatcatcctatatcctacttatgagaaatgttagttaattaacctgaattaatttatataagctatcgtattatatcctagttattacaaattttaatcaattaaccttaattaatttaattcacatatgatgttatatcctacttatgagaaatgtttttcaaataacctgaattaatttaataatgttgtcatactatatcctagttattataaattttaatataaacaccttaattaatttaatgaagttgtcatagtatatggtaattattataagaacaaaataattaccctgaattaattaagtgaaggtatcatactatcctacttattacaaatatcagtcaattaccctgaattaatttaattaagttatcatactatattctacttattataaattttatttaattaacctcaattaatttaattaatctagatccaaatattttttcatataatcattgacaaattaaatgagaagtatgagaaatttgaaattaataaaatagaaaaaaaataatgtttcatctatataggacattaatttaattaaaatgtcccagtcttaaactatatgcattttcatttaatagcaaggtcgaccaatctaggaaacccacttataatcctcaacccttccctcttctcttcccttgaacttcatcttcccgaaataccttaacccgaaatcaacttaccatggcaccaaaacgagcaccggcagaagcaagctttccccaggaggacttttatgctgagtcaaatgactctacaacaaactaccttcaagataatgaagatgattgtgagggtattttccctccaataaggaaatcaaaataagattcctttcagtcatatgacatcatcaagctctctccattcaagcttctcatgatgctccacaaataagaatattcttcagataagtagtttcaacactgaaagcatcaagcatgtgactctacagtccaaagcagcctgtcaatcatcatcactcagccgaaagtaagattctcggtgaaaaagtctaaagtgctacagtagaaagtgacttttactgttcacttttactattcactattcactcatgagattactattcatgcacgggtttcaaaagcaaacagtgctctatttcctgattggtactgtttaatattccatttttagctatttaaggaggctcgatcctcatctgtaagcacgtcttcttttacgcctcattttaacttctcatttttcatttctctctctctctttctcttctttctctacctctcaccatgtaagctcccgagcaaaaagctttcttcaaagctttcctcatttctcccattgtaaggtattcaacttctccttattataagtattttttgtgtttgttttcaagttatgtaaataaagtttatggttcattctctttaaatttctttgtttagatatctgtgtatttttcgatttcttaataatatacatttatcatttttttcctagatgcttttatcaagaatattttatttttacattattaattattaatttgtttttattttaattgtatttttaatattttattttgattttatcattgatggcaactaatggagttgcgatagataagaagataacttgtgtcaaggatgatcaagacgaaaggaaagagatcggatgtaccaatgaccaacgatagcaaacagaagaccccgaaagtagcaaagagcagcgccaacaaatggaagaaagcggtggtcgatgaaaatgttgagatttgtaagaaggccacctttgatcgagctactatagaccctccattttgtccttctagcacatgtcctattatgtgtttgtttggtactttacaacaattccctagtggcccattattactcatgtagcttatcttataggagccaccttggagactctgattgagagatttatctaaccccattttgacccttgacaggtctaatctagacttaggcattgacttaaatatcctaggcaccttctagcttacacacactcactttaggtcatttaggcacttttagactcactctttatatgacttgcatgattgcatgacctgcatgactcatgtgacttgtatggttttctttattatttttattttattttattatattataagttttctatctcatatttcttggcatttttggcatgagaaaatagactgttggaaggagaattacgagaatttttaagaaaggaaagtggcaaagattttttatggaataatgtaagaataggaagaggagaagattccaagctacaaggaaagaacaaaaaaaaaaaaaaaagtaattgaaaaaaaaagaaaaaaaaaaaaggggttctcaaaagaggatttttttagcgtgcatattagatctaaagaaaatggagaattttgggaagtgctttagcaaaaaaaaaaaaaaaaaaaagaaaaaaaaagaaaaaaaaaaagaaaaaaaaagaaactggtgttcatcgtttttttggtgggttttggggaagcagaacctatctcgcttgaagctgagtaatacttctcaaaggtaggttcttctaggtacggtcacatgaaattcgcatcttctcatctctatatgatttttacattttattttgcaagtcctgacgttatcttgttgattgttgtggacttttagggttgatcgtttctcatgttgaatgtgtttaaacatgagcatgctctgttttggcttttattttggtctttttttaatctctactgttaatggttgatgcgtggaattgtcacagatattgctatctaagaatcgtaccctttttctctaatatccctacttgtttttcaagcccattgacaaaacaatgaaatgtggcttggcttggttattcactcttttcctgtttttactctattttctggagttcctattttcttgtgtgtgtgtgtgtttatttatttatttttttgggtaccctttcttcattaggcaacaatttttggaattcttggaatgggagaattgagactatcttggggagtaaaagaaaaattagaatgtctggatacagtgttgaatcccaattctctgatcttctgaatttatattgtgactttggcatgttaatggcctttattgattaagtgctgatgatcctttaaacctgtggctcggagaaggtcaccaattgcatcattcgggttcttctgtttctattagagtcattagtaaaaaggaagatgaggagcagaggtttttttttttttaaatgccgtgacgtgatcatcattccattgtcacattgcccattttgtttgagaattagattcaatctggaccagagatatacatactaacagaatgatgctactgtggcaaagttattgatttcattgatggcattctattggataggccaaactcctatgatccaattttggtgcattgtttgtgcgggcaagaattaaaaatcaatttaaaaaggtccttataaaacaagaaactgaatttgaaaccaaagcggtcgtgagtggcattttcaagacgttgttcctaattccaaaaaacattccagatcagtaggagacttcaagatggaaattaaagaacttcccatgactactaaattcgatactttgttttgaacataatggagtctcgtgagtcctggtatcatggctctatgatgtatttctcgtcaacaaatcctcaggttatattgaacgaagttcaaaggaatctcgagttcttgaagcctggtaggacaacattgattcagaaaacttcgcaaattatcacaagaataagagagatgaaatttagtttcatgctctgtctgactagttctatcgtgcgcctgagcactacaaacctgtgagcgaataattcattaaatagcctcaatataatccaggactttatgaaggttattttccaataacagtcttctaaatcatcatggcacaaagtatgaccccttttccaatgaacagaatgctaacagtctctgttactacttttaaactggttttttatgtgaaatgacaagcttagattcaagacttattattggtttgatttggtcatgaaagacgaagtgttgcgctcagtagcttggttgattggcaccaatgatggcaagttttggagcattcatatcagctttgaagagcccatgaaacggtatgttgtggatggagacttggagttagtttttcatgcatgaaacaatgatggcaatataatgcaccagtggctcgggtcccagaacttgttcctatgctgtgcttaatgggtacataatttcacttacaggctaacgcatgtaaaaacaagaaggctacttggtttgaagaccaaaatgtggttcacgggttaactaggagaaatgtgaagcatgtcgagagacaactcgtttatgtttatgctattattttcatgggtttctcacttatacttcagagttcagctcaaagatctgaagaggtctgatgaagacaaacttcccatgaattaccaaaaaaatataaacggtggttaaagaggtagtccggatcagtaatggaccagaaagtgggatactcctgatgaagtttaccttggaggtgtcaaattgagttctacaacatttcattctgtcacaatcaacaagggacggtctggaattcatgaaaatgctctcaatagatcagtctcaataaatctcagtggtggggatggtgtatcaactaccaaagctacagagaaagcattggttatcgaatttgagtagcataacgcatcaggcaattccagtaatggtcctgataacttagtctctatgaatccaccttcttcaaaagattagattcctaatggaactataccaaatttctctgaattaggaactcagttagaagttcatgacacttgtcagggtgaagtggagtttggtgtgtccaatagagagaactgtaaggccgagttgactgatagtgaaacaacattagctggacttctatttgggagataaccttgcagaaagagaactcgagaagacaatatggaaccactccctctcatgaaaagtgaaagtagatcattcataatatcagtatccaatcaaaatcaaagaactacatttgtctattttttttttaggtttgggaatggaagaaatcggaaaattttatcctgaagacttattggagaagttagagaatgagtcgaatactgtcaagtctttcacaaatcataattatgaaaatgatataaaaaaaatgcaagtttagtgcccggtttgctgagaatctgatcaaagagattgcagctttgaagttggagatgtttgtctacgacaatagctcctctcattacagttgagaggtagaggatgttgcatgacatttttctcaaagcgaatagcagggaactacagacagaagtattaaataggatgtttaaggttttcttaggtcatcttgaaaactacaaatggtgttaacagctaagggctatgcctctccctattttaaatatggaaggttttccttcatctttgcaagggatcatcttaaaaattcttgaatatgctgcgactgttgtgaactgcatttctgagaaagaattgtttgcactttgctttttgttgaagcagctaatcacgtttgaattaaagcacaccattctttcattttttttgtaaaactcctatcctttgatcaatagtacaataaagtgctgtaaaaagttggtgtgctggaaattctgttggatgatctgaagcagcgcaagtttcttttgggtgcaaatcaacacaatggtaatcctgattaactggagagaaaatctatctccagcaacttcaagaaacactctggcagtaaggatgatatcatatcttcatcaaagctaattaaatccggttctgggaagtttcctctttttgaaattaaaagtacaattgttgttgcatgagaaaaagacttccaaatttaaaattttcggaatcaaggagagcataaaatctctgagcaaatctaaatagcaaaggagaaacaagagggtggtggagtttggtatcttttaggtagctaatctcaaaagtataggaatgtaggatccatcaaaaagtctctagcttactacccctttttccttcacacacacgaagttactgaatcctattgactgagggttaatttcttattatgggcaatatccagattccatccttcatttcgatcatggtttcatcttctttggatgatcaagaggaaaatgattctgcatctcaaccttctgttcctaattaagaattctccggttgaaagtccctattaaaagtatttggtgattctcatagataatttgatgattcgacatgtccatttgatgaatatggattcccattccagcttcaggccaaatgctttacagattcagggcaaaaactgcactcgaaacgaccaatacccttttctcatatctgatttctcattctggagcatatcaagtaaccatcaaacttcctcatcagcaacctcgctaaagagtaatcttcaaataattaaaaatagagtgcataatgacatgcatgccaaaacaaccttgtaaggaggaagtcattgaaagaattgtggggctctctaggtattagataatggatcactactagtatgagtttttttacatgttgcagttggaaattagagatgagcatgatgaagtcaagcatagtgaagctcgcatgtttagaagagagtgatttgtcgtccacaattgttgatcaagttcatgtttggttagtttttaaggaagcaaagagtttctccatttaggcatgcaacttatggatttatacaatacctttcatattagtctgcgaaactttttatgacaaccagttagctagcttgttgggctttgtggagcctagttttgtttgatccggtttgacgacccgacccgaataatattgcatggctttttaatgagagatttattaaggcttgttgggcccgtttagcccattgtggaaccaccttttgtaattagggttttttagtgtggtggggttgccgtgttatatatatatagagaatattgtagccgctaggttgtactctgtattcttctctgataatagtgatatccctacaactctgtagacgtaggcaaattgccgaaccacgtaaatactgtcttgtgcgtgtgattgtttttctttggtgtgtgttttctctaatttttgtttctcacgggttgggaattcggtttaattccctacaacttgtatcagagcctagggttaggtttgagtgggagcaatggcagaggaagtaggaaaggcgtctggaatagaaaagtttgatggcacagactttgtgtatcggaggatgcagattgaagattatctctatgggaggaaattgcatctgccacttttggagacaaaacctgagagtatgaaggctgaggaatgggcacttcttgatagataggttctaggagttattaggttaactatgtctaggtctattgcacataatgttgtaaaggagaagaccacaacagatttgatgaaggctttgtccggtatgtatgaaaagccgtccgcaaacaataaggtgtatctgatgaagaaattgttcaatttgaagatggcagagaatgcatcagtaacacaacatctgaatgaatttaatacaatcacaaaccaattgtcgtctgtagaaatttattttgatgatgagattcgtgctctgatcgtcttggcttctttgccaaacagttaggaggcaatgaggatggcagtaagcaattctacgggaaaggaaaagctcaagtacaatgatatacgagatttaattatggctgaggagattcgccgaagagatgcaggtgaaacctcaggatctggttctgccttaaaccttgagacaagaggcaaaggtaatgacagaaattcaaattggggtagatcaaattccagaaattctaatcggaacagaaacaaatctagattaggccaacaagtataatgctggaattgtgggaaaacaggtcactttaaaaggcaatgcaaaagccctaagaagaagaatgaagatgattctgctaatactgtaatagaagaggtacaagatgcattacttcttgcagtagacagtccacttgatgattgggttttggattcaggagcttcgtttcataccattccacaccgagaaatcatacagaattatgttttaggtgattttggtaaggtgtatttggctgatagttcagccttggatgttgtgggtttgggagacgtctggatatcgttgcccaatgggtctgtttagttactggagaaggttcgacatattcctgacctgaggaggaatctgatttctgttggacaacttgatgatgaaggagatgcaatactatttgttggtggtacttggaaggttacaaagggagctagggtattggctcgtggaaagaagactagtactttgtatatgacctcatgtccaagagacacaattgcagttgttgatgcaagtactgatacaagcctatggcaccgtagacttggtcacatgagtgagaaagggatgaagaagttgctgtcaaaaggaaaactaccagaattgaagtccattgattttgacatgtgtgaaagttgcatcttaggaaagcaaaaaaaggtgagcttcttgaaaactggcaagacatcgaaggctgaaaaattggaactagtacacgctgatttgtggggccttctccggttgcatccctagaaggttcaaggtactacatcacttttattgatgactcaagtagaaaggtatgagtttattttctgaaaaataaatttgatgtatttgaaatttttaagaagtggaaggccatggttgagacagaaacaagtttgaaagtaaaatgtttgaggtcagataatggaggagagtacatagatggagggttcagtgagtattgtgctgcacagggaattaggatggagaagaccattcctgcgacaccacaacaaaatggtgtggctgagcgcatgaacagaactctcaatgagcttgctagaaatatgaggttgcatgctggactactaaaaactttttgggctgatgctgttagcactgtagcttacttgataaactgaggaccatcagttcccatggagttcagacttcctgagaaggtttggagcggtaaagaggtgaagttttcacatttaaaagtttttggttgtgtttcttatgttcatattgattctgatgctcatagtaaacttgatgcaaaatcaaaaatatgttttttcattggctatggtgatgagaaatttggctgtaggttttgggatgaacaaaacaggaaaatcatcagaagtagaaatgtgatatttaatgaacaggttatgtacaaggacaggtcaactgtagtgtcagatgttacaaagatagattaaaagaaatctgagtttgtcaacttagatgaattgactgaaagtattgtccaaaaagggggtgaagaagataaggagaatgtaaattcataggtagatttgagtacacctgtagctgaagttcgcagatctttcaggaacattagaccttcgcatcattattcacctgttttaaattatctcctattgactgatggtggtgagctagagtgttatgatgaagccttgcaagatgagaattcaagcaagtgggagttagccatgaaggatgagatggattccctgttggggaatcagacatgggaactgactgaattgccagtaggaaagaaggctttgcacagtaagtgggtatacagaataaagaatgagcatgatgctagcaaatgttacaaggccagattagttgttaaagggttccaacagaaggagggcattgactacacaaagatattttctccagttgtgaagatgtcaacaattagacttgtacttggaatggtggctgcagaaaacttacaacttgagcagttaaatgtgaagacaacattctttcatggtgacttggaggaagacctttacatgattcagccagaagggttcattgttcaaggacaagagaatctagtttgcaaactgagaaagagcttgtatggccttaaacaagctcctagacagtgatataagaagtttgacaattttatgcatagaattgggttcaagagatgtgaagctgatcactgttgctatgttaagtcatttgacaattcttacatcatattactgttgtatgtggatgatatgcttattgcaggtctgacattgagaagattaataatctgaagaagcaattgtccaaacagtttgcaatgaaggattcgggagttgcaaagcaaatccttagaatgagaatcattagagacaaggctaatggtacattgaagctttcacaatcagagtatgtgaagaaagttctcagcaggttcaacatgaatgaagctaaaccaatgagcacacccttgggtagtcatttcaaactaagcaaagaacagccatcgaagacagaagaagaaaaagaccatatgagtaaggtgccctatgcctcaactattggcagcttgatgtatgctatggtgtgtacaaggccagacattgcacatgcagtgggagttgtgagcaaattcatgagtaggtctggaaagcagcattgggaggcagtcaagtggattttaagatatctaaagggttcattagatacatgtctttgcttcacatgtgtaagtttgaaactgcagggttatgtagatgctgattttgctggtgatattgatagtagaaagagtactactgggtttgtttttactctatgtggtacagctatatcatggacttcaaatctacagaagattgttactttgtctactatagaagctgagtatgttgcagcaactgaagttgaaaaggagatgatttgggtacatggtttcttagatgaattgggtaagaagcaggggatgggcattctacacagtgacagttagagtgcaatttttcttgccaaaaattcgacttttcattcaaagtcgaaacatatacaaacaaaataccactttatctgttatcttgttgaggataaactggtgatacttgagaaaacttgtggatctaagaaccctatagacatgttgactaagggtgtcgctattgagaagttgaagctgtgtgtagcttcaattggtcttctagcttgaggacaggaggatgagttgtaggaatgagggattgtttcttggaggataacgatttgatgttggtgattggactagtctccaagtgggagatttgttgggctttgtggagcctagttttgtttgatccggtttgacgacccgacccgaataatattgcatggctttttaatgggagatttattaaggcctattgggcccgtttaacccattgtggaaccaccttttgtaattagggttttttagtgtggtggggttgtcgtgttatatatatagagagaatattgtagccgctaggttgtactctatattcttccctgataatagtgatatccctgcaactccgtggacgtaggcaaattgccaaaccacataaatactgtcttatgcgtgtgattgtttttctttggcgtgtgttttctctaatttttgtttcttacgggttgggaattcggtttaattccctacataactatgattgtgaatctttgaaacagaaaattcttcctttgatgttttccacacatccactttgacactcaaagagggttctgaagtgaaaatctatgacgaaatgataagattgggattataggcactgatagaaaattttcgaaagtatgttcaacttgccccacactaatagctcggtattgcccagaagctctatagatatgacaagcttcaagaataaaacgtctttgggtactggatatagtagaagacaaagatctggaagtgtttattttagcaccaatgaggaaaggccaccttcgatgcacagtcctgaacagccctacgactacccctcttctggtcaagttcaagattaccttgctactagttctctctttcataggcatggccaccttttttccttcagtggtgtgccgctttgaatgcagtggccctgctactctgacaaatctgatccaccttggggcatacatatggaattttgataaatcgggttcagattattgtctgaaatggaacaatgagatgagttatggagtttcttctatcaagatgacattcatttgctccaattgctcaaatttcatccttagacttggtatctctaacacctatcagtctctaattcctcttgctcctataccagcaccaagcaaatatttagaatacaaaagacgatcctatccctaggttcacaattttgggatagaaatgcatgttttcggaaaaaagaaactatcgacagagttaggcaagaatgaggcttcagctgtagtactacaagtggaaattgatgacatggatggaaattcctttattatctaaacaggagagattgaagttcgagatacaaaagaagtcttatgaagttctcaacagaataggctgacagtaactttctaatttcagtttctcaagttaaaagtaccgaattgggtatgaatcacatgcaatggaaagtttgagatttcattttctctagtggaccatattctacctcatcaaatatcatttcttccgagatgaagcaagagcctgaataatcgatattcatttgattttcacgtctttgctagagagcccatccaaaatcactttaacattctacatttataaccatacggtagaaatgcccataaaatagttgatcttgttggtttagatgcaatgggcacatcatgcttatttctgagaagatgtctggatctgctagaaagaaactcatcattccaataagaaaataattccatctaatttagacattcatggctcttcgctcaccaaaccagagacaattcaatgggcatctaaaacaatttctacaaagtctatccagcttaaggaagctcattttcttcagttcatggacatgaaaatggcatctaaagaccttgatgtgcttctttttgcacccaattaatagttcaagtaagatttggcaggacttcaaggaataacaagcgtgaaagaagggttttagacttggaattatgggtaaataaagaaatcattgacaaacaaggaaacttttcattcaccagcgtgaaatatctttttcatggttctacttataaacacctttaaagatttttggcattggcatttgcagctatccgtgttcacctacagaagttcaggttgatagttgacatttaatatcatagatcataactagacaaatcaaggagacatcaacttttggtcacatcaccagttcccttcacaactcgagtctacaatattcaagtaatgaggatttaacaacaactgtaaccattggcagtatagtctcaagtacattcccaaggtctattcctacacaggtacattgatacacattaccatttttctaatttatttatttttcccttatgatattacacctttaaaatctggatttaaaaaagaaaaccttttcattaactaattcctgttttctttaaaaattccatccttagaaacttccaagcataaaatccagatttcaacaaatcttttgctatcactttcctttgggcatgcattttcactattttattttattttcaactattttcatggtattgttgattttcaacaagcatgaacaaacttcatgattccaaataatggaattcatagaatcaactcatgcaaaaataatttgggctttggtgggggcccgacatccttgatattttcttcaatatagcttgtttgatattttattgattgtgcttcctccttatgctacatgaaattattttacatctattattgagctaactttgttccccattttagcgtttaactcgttgtctaggtatgctttctatcaccacattttaaaaaatttcatgaatatgcatgtcattgcctttgtttggtgtcatgcttgattgtcttgatatttatttgattgtttgatcatctttgataaaaatacatgttgtgtgttatatttccaaactaacctttgatgtcttttgatggtacttgagaagtagtttaggtacacaccctaaatcttctttatgattgtgattagttttcttgtttggcatgctattttttttttaaatcacctagcctacctaggtatctataatcaaccaattaattgccccatttcccttaacttagtcagtagagacctttgtaggtcttagaagagtgctcccttttagaggtaccttcctaataggtaacctgattcccagacctagactcgggtttttcaaagacacgctttttcaaaaatatggagtcacttctttagggttttctttcttattttattttcccttttaaaaataaaataaaataagtggcgactccgacttttccaaaactaagtgttttaccaataaaagtgagtctcgccaattgagtgggggcgcatgcgaaaaatgcgggtccacagttacgttcacaaccctagagctagcacaaagatttaatctttattttgccaatcggattgtaatcccatgtaggaacatttattttttaaagctcagttatttccaatttgataggcttttcactagaatgggttggcttcctattgtgttcgtgaaagagtttctttatcctagggctgtgaaatgtttctattgcaatatgaaatttgaacaggaaggatcgattagtacaaacgttaatggtgtacaaataaattttgatgtcgctcagctttgtctaattttagacattccaaatgaaagagcttgtttatatgaagcaaagaagtggccaagggtggaaggtttcaaacttgcagaagttatacaatggctttgtggttattagaaagctggtagacgaacatctcattcattgactgtgttgagtcgcatcttataacacatgatctcgtacatttttatccctaaaggacatcgagatgatgtatctttcttggagacatttctgattgacaacattctgactaaaaaaaaagattaatatgggttacataattttccagcatatgaaagcttgttcattaagcgaagattcagtgctcccatatgacatgtttatcacaaagattgtgaaatacttcaatgtgaatttacggaatgagacagacggtaagaaactaaaatcatttgatacatgtgaaaccaaggtttggttaatcttcattttgatgataacaaaacaaggtttagaactaattatcatatttcaagtgtgattaggcaagacgatttccaaagtggcaatcacaaagacaaatcaagccaaggagaaatcatgaagaagaagaccacctcaaagagaagagtttttcaagaccaaagcttcataagatctctttgtaaggttgttggtgcactaggactttcatgcatttcattatttatttatgcaccaaaatcatccaagagtaatattgttttaaatatatcttaagaatcggatgatttcatgttttcaactaaaaccttgtgttaaatgattttcaaacttgtgttaaaaggttttaagttgaaaaaggttgtgtgttgagctaaaaaatggctcaatcgattcaaccggttttgctcattcgattgatgatcgattgagggaggccaaaaaagtttctctctctcccagtgaccttctcttccctgtcaaggttgaacctcaaccagttgaggtccggtcgaggtccggttgaggttcggttgaggcccaatggttacctgccaagcatttaatgctaatggctagtcaatcgatcgacccctaactcgaccggtcgaaccccaaacgactagtttgacttttctcttctataaaaaggctccgatcttcattgtttaaaaaacttaaccttcccaaatctttcttgattatatttgagccttggaagagtatttttgagtgcaccattatttcaaaacttgcatatctttagtgcaccattcaatcctagtttttcttgtatcatttgagtttaaagtttttgtgttaggatttttgagagatcattcatttgtaaatctttgagaggaagtttctcaagtgtggggtatcacttgaggggttgttcaagagtgggatatctcttgagaagtgtaaatggtacttggagccaaaagtccaagagggtgaattggaaccataatccaattgtattgcttgaaggcttggtttggaagccttggattagtggaacctcaagctcgggattgaagctagaggagagtggatgtaggccgggttgcgccgaaccattataaactcttgtgtttgcattctctcttccatactctttaatttatatgcaattgcctatatattgattattatatacttgcatataattgtctcttgcattcacttgtttaaatttgcgaaaagagactatcaccctattcaccccctctctagggtgattaccataggttggattagccttaaattcctaacaatacatatgatcggccttcacttcatcgcatgcaatttgttcataaaatagacagtttgtgggaaatgaagtcttctatgccccctttagaggtatatgtgtcttcagacgaagggttctccaaggatgaggaatatgaaaatcaggatgtagaggaaagaggtattgaaaataagaatgtgacagcaataccatcaaacgatgatgtaggagctacaacggttacaaattctcgttcataaattcttaggaacgagtctgaggcatccgataacctcaatgcctagattagttcccttggtatccgcttagaggagatgatgttagccaatgatcgacgtttgacatctttaatttggagcggcgcattgatggtttccaagaggaattcaaagtgggtatgcaggttatatgagcccaacatgatgagctgatggtattcttgcgagcccaattcgcacttcatgcccaaggccataaatgacctcttctacattttccactacttatatagttagcaaagttttgtttttttttttttattttagacatttgggtaatgtaattaacattttctatttatgacttgtttgggtattgataggccattcatataaatggaataaatgttttccttcaatgctgatgatggtatatggatgatgtagttacttatacatttatggattatattatgcattgctagatttagcaagtaatatggtacttctagcttaatttgatatgtgtcatgcgaagattggaatttccagtattttaagcttctttaacacttcttttctatatttataattgtgggtggacatgatataatatgggtttccattgggatcccatgaatttttaagtcttacattattgattgtccaatccttatagaagggtttcctactcatcacatgggggtaatggtagtttgctgaccatagcacaacgagcctgatccttaacactactatatcctacatatccgggccttgaactcttgctttcatggttgtaaactacaaatatattttggatcggtggttactactcataagaatttatggtttttttattttatttcttggctttcctgcttattttatttccatttgcatcaaaatgtttttttttttaaaaaaaaataacaactccaacaagaagaaaaagcaagtcattgtcatctctat

SEQ ID NO: 12065 - DNA, 1784 bp, Vitis vinifera
  Intron number 3 from transcript GSVIVT01036232001 (locus G SVIVG01036232001) derived from phytozome v7.0 (chr-ID chr1 4; pos 8528984 to 8530767)
caattgttattgcgcatagtgactatctgcctctatagaatttgcatgttgtgttaagattctgattttgtatgttatgcctacaactcattttgcttaattctatgtgttaagtgattctttgtcatcttttgaaacttcataaaaggaattaatggaattgagatcatccattttggggaatgctcacttagaagtattagaattggattttgacttggaacaggaagcttcctaattttatatctccttgtcattgtggttattttaacttgctgaatttttagtgatggtatatggctaatgttggatcttattttaatctgcttaattgctagtgtaggtttatctataacccattgaaatacttgcataacaggaaatttaggtcctgtttggcaatgttttcaaaaacagttctcaactgttttcaggaattttgtttggaaattaataatgtaaaacagttgtcttagcttattctccatgaaagtactgttcacttatatacaatccaaaagtttaaaaaatattcttcacatttttaattgtatctcagaattttctacaaaaaacatatgaaaacacctcaaatttgttaattttttttttcttcttttttaattttcagttaaaagtttgacaaatgttttttttaagttagaaaacaattttttttttgttctaaagaacagtttccaaataagcccttagttttctccctcatgactgttttactcttaataagaggaatgcttaaaatggtcatggtcagaaggagaatcggatctggaccagaccccgtcaacccaacccaagcctataccaactaaggcaaggttcactgacaatacttaacaaaatctcattttaatgagcattcaaataattaagtagcatattttcacatctagtttcatgaaaccagtttaatagatctgggtgtgcattaatggggattacttttgcgaaaagaacatagatgttgtggctataaaattatatgtgctactggttcactggaatttgatatccatggctgatctaaggacttctgtaaatggtataacatctttttgatttttaaggataaataagtgcatcataaatcatatcaatgtgtttggactgaaaaaaaggaagtcaaattttgtgctacaagattgacctgctgctgtagatttcacaaagctgtcatgtagctaaatgttttaggttccggcattacagtctcttttctgggctgtgcgtgtatctacggggtgctcattctagagtagtgaccttttgctctgtgcttgcatgtaattatttattgaaaaccacacattttgtacggttgaagtaatgctatctgttctctacttcttaaaagttctattatgtattaactctgatagttaatcctgttgattccaaagaaattctgttgtatagtcattcatatttcatgttgtttgcacacttgagcctatctagcaatttatttcctaagagttggtttaataatctaaaaataaaatttaatgttacctcatttgcctcatatttattgatcttcactgtttggtacatcattattaatattcctatgtgtgtgtgaaggttagggagggtttgttgtttttttgataggcaatggggagtttatctatatctatctatatatgtatctttatatgcgtgtgtgggctcgtgtgcccttgtgtatgctatttatttatttatatttagaattatcttcttgtgtttagtcattctgtttctgtttcatcaccaggaaa

SEQ ID NO: 12066 - DNA, 5491 bp, Vitis vinifera
  Intron number 5 from transcript GSVIVT01013341001 (locus G SVIVG01013341001) derived from phytozome v7.0 (chr-ID chr1 2; pos 12374206 to 12379696)
cctccaaggctgtctcagaagagtataaccgttggattattgcaaataacaaggcctgctgctacttgttagcagcaatggatgaagtgcttagaactaagcacgagggccttgaaactgcaagcgagattatggaatctctacagcagatgtttggacggccctctgagcaggcccgccacgaagctgtgaaagctgttatgaacagtaaaatgaagaatggttcttcagtttgtgagcacgtccttaaaatgattcatcactttaatgaggctgaaatcaatggagctaaaattgatgaaaatactcaggttggcatgatcttagagacgttttctccttctttcctccaattcaggacaaactacatcatgaaccataagaaatgtaatttgacagaattcctaaatgagctgcaatcttatgagacccttatagatgataaggaaggcaagacaaatattgctaaggctaatgcagttgtgggaaaggcttcttcttcaaggaataagaagaagagaaatgtgagaaatcaaaaggacaagaagaagatccaaaagaagaaaaggaaggctgttgagcctaaacctaaggggaaatgtttccattgcaatcaagacggccattggaaaaggaactgtaagaagtaccttgatgagctgaaacaaaagaagaaacaaggtaaattagatttattagtaatggaaacatgcttagttgagaatgatttctcaagctggattattgattcaggagcatctaaccatgtttgtatttctttgaagatgcttgagtcatctaaggatcttgaagagggagctttcatgatgagagttggcagtggggcaagagtttcagcgacagcagttgggacagtacgactgtcatttgctaataataaatatttgttattgcacaatgtttattttattccggatttcaaacggaatttgatttcggtttcaaagttacatgaacaatttatttctgtttcttttgatgttgactctgtttcaatctataagaatggaatgaatatttgttcaggttatgttgataatggtatatattttgttaaaccaattttcaataatttacttcaaaccgaaatgtttaaagtcgctgaaccaacccctaaaagaagaaagatttctaatgataaaaatgacacatatttgtggcacttaaggcttggtcacattaacatagatagaattgaaagagtagcaaaggatggtcctttgagagagctaaaagttggcactctaccagtttgtgaatcttgcttagaaggcaaaatgaccaaaatgccattttcggctaagggtgaaagagcaaaagtacctctagagatcatacatactgatgtatgtggacctttgaatgtcaaagcaagaggggactatgaatatttcgtcacatttattgacgattattcaagatacggatatgtatacctgatacaaagaaaatccgaggcttttgaaaagttcaaagaatttcgtgctgaagtagaaaaacaacttagcaaatcaatcaaaactcttcgatcagatcgaggaggagaatacttggtttatgaattcaaggactacttgattgaaaatggaatattatcacagctcacggcacctgggacacctcagtaaaatggtgtagccgaaagaagaaatcgcactttgcttgacatgatgagatcaatgatgagctattcttctctgccaacctcattttggggatatgcattacaaacggtagtatatattctgaacatagttccatctaagtcaatccctaacactcccttagagttatggaatggtcgcaaacctagtttgagacatattcgcatatgggggtgccctgcacatgtgttaaagggaaagattgggaaactagaacctcgctctgaggtatgcatgtttataggatatcctaaaggaacaagaggaggtctgttttatagcgctcaggataacaaagtatttgtgtcaacaaatgctacgtttctcgagtataactatatggcagattttaaacctagaagtaaagtagttctggaagagttgctagttgatgagatcagccccacgccaacaacagttgttgaacgacaaagaaaagaaaccactgctcgagatctaacaccaccgccaccatgacgtagtgggagggaaataagattgcccattcgctatcgtgaaaatagagaagcacaagttgcagtcactgatggcagtgatgatgatccattgacattcaaaatggcgatggatgatgttgatcaagagaaatggcaggaagctatgaaactcgaaatagagtctatgtactcaaattcagtctagaagcttgtagatctaccagaaggcattaagcctattggttgcaaatggatctataagagaaaaagaggacctaatgggaaagtagagactttcaaggcaagactggtggcaaagggttttacccaaaaggaaggagtagactatgaggatactttttcaccagtcgctatgctaaaatccattaggattctcttgtccattgctgcttattatgattatgagatatggcaaatggacgtcaagacagcatttttgaatggccatcttgaagagactatttatatggtccaaccagagggtttcgtggtcaaagaccaagagcagaaagtgtgcaaactacaaaggtccatttatggacttaagcaagcttctagatcttggaatatcagatttaacgaagccataaaatcttatggttttgaacaaaatctgggtgaaccttgtgtctataagcaaataggaggagataaagtggttttcttagttctttatgtggacgacattctactcattggaaatgatgtagaatctctatccaaggtaaagaactggctagccagccaattccaaatgaaggatttgggagaggcaagctacattcttggtatccaaatgactagggatcgtaagaataggcttctggcattgtctcaggcaacatacattgacaaggtgcttgtcaagtttgcaatggagaactctaagaaagggaatttgccttctcgacatggagttcatctctctaaagagcagtgtccaaaaacaccgcaaaatgaggagaaaatgagacgagttccctacgcatcagcagttggtagtttgatgtatgcaatgttgtgtacaagacctgacatatgctttgcagtgggagtggttagtcgataccagtcaaactcaggattagatcattgggtagcagtcaagcatatacttaaatatctgagaaggacgagaaactatatgttggtatactctggtagggaattaattcctatcgaatatacagattttgatttccaattagatagagactctcagaagtctacttctagggccgttttcactttgggaggtggagccattgtatggaggagtgtcaagcaaacttgtgttgctgattcaaccatggaggctgaatatgtagcggcttgtgaagcagctaaagaggcagtctggcttcgcgaattcttgaaagaactggaagttgttccaaatatgcatgagccaattagactatattgtgataatagtggagcagtggctaatgccaaagaacccaggaaccatcgcaaaggaaaacacatagaacggaaattccacctggtaagagagattgttagtagaggagacgttttagttgaaaagatcgcatctgcgaacaacatagctgatccgttcactaagactttaccggcccggagttttgagcaacatcttgaagggatgggacttagagacatgccacatttgctttagggcaagtgggagattgttggaatatgtgcccataaacaaatgagatgttttttattttgttgattattaatatttttttaaggaatatgtgcccatgttatagatgctttataagtatcgaaaaccctagattatttaattgtaactttaaatattgtatataagtgttatatacaggaggataatatttaaagtaaaaaaatctaatatgttcgtaattaaaaattaaagttgggatctttaatttaaaattactagagcggttcattacattctgaatgaaatgatcttatccggattgttaataatgagattattggaatgaaagtgctttatataatttgattatataggactggaacacgattaattatgaatctctgataaattccgttataatatagagcattcaatattaatcaatgatggtcatatatgcattgatcttaattctgagtaattaatagactcctatttattgtattgtattttttgacataccggggaatgacacaaatacatagtgtcaaattcttggtgtattggaagtataataaaataaatagtcgggaatattaatatacaagatgaaatccattccttcgttaagaagtcagatggacggttcccataagtattggttcgggccttgaatgataagagcgctcaatttatgattagaccataaatatattattcattagagaaccaatggcacttaaggagaaagatataattaaagaggttaacagaaaaacctagctttaattatgaaccgtttatggaggattgactcatatgtagtgactatatcaatgggcaattcaaatcatttgaatatatttaattttataattttaagagtgcaattccaaatttttagtggagtaattttggaattaataattttgattttttaattaagttgttaattaattgtcaaaattattggagcttaaaattataatgtccatagttcctctcaacggctccattaaaattatatgaacatttttttttatgttgggttgattttattagtttggaattttgaattctaaattaatttcacacaatcttgatttgatttatttattttataatttgattatttaaaatattttttgatacaatgtggtgaagaccacacttacttgtattccctaagaaacacttttttaagtggggatcatggggagagatattctctccctggtttttcaaaattcaaaatatgttagttattttttcttggttgtattaaaaaaaaaaaaaagttttttttctcaatgagaagggggatgagaatgcaagttttcaatagattaagttgtgtgataaaaacccaaaaaatcaaaaaacgcccactcgttttgagttcatcataatttggagaacgttagagaaagatctatggtgctttagaggatttggaattctaagatctttttggtggagttcaaatttatcagcctaatcgcaaggtacaattctaaattacctatatttgttatttcattaaattaatacaagtattgatcattgagaaaaaattttgagaaaatttttctggtttccgttttttcttttatttatctggtttcaaaaccaacagtcataaccccagcgaagtagtggttgcagattttgggctggctaaactcgtg

SEQ ID NO: 12067 - DNA, 8297 bp, Vitis vinifera
  Intron number 1 from transcript GSVIVT01028689001 (locus G SVIVG01028689001) derived from phytozome v7.0 (chr-ID chr7 ; pos 12161969 to 12170265 reverse strand)
gcatcacggctttgcgttgggagtctgctctcaaggtcagttccaatttttgcatttggtcgctgctgaaagtgaaacattttcaaaagaaaaaggtgtcgcttaatgttactaattggctaagtggggcacgatttatcctgtgtcttttttcttttattttttcagcaaccaaacggaaggtttatgttttgcgttgattacctgaaatttgttttttttcctcctctgtaaccagtgaagccattgtgttgagaataatacttaaactacttgatggcttctagaggccactgtcaccaatttcagagttgaaattatgttggccattagagtaatttggattccagaagtctggaaaaatactgggagcatttagtaaaaatcttggacgaactaaaggaagaagggcaaggtgtgccaagaaaagaagggaaatttttcttttctcttctctcttttttattttctttttatttttatttttattttattattattattattttgaatggttagggaatttccttgaataatttgggatttgtttgaaaataatttggagcttattggattatagaagatagacttggatttcattttttgtgtgtttgaaattggattgctagcagcttaatttattgtgttttttcaaattgagttaatgggctcagataaatcttcttgatgaatcagaagagcaaaggagaatcacaattttccttttcactaggctatgaacatgttcttactagatagaggaaaattgtgcaattaaaataggttttgtgttctattttttcttattggtggatgtcacagttagttcatcatcaagatcattatttaatgtcttattttggaacttacttccttttataggtgctttaaggtttccatgttgtgcattagtaggtgtggataagaggccttgaatgatctggaacttcctaaagggattggtgactagtaggcattcaaacatcagaatctccccttttttgtgcaagggggaggagctaagtgactcaaacctgtgtccttcaattaggcgtgaggtcattaggggaattgtgcagccatcacaaaatgaaattcatccaattcaaagcaaaatttggctttaaggtcattaaagagttggtttatagaattttgttgagacatgttggatcccaaattggaagattcactgaggtccataaataaggaaagtgtcataaaaaaatttaaataataataataataatgaagttataggattggtgtatgaaccttttattttattttttgaaatatactagtatacttcttagattacacttaagcaaataaatgaaagctaccaacatgtggtgtggaaaccaaaatttaataaagactctttatttttcaaggtaaaggagggtagaaaaaagactattaaaggtttcacatagaagaatgaagaggataaggtgaagtggatggcatcaaaggatggggatttctcggtgaaatctttgtgtagggccatgcagccggggtctcttgcttttttcccttcaaaaattatatggaactcttgtgtgcagcccaaattgagcttttttgcgtgggaggcttcttgggggagagttctaacgttggatcgcttgcaaaagagaggttgggttatggaaaatagatgttttctttgccataagagtgaggagacaattgaccaccttcttatccattgtgaaaaaacgagggaagtatggatggtgttcctttccttttttggtgtttcgtgggttttcccccgttcggtcaaggaaacccttttagggtggagggggtcttttgtgggaaagaaaaggaaggtggcgtggcaattgggaccgttatgcttgttttgggttatttggaaggctagaaattcaattgcatttgaggattgtgggctgtccattcaaaggctgaaaacatcttttgtttattttttgtggtcggaatccaaattgtggataaaagatggtccttcgaccttgatagattttatagattgggtgtgtatgcgttaagggagaggtttttttgttttgccttgtcctttgatgtttgggcccttttgtaagggggtaagtccctttatactgtaatttggtgggtcgcttctttagcgcctctttgcaatacaatcttatacttattgatcaaaaaaaaaaaaacatagaagaatgaagagcttcaaattagttcactaatcatgtcttaagaggggctcacaaattattaacttttccaaatactaaaattttaactaaattcaataaaaaagtctacagctgatccattcttattaggtcttgtagttgaagcttgtagggagtcagatcagctgatttttaactttttgtgatggtggattttgaattttttttaaggatcaacttagctttgataccaaattgatgtaggacaattaaagcatttccttattagaaaaaaagagaaattagatgggaagagaagaagaaattagatgagaaaatacgagaaagtaaggagagagagttctttctcttgcttgccttttggccttaattgtatactttgtgtgtactttgttgcaccgttttgcaagaacctttaataaattatcctaatttacctatcaaaaaaaaaaaaggtagggagaaagagggagaaagagaagggttggattttgaccttcttttttttttttctttccaatctatgattgagaatcctcataataggagacatgatatcgaacaactctaaggatagaccgatagagaagggcttgagtcttcatttggggaggaggaggtgatggctactcttttagaaatttgagggagccatgcgcttgaatttgatggtttatcaatggctttttggtaattttgttgccctagtgtgaggtgaagtgttggaggttttcaaggaattccacttcaagggattttttaattgtagcctgaaattgattcaaagaaattgaatctgtattttcttgctttgataggattacaagttatagttttatacagggacctaggttgacttatgcttttagaaaagggaaaaataatgcaatgatttcttgattcgatacataataggcaataaccgtacactcttaaaaacggtacaaattttattccaaaactttaggagatcttagaattaattagtctattccagatcttttttgattttttttcaaatttgttaacactctcccttaagttggtgctagtatattctgcattctaagcttgcccgggatttgatgaaatgaagagcctactagttgtttagttagcacatctacgtactgatttgaagaagtgacataaggagttcgaataatcctagagtcaagcttttccttgataaaatgcatatcaatctccatatgtttggtgtggtcatgttggataagattgtgagcaatacttattgttactttgttgtcatagtataatttcataggacttttgacattaatcttcaagttagacatggcaattttgatccatcataactcacaaattcccagcatcatagcttgaaattatgcctctacacttgatgtttctacaacccattgctttttacttctctatgtaaccaagtttctaccacaactatacaatatcctgtggtagatctcctatccacgatggatccagcttgattttcatttgtataagcttctaaagagatttcctttacattttggaacaaaattcccatactagatgttccctttaagtaatgaatgaggcagtataccgcttccaagtggaatttgaaaggattgtacatgaactgactcacaacacttactgcatagacaatgtcaggtgttatgtgtgataagtaaatcaacttccccacttgtcatagataagcacttcaatcaaccattagttcttctttagagtcccctaagtttgtgattttgctcaattggtgtctcaacaggtttgtatcccaacaatccaatttcctttaagagatccttaatgtgcttgtgttgagaaataacaatcccatcctttgcctgagctacttcaatgcctagaaaacaatttatcctccctaggtctttaatttcaaatagttgagtaagacagacttcaaattagctatttcttgcaaaccactactagtaaggataatgccatcctcataaatgattaaagtagttgccttcctatttgtggaatgcttaataaacatagtgtggtctggctttggtgatgtcccttttttaacgtagacttggtgaacctctcgaaccaaccccttggagattgctttaatccatagagagctttcctcaactttattttcagaaattattgtttcaaaaccgtgggtttatctatgtacaccttttcctcaagaccatcatgatgaaatgcattcttcacatcaaattgttgcaagggtcaatcgaagttagttgctaaagacaacaagatccaaatagtattcattttggccacaagtgcgaaggtttcttgaaaatcaattccaaatgtttttatctactctttagccacgagtcttgctttgtatctctctaggctataggtataaacacacttacaacctacaatgggtttccctctaggaagctctaccatctcccaagttccattctttcctaaaggatgcatttcttcattcatgacatccctccagtttttattcccaagaggctcttgaacattttttggactctcaatagtggtaagattagacaaaaaaagctgtgtaggagacaaactgggaaatgatacaaaattagaactagggtgttgggtacactttcttgtggctttcctaagagcaataggaatatcaaggtctttaaacaaaataggaacattatcagaattaggggctgtaactgcattttccatacctaccataggtttggatgctgtgaaggaacaattgactttttcttccttgcatacatgcagatatcaagttccttgattatctgcatattttcagattgccgaagaacagttcaagttcattaaaagacttaagagtgtaacctattaggagactgattaaacataggtagagttgaggctataggcaggggctgaaggagactcaaaatcaggtaaggataaggtgggattcaaatgtaacaatggcatcccatcttcaatagaattgtccccttgaagatgagtattaatataataactttgatacttaaaaaatgtgacatccattgaggtgagtaattttctagatgaaggatgatagaacttgtaccctttttgagttgaagaatgtcctagagacaaacatttaactactcttgaatcaagtttactttgtgagtgattgtggacatgaacaaaggccacacacacccaaatttttttggggagccatttctaacaaatgtctattttttctttcagccacctcattctgttgatagatgtcagcacaagagcaatgatggatgattccctcatccttgagatacttaatgagactctcattgaagtactcttaaccattatatgatcttagggtatgaatttttgtgttaaactaagtgtctatcattttatgaaatatgggaaatatagaattgaccttagattttgtttttaggagatacaaccaagttgttcatgtacaatcatcaataaatgtaacgaaccaatgagcacgagaaatatttgacacattagaggcacctcatacatcagaatggattaaattcaaaggagtactttttttgaattgctaattggaaaaaatatatgatggtgctttgcaagttcacacgcctcataatgaaacttatgaacatttatttttccaaaaaaaaatggaaaatctaaattttttctttattaccaagagtactagaagacactaacacctgggaaaccgagttgccatccttcactggtggttttaggtagtaaagttcattttttttcctcagcatgtccgattatcctctctgttatgtagtcctgaaaaacatggtgtgaaaaacacattacaattcaaatccttagtaagttttttgatagacaataaatggtaggataattttggctcatgcacaatagagtttaaccccatgctagaagatataaagatagttccttaaccaactattgaagaaaatgagccaactgttctaattttttctctattagaatagacaaaataggtagaaaataactttgaattatttgtcgtgtggtcaaaggtacctgaatctatgatccaagtgttcgagcatggattattagatgtaccaagggcttggatgttgcctgactagacaaaggaacaagaagaattatttaggtcttgggcaatagcttgtggttcaagctgcttcaatagattccttagtttttccatttcctcattgttaaacccattcataggtgcagcctcttaactgaacatgtcctatggggtgtctatggctgatgcttgatgggcctatctaccttgggttgttggttttccaccttttgacttgttttagggctctccatgaagtttccaacatctatctctagtgtgcctagacttgtgacaataacacaccataggctacccttgtcaagtggctttcttccttcaatttttggtaccccaagtatagaattggaagctaccaatgttgaactgtttgatgtagtgatgatgggattctctataactgaatttggaagcatcacaatccttttgctttcttcctttttcacgtaggcatgaacttcttttaatggtggaagaggttctttgcacagcacttaacccattacttgatccaactctggattaagactaaccaagaactcaagcatcctctcagattccaaaaaattcttcaattttagactatttgcagcaaactccatttcaatagtctgataccgaccaagttccaaccacaaacttctccttgttttgtaatcttgaattatagtcattgtaccttgtttggtccaatgaatctgaactttcagttaatggatctgagcagcaacatcgatctttgaatagctttgattcattgaatcccatatttccttggttgtaggaatcccttactaatcccgggtagcattgagttcaacaaccaagacaccacagttgaatttttagcatcccacgtagcatattttggatttgtttcttctggttctgcaataactccagatctatagcccatctttcctctactcctaaggaaccatttggcaggctaggaccattccacaaagttagtaccatcaaattttattgttggttgtgttgttgagtattttgtagcttggaagatacttgatttggagaaatgattgacataatttttgtttgaatgaaagaaattaataggaaatgagaaaaggttggctggataactaaaacaagttacaacaaccgaggctgcttaggagaagaaatgctctccagtaagtggagcaaggtgatggctgaaggtgataactaaaacatttccactatgcaagttttctgtttactaacttgtaattaacagtttgttttgggtcattttcatcttaagctatgtttaacttgcgacttaacagttatgccctggatcctagaggtcttggatttggagagtggcaggtagcttttaagctttgagaggaagagaaggcaagaagggatgactgttgtttgaatcaatctttttctaaacacatgtataaattccatactgccccaagattcatggggaaactcatccttatggttttctccatgagttttcttccttatatgcatgagcacccaatagacaatcttgaactggatagatttgaaaaattgtgcagatggagtggggctttttgtcattcatccgttccatatttagcatcatctgggttaataaagacatagggattcacaaacacggagagagaatcaagcattgcttagtctcccttgaccatacaatcccctcccatgtcctacacacagatgatgcatcacttttaatacactttgattgtggtgtctgattatatttatcattttctataatatctggaatctggactcaggctcttccatctatatcttatatacatagtttttatgcttttttcactgattaagcttccctgtattgtttttatattccaatctgaatcttataaagtgatagaattaacttagtagtattctctcatggtaacgacatctttctttcaggtgtttgaactattacgtgagcagctctggtacag

SEQ ID NO: 12068 - DNA, 8642 bp, Vitis vinifera
  Intron number 1 from transcript GSVIVT01014961001 (locus G SVIVG01014961001) derived from phytozome v7.0 (chr-ID chr1 9; pos 13002946 to 13011587 reverse strand)
aggccaggttctgggcggactacatagacaagaaggtatgcctttgctgttgattgaaagcattcttttccatttattcatggcgattgactcagattttgattatggcgagggagttgtccaaaatgctgggtttcttcacacgttcccttctgatattgagttttgtgggctttgtgatgcgactcatggtagcttagctttaaaggcgtatcaacaaaatttataccttgaatactattactaaagtagccaagctactatagcatagtggttctaggatcgttcactgggaagggttttcgcaaacactagtgatattcaaattaggaaaataggtgattttcttatggatgttagctttaaaagaagatgtaaatgttttagaaagatttaaactaatctaagctaacattaaagactaaaatgaaagggtgtaaaaacaagtttctcaaagataggagagctatgctctggctcttatgcaaattggaaatcttaggataggctcctcgagttggggttgcaactatggtgatgcttgcttcccgaaccggtatggatttagcaaatcaagttttaatcctttaaaatggcaaaacagatggtagtgaatttcatcaattgttattcaccttagacttcctttgaatggctcgtaagagataactaatggtctaaagccaaaagcttaccaaatattggcaactcaaagtcattccaagtgataaactcacctttcaatggccattgaaattggttctaacggattaatgcaaaacttggaattgaaaacctcaccttccaatagctcgtaggagataactaatggatagaaatccaaaagcttatcaagtattggccgttggaagttgtccaaaggaaataaaaaccaaactttgcattaattaacctttaatgaaaaacgactaccttaccttccgggtgcgagaaatttccatgtgattgcatccaagtcatcacataacatccatactttgagaaactaaaagttttagccaatcatcctctgaggaaaagccctcagaggctgtttggcttccaagaaaataaaatagcaaagagaaaagagaaacgagagagctctgtatatattctcagtgtaaaacgtaacacgcatgggttatgcgaattttgaaggtgttatgcgaaattttcgcataacctggagcagttggctttcgaaggccatatcttcctcatttcagctccaaatcgtacacggtttgaagcgttggattcttgacttccagagctttgaaatggtatatattatgtaaaaaatggacttcgggaagtactccaaaagtgcgaaagaagattgcagctgctgtcctctttacttctcttcactttgcttgcttttcctcttttccattgttctttccttgcatactttgaacgactttggcaaagggctatggagctccaaagcttggttcttcatgaatttgagcttccaaaggctttgccataacttgtccaagtagctcctccatcatttggcatgcttgaattgattcataagctgataaaaacatgtaaacttgccacaaaatggttaaaaccaattaccaaggaccttaatgaattaattgggttaaatgaatatgattactactcaaaggtgctttcacataaaaatttaacaatttttttaaaaatataaacaataaaataatatgacaatgcaataagattataaaataaatagatattttatttaggaggaatatagaaaatcttatgtcctaagcttctaaatttgttcattatgaatttatttgtatattaaatttgttttcattaattatttattatatatttttattttgtgtctagaatatccataaataattgaaatcgataaatgtagaagatgaaataatgaaaaatgaaattaaaaagatttcatgaagtcaacacattagaaattaagaaacagaaaggtaaagatattacgaaggagaggaaaaagaaaaaagaaaaatcatatgacatggttggttaccatgagtcaatttttttttcttttcgttttttaaaagacaacaatgacttgctctttaacttgtcacattaaagtaaaaagaaaaaaataaaatttttttgcagtaattaattgcgaaatgagatcgagggttacagtgtaattttaaaattttgataatttcactattgaaatacatgtttctagaattaatttttctatgtactttaaaattttaaatttaaaactttaaatttttttttggattttttagttgttgcatgattacatcattctccatgaatagaatgtgatagggcatggtttttaaatcacttttataacgattttttattttataattaatatgtttggcaaaagataatcttaaatgatttaatttatattcaatgctagtagtcattttaactggataaacttttcaaaagcaaatttgaagaatttgggtcaaatgtaatgtgcatttgtagggccctcccaatggacctcgtaatgccaaaacttttggccttcatgttttgtcaacttgttcacacaataagcttatgagctttaccttgctttttcttgtgagactttgatatatgctttgtttgtattagttgtattaaagaggtaaaaaagttcttaaccaccattccattttgcactaaaaaaaaaattgatatagacatgccaattgactctgtgtgtcaaatattgtcatgatgcatatgagaaaataatgtgtcatttgactcctttgagtcaagtcttgcctttgaattatttgagaaatcgcaagcattctttatttgttgttcattaatatatggaataggttgacctttgaattagtcaaggacatggtaggtattttggtcttatttttactcaaatttatttgactcaaaattgaagtagcattaagaatgatacttcatgtggttgtaaatttacatttcctaagggttttcttacctatttgaaccaaaaattgatttttagggttaggggaacacctcccctacaacagtcagacaaactccattgagttcctcttccattcaaagagtgggtgtgtttgtttcctaggaaactccaacccattttaaagttcaaaagaattttttattagatttttctttagagcttgggttgattcatttggttcttccaaagatgagaacttttaactcaacgacccaatcaaattatatgcataataacatcaaaatctagaaacttgagaactaccatttctaaatatgacaacttttaattcaacaacccaatcaaataatcatgcataataacaagaaaaatctaaaaacctaagaactaccgtttccaaagataagaacttttaatctaataaacccatcaaataacatgcatagtaacaagagaatctaaaacccctaaaaactaccattgccaatttaatccaataacccaatcaactaacatgcataataaatagagaatataaaaaaaccctaagaactaatcattgaaacatgaaaattttgatagtatgggaataacctataaacgttaaaattatcaaactttgcaaggtaagatttttaataaaatagcattctaacaccatgaatgatagctagaaaatttaaaaccaaaccaaaattttcaagataagacttttaagaaaatagcattttgataagatgaatagtaactagaaaaattaaaacctaatcaaaatgttcaagatgagactttcaatgaaatagcattctaatatcatgaaatatgttccgaaaaatttaaaacctaaccaaatttttatataaccaacttttcaagatgggactttttaataaaataacattctaataacataaatcataaacagaaaattttaaagcatgaccaaaattttcaagatgaaacttttaatgaaataacattctaataacatgaatcagaaccaaaaaaatttaaagcataaccaaaattttcaagatgaagcttttaatgaaataacatgaataaaagcaaaaggtccagatattaaaatcattcaaactttcaaagaaatcacccttatctctaatcctaattccaaaattccgcaaaaaactaacaaagtcaaaacaaattttcaaaatgaaacaatgtccaaatgatacctttcttaccttctcttatcttcccctcagaccacagcctgaatgtgctctcttggtggaaaaaaatatgaatgaaatatcccactgaagtgaattgggtccatgaatctaagaaatagtgagaattattgatctctctcaatatctctcaatttgaaaatccaagatttgaattgatgtcctttcattattcctcctaaattacattgatttatcctaaagatttcatttcaattagaatttggttattcaccatgtacgaggatccccactaagcatccatggctgaatggttaaagcgcccaactcataattggcgaattggtaggttcaatttgtactagatgcatactaatgggaaccaaaacgtgttctcaatgatcccaaaacacagactgaatgtgaccctcgaaaacacgctccctcttactctcagacacggcttgaatgtgactccaaaacacgctctgaatatccccagaacacggcctgaatgtgctcccaaaatgagttgaatatctctctatctccatattctttcaaaaccctcccgaaacgtcttcaaaacgcggactgtatctctcatcctcaccacggaccgaatctccttttttcgttcgtcacacgctctgaatgattttatttcaaagaccgcaactgaacctcccttttgcatgttaaaatcttccttcccaaaaaaaccgctacatgattcctcttttttacattgttggatattccctctagaaaaccagcataatcccctaaaaataaaaaataaaaaaaacctcaaaatccctatgcggaattctaacctttcaaggactttctaagagcccattatggctgagtatctctttccaaaaccaaggtagcaaccaactatattccaaatccctcttacctccatatctttttacattcttatgtaaaaaaacctttcttctctagactcttaatgtgatgcacctctttcattatttgtatatcttcaagttttcaaaactagtccctatatatagctaaaacttttcatcttatcaggaggttgtttgtgatcttcaaagatggctagttctctctctccaaaagaggatcctttcctatccaaacttttccctacaaaagcacaaaaaatattagatttaataaatgaataaaaaggtgttacaatgttaatataaaaaaaaaaaaaaaactaaaaaacaaagaaagaaaatacacaaaataataaataaaataaattactaaatagaaaaagatgtcttgcaagcaaaaattacctaaaaggtgacctaggtgggctcaagtaaccctaggtgggccagggtgtgtctagatgggtcaaggtgtgcctagatgggctggtgtgtgcctagatggaccggtgtgtgcttagacgagtatgtatgtacctaagtgggtcaggtgtgcctagatgggctaagtgtgcctagatgaaccaaataggcttatatggatcaaggtatgtctaaataggttagatgtgcctagattaactaaggcatgtctaaataagtcagagtgtgtcttaatgggctagatgtgtctagatgggcttaagtgacctaggatgataagaaaagtgcttaagtaacctaggatgtgtttaagtggattagggtgatcaaaaatgcgcttgagtgacctaagataataaaaaaaaatgcctaagtgacctaaggtgataaaaaaaagtgctaagtgacccaaagtgataagaaaagtgcctaagtggcctaaggtgatcataaaagtgcctaattgacctaatgtgagtttataaagtgcctaagtgacctagagtgagtctatataaggtagaaggtgcttaggtgacctagggtgtgtttaagtgacctaagaagtgtacttgaatatgtctaagtatgttgtcctaaaggagcacttaaaaaggagctattataaaaagagaaaaagaaaatcctagatctaacttggggttgccaagggtcactcacaatgaggggctagataaatctctcaactagagtctttgagatggctaaaaaaggtaagttgtgtgagtagaaaatgggccaccaaaggagactattgcaaagtatgaaaagagcacttaatagggcatgtgctaatggaacaaatggaaggtctacacttgcatgctagatttattctaagttgcgctcacatctattttgcagggttgtttttttattcatctcatagaccctaaggatgaatcaatgaaatgcttttattaattcaattgaatgaatgaatatgaatggatatgatctttgctattttattctctaggttgggttgtacaccccatgaggggtataagatttttatttttatttttttggttgtaaaaaaatttgttttttttcatccatctatggtgacccaaaaggaaaggaaaaattcttaaattttcatttttgagatcctatggtgacttaagaaaaaagaaagattcttggaagttcttgatttagatcctaatttgactcaaaattggaacaaatcatatatgattttgaagcttaggaagtcaggaatccaatgcttcaaacaattttctattcggagttgaaatgaggaatatatagtcaattgtagtaaggttgtgcaaagagcatgctatttctgaattgagttcaggccaaattgttttcggttatttgggcttgattttgggcttcttttttaggtttttttttttttttttttttttgtggaaattcaactttttagagttttttcaatttttactaactaatctttggttgcaagaatattttgataatttgaattttatccaatttttaattaccaaatatgcaataggatccctaaagttcatgagaaatatttatttaattatttccttgtttttattttatgttatctttattacttgcatatgtgacctaaaataggataatttggtattcttaattagatataaattttgatggagtttttcaaaataggaaaacttatttaaattggaatgtgtattgttaggaaatttattttaagaaaagataagttagaaaagaattaagagtttccattccttttaaaaattaattcttaatgattttaattttatttaaaattttcttagatcttcgagatctctaagaataaaatctttcttttaataaaaaaactcttgtttttccaaatctttataaaataatatttttcttattttgcacaaggtttggatttaaagaaaataagttaattttgaaaattcataatagataatttataattaagaaggttaccaaaataagtattcaaacctaaagaaaaatgttttggtattcttagtaaattttcatgaaaagatttttccaagattatatatttgaattggttgttgctaatgagaatcttattcatttggaactatcattttgattttggtatagatgcttctccaagctactacaccatacctaggatggtccttcaggctctctcctccttagataaggaggaaacccctatttggatatggatagttcaaaaataaagactaagagagcaatttttttagcaaacaagtcttactttgaaagataaataacggatttgaaaaatctcatgataagaagggttttcaatcttgtatatagagatgcccaatgggtcgtgttgggccgacatggcctaatattgatcgggccattacgggccaatgtgttgggttgggccgacccatgcaagccaaataggtggcttggcatgacccataagtccgtgggctaatcgtgtcgtgctgggtcaggccgtgctgtgccggtgggccatggcccatgggccactcactttgttaaaaattttaatttaattttttaagtcattttttcttaagttttttccttaatattaaataaaatttctttttgttacttgaaacacctctaataattatatatattattttttatacacttctaataattatactttttattttttacatttatatttattgagtttgtaattgtaaaatttatagaaatgttagttttttgtttttaaaaatagtaaaaaaattatatttgaatttgtttattttttttaaaatcaaaataacaataaatttaaaataatggaatataaaaggaaatgaaatataaaaaaataattcttttattctatatttcaacaaattacatgaaaaaataaggagaaaaaaaaaacaaaagtgagaattgcgtcattatagtttgagtacatcccatccaggttgacacccacccaactatcaatcatatgcattacttaacctttaaaaattaactacatttaatagatttaaaagaaacgaacaacatataatttttcaattatcatattcacttttgtcttcttattcaatcttcattcttattttttcatcttcaatcatcataaatctcttgaacatcattgtttgcattgag

SEQ ID NO: 12069 - DNA, 1222 bp, Vitis vinifera
  Intron number 2 from transcript GSVIVT01035393001 (locus G SVIVG01035393001) derived from phytozome v7.0 (chr-ID chr4 ; pos 964776 to 965997)
tgttagaaattttcttccttcccaaaagtttggaggtatgctgtttattgtgacattaactaaagccatatatgtcattgatttttcttttttacttagttttcaaatgttaagcatataaatttaacattatccacttactaaacattcttttcagattcgtttcctcgagtttcctgtggcctgaaattttaatttatttggatgataacctagaaaaacgattgcatgaaccttttcataattttgatgttgtttaaccaacatatcatcctttgtgtacatcaaatttttaatgtacctgtaaactaacaatgcttgcaactatgggcagatgctacatccacaactttatccataaagaactctgtggttcttataagttctgacattaaacttcgaatatagcttcccaaattaacaagtttgtcaataaattggtttttttcttacataatacattctgcacaatcattgttttagaccaattcttgcaatcatccataggcctttctgtaggtttgctttatgtagctgcattattagtggttttaatcttaatctgtctgattacatggtttagtgatgtgtgtctttgctttcggctgttgcaattcttgtggaagttctcagattaccacatttgattctagtcctatttggcatagaaaagcactgataatctgtcagttcatactgaagcagtcagaatgtactaccaaaggaattggcatggacttgtgaagtgctggtttcttgaagttgcccttttactgttcatgctttttacttgtctttagggacaggcatgcatgcacgcatagaagaataacatggagatatgcagacatttccagattgttgattctttttcaattctgtgtaactccatttcttttggtcatctggaagttctgatttgatttggtctataagtgtgatgctgatattcattctatcatcatcttatgttattttgaaatgcatagttgaatcttaagaccatgaagctttcactgttcttttgtttcattgtgactctagacaaagttctagtcatcttcctttgctttttatttttacatttatttttttaatgaggcattaacttccaaataaaggattgttttccatttatctcaaactctgataataacttctgttttttttttggtcttattgtgcagggaataggtttcccagtgctcaagaaaggtttcaa

SEQ ID NO: 12070 - DNA, 4276 bp, Vitis vinifera
  Intron number 1 from transcript GSVIVT01010521001 (locus G SVIVG01010521001) derived from phytozome v7.0 (chr-ID chr1 ; pos 21381846 to 21386121 reverse strand)
agaggaaaactctacgagttctgcagtagctcgaggtaataacacaggaaaagaaaaagtagaaaacctaaatttgatacaaacttgcttttcataacacaaaacacaaagcaagagaaaaggaaattgttctcttttcttgttttgattctacttttcatcttctttttttttttttttttgttttggatctggaacgctttgtgagatgtttgtttgaggtttgtgtgtattttttttcttttcctttttattttgcttgcttgttggtctttgtttgttgttgagcttttccgttttggtgaatgtctcagcgtttttaggtgtttgtggttttcttttgattttgcgttggacagatctgcaactgcaagccataaaaagaagattgctttaatatgaagtgtaaattgtgattcgtttttttgttcaaaggcttggaggttttcctttttgtttttctttccaatttgatgatatttgtgtgtattcagagagcgattcgtgaggtttttcaactttgtccatgttttggaccatttttttttttggttttgttttgaggttaaaatgatctgatctgatgctttaaggtcgacgacaccaattcagggttttgttttcagtgaaagaagctcattcaatcgtacctaggcttcgttagaaaaggaaatgcttggaaaaggttttcttttcaagtcttttgttttgttttctcattttttcatgagaatcaagtggaagttttatggatctccaaattggatctttctctttcttttcctcttttcttctcatctaaattataccaagaaaaaaaagtactgatttttcaaagcttcctcgacttgagtttctctccagcctagcctatttgcaatttctaatgtctagggtttttttttttcctaaaccttctcgtttctcatgttttgctttgtaatattctgatccaagctagctcagatcagtttctgttcataagcgaaattcagtttaaacgattttttcttttaaaaaaaattcttgtagaagaaaaactgctgttcaagcaccctgtctgatggaaagacctctgcacagcagcttctgagttcaggatcttctgtattagcaatttcttctgagtctaaggtttttctcggtttatctcaaaattttctcttttccttccaagcgaatttaatatcaaatggttttcaggttcttttctgtgaaaacacaagaaaaacagttcatactcttcatcaattgaattgacgcaggcatttctgcaactgagttcagggtttcttttcttcaatcaatcctcttctctctcttagatctgaaccctcaagcatcttcagtaggttttgaagatactcctgggtcttcaagtgatttgcgtgaactacctaatatccaaagggtctgcatgtcctctcttcacccaatcagtctctaatattatattcattttcattaaaggctgagcgaaatgttgcttttcaaaagttttagttaccacgtaggagggagtacttggatgcttccggttttctaggaggatctgaagcgtacaaatgctaatggatgaaaagaatgtatgtatccacataggaccatgggttgttgtgctctaaagtttttttaaggaataaggagattgactgagcttgtttgtttcatggctagccattagcagaaaagaattcatttcctatcttcctccccacaaaaaagccactgctataagaaattgagaggctatacatggtagtgaacaattaatctagctgaaaattttaattgtgatgtagttacaataagaaccaattatagcacgcagattatatggaaaatctagctatagccaacatttttttttttccttttcatgggaatcaggtgtttcccttcttttccttaatgcaagccaattttatttatttatttatttatttttctgtcttttgcatactcaatagaacacttgcattctaataagttctctcttaaaaccttaaaattttagaatattatacatagaaatcacaaaatctcctatttttataagaaaatcttaaggcaaaatttgtttttagtaggaaaattctatacaaaataaagacaaactattgcctaattcgtgaattaggtttgacaaaacgataaaaaataaagaatattgacacaaactctaagtcttggtgctatgacctgcatgtttgtttatttttcttatttggtgtaaaacaaacaattaccattctgtggagttctttgtctttcacttgaacttgagtgaaaatcatgaataacccaaccattcttcagaatgtagtacaaaaggtcataatatgagtgcatcatgaccttatgaatgtatgaggtcataatgcttaatgatttaaaatgattttagattaaattattaagtcattaacttgatttctcaaagttatttttaattttaatttgtagtattaagttactttaactaacatactaaatatgattgataacttaaattatgtcattaagtcatatcatgagaaatatttggtaaaacttaatacttattaaattatttaagttgattttaagttaaattatttttaagttgttgacttaaaatttaatttttgatttttatgattaagattatttgataaagttaatttcaaatttattctaaatcatctatatttatcatcattaattttaactattattaagtaataaatctatataatcaacatacatatttaaaatattgtggatgtataaaataaccccaatatatttaccataaaaaaatgagttttggatatgaagtcatggttgtagtatatattcttattacatgtggataaattaaacaaaaaaaaaaaaaaagattatgaacaaattaattattttaacttaatatttaaagttatttttaactttaaattgtgatattaaaaataatgaataatttaaattaagttattaaattatatcaagttattgagttgatttgctaaatatcctcttaagtcattaaattgatttaccaaatactatgttaaaagacatttagtaaaacttaatattaaatgttcaatgacttaaaagtgattttaagttaaattgtatttaggttattaaatcatactaagtagatagttggtaaagcttaatatttattactcaatgacttaagtttgactataagttgatgggttcataaattgttaatttaaaacttcttaatttttttttttcacttttaagtattaaagttgtttggtaaagttaactcaagttgtatcttaaatcatcaaatgaacatatttatcctcgtcaattttaaataatatttatatttttactaatattaagtaataaattaatttgctaaacattcatatttaaaatattttacaaacataagataactaaacaaacatttactataaaagtgagttgtgaatacattgtcataattataaaatatattttcatttaatatgggtaaataaggtaaaatagtttaaattttaagaataagttaactattttgaattcatatttaaagttacttttttactttaagttgtgatataaaattattttattaaatatgtttaatttatttaataacttaaattaagtgattatatcatattaaatcattaaattgatttaccaaacatccactaagttattaaattgaattattaaagttatttttaactttaagttataattaagctgcttttatgtaattaagtaagttgatttattaaagacccaacaatggttcagtcctctttttagtattcttgggtgcagcattgtttgtgaaaagggctgtggagagtgtcctttgaaatagttaatgtcaaaggacattcaataaagatcgcaagcaattcactaaatgccagaaagttccaatgattcacttgggtataatctaacatgcactctgagtgtgagaacttttccaaagcatccacttcccatgaacatgcaagcttcacgtagaactgtatagtgactagtcttcctgggtatttttttttgataagctagtcttcctgggaattattattattattattaatgacttgtcaggtgttaagctgcctttgactaaaagactaatatttagggagttcttggtaaacttaataattgaagatgattttctctaaattcattcccttcctttaaatgcactgattcttggcgtttttggtggggttcattacgtttaatctgtcttttgtgttaaatgtctagc

SEQ ID NO: 12071 - DNA, 7819 bp, Vitis vinifera
  Intron number 4 from transcript GSVIVT01037260001 (locus G SVIVG01037260001) derived from phytozome v7.0 (chr-ID chr6 ; pos 16800327 to 16808145)
tgcttttgagtcatcaattagggatcaaggtaagttgtgatgctttttctgtatgttaatgtttcatgttactggtcctgtcataacttagtgtctgattactggagtttcagttttgttgcaccaatttttccattgctttcagtaattttcctttccttgattatgttaggtatgttaaattttctggaaatgagttaacaacttgtaactcttttatctttaggcatatgagagtaggaaagctaacctaagccaagttgggatgctggtgggagggagcaccaatgcttttgggggcagaacgtatgaagatatgtttctagttttttatcttattaactatagagcgggcagatccctttgaatgaattatggcattgaagaaaagggaaaaaaaccttcgtcgttgcatatatgacttatttgtctgaaaaagttatttatcctcagcaatagggtagtatgcaagatgaaggttaagggaaaaatgctggtgccaaacttgagcattatagttttgtgacaattagctaagttgttctttataggaggtaataggaatcccatgtcatattaaaccataggaccatatggtttcttccttagggtagagagatacagaaaacctgaagtttatctttaaagtttaacagagggcccaagcatgctattggaaataggatgtgcaaagatatggttcttgaaatatccatgttattgaagtgtccagttttatttaatttatagagtgtgtatatgccatgcacttgtgacgtggttattagagtttaaataacgtagaccatgggaaaagggaaagcaaatcctaaagtgggattgtgactattcaaaaaagagtcagtggtatagttttatcttatgaacattgtcttactagataagatgtcttttctaggaagtaaaaagggatttttcatcatgtcttaactgtataatccatagttcctctggcagaggagcataaatactgacagcttgaaatctaggttattgcatctacagttcaaaatttacatttaaattcaagtaaacaaatgtgtcatggttacataagtgattattggattcattcttggataagtgattaattggaaacgagtgaaataatatgttacatgagtgtcttgtgggaggttctaggttcaagaaaatgtgatctacaaaaaaaaaaaaaaaaaaaaaatgaaagaaagaaaggaattagtcatgagtttgaatgggaagatctgatatgagggtgtgggtggtgacttcaatgttataaggagaagttcagaaaaactgggtggatctagattcacttctagcatgagggactttgatggctttataagagaaagtgaattacatgatcccccattacgaaatgcctcttttacttggtcaaatatgcaagagtcaccggtgtgtaagagattggatcggtttctctattcaaatgagtgggagttctcatttcctcaaagccttcaagaagttctccctagatggacatcagatcattggccgattgtattggataccaatcctttcaagtggggtcctacaccttttaggtttgagaatatgtggttgcaacatcatagtttcaatgagagctttagcagttggtggagagaatttaaaggaaatggttgggaaggtcacaagttcatgaggaagctacaatttgttaaggcaaaattgaaagattggaataagaatacttttggaatgcttaaggaaaggaagaaaaccatattggatgaaatagctatcattggtgccaatgaacaagaaggggctctctcttctaatctagctgttcaaagagctgtaagaaaaggggagctagaggaaataataatgagggaagaaattcattggagacaaaaagccaaggtaaaatgggttaaagacggggactgcaactcaaagctgttccacaaagtggctaacgggagacgaaacaggaatttcatcaaattattagagaatgaaaggggtttggtgttggacaattccgagagcatcacagaggagatattactttatttcaaaaaactatactcgagtcctccaagtgagtcgtggagtgtagaaggtatcgattggtcccctatattagaagagagtgcctctaggctggattcccctttctccgaagtagagatctataatgccatctttcagttagatagggataaggcaccggggcctgatggtttcaccatagcagtgtttcaggattgttgggatgtgatcaaggatgacttagtgagggtgtttgcagagtttcacaatagcgggattattaatcaaaacaccaatgcatccttcatagttcttttgtccaaaaagagtcagtcaaagaagatctcggattttagacctatcagcctaatcacttgtctctataaggtaataacaaaagtcttgtcagggcgtctaagaggagtactacaggagaccatccactccactcaaggtgcttttgttaaagggagacaaattctggatgcagttcttatagccaatgagattgtggatgagaaaaggcaatcaggggaggaaggagtagtattcaagatagacttcgaaaaggcttatgaccatgttaaatgggattttttggatcatgtgttggagaagaagggatttagtcctaaatggaggaaatggatgagaggttgtctgtcgtcggtctcttatgctattctagtgaatgataatgctaaagggtgggtcaaggcatctagaggtttaaggcaaggtgaccctttatcccctttcctgttcaccattgttgcagatgtgttgagtagaatgttgttgaaagctgaagaaagaagtttgctggagggcttcagggtaggtagaaataggtgttgggtgtcccatctgcaattcgcagacgataccatcttctttgctaactctagtgaggaagaattgcaaactcttaagagtttattgttagtgtttggtcaagtttttaggcttaaaatcaatcttgataagagtaatctatttggtatcaacttggatcaggatcatctttctaggttagcattgttgcttgattgcaagacttcagattggtctatactttatctaggtcttcctttgggagggaatccaactgcttgtggtttctgagacccagtgattgagagaatttctaggagattagacgggtggcaaaagacttacttatctttcggcggtaggataactctcctacactcatgtctatcccatatccctagctactttctttctctgtttaagattcctactttagtggctgcaaaagttgagaggatgcaaaggatctttctttggtcagggattggggaaggcaaaagagaccatcttgttagatgggatgttgtgtgtaagccgagggtaaaagggggtttggggattgggaagattcctttaaggaatcgcgctcttttagggaaatggttgtggaggtgtcctagggagagtacagctctttgacatcaggtcattcttaacatatacgggacacactcaaatggttgggatgccaacactttagtcaggtggtcacatcgttgcccttggaaggccattgcacaagtctttcaggatttttccaagtatactcgattggttgtaggaaacggggaaagaattcgcttttgggaagatttatggtggggggaccaaatcttcaaagaccaatatccaagactatttagagtagtaatggataaaagtgttcccatatattcaattcttggttcggatcgccctttctcatggaactttaatttccgtcgtagtctaaccgattatgagataaaagatttagaacgcctcatgcgctctattgattgtatgaatttattcacctccgcttcagatgcgagatcttggtccttattgtcttcaggactgtttacagtcaagtccttctttacagccttgtcccaaacgtcttattcatttcctttgatcccttataagtttttatggaaatctcaagttcccttcaaagttaaggcctttgtctggcttgtggcacacaagaaggtaaataccaataacttgctacaattgaggagaccccacaaagctcttagccctgacatttgtaagttgtgtatggggcaaggagaattagcaaatcacctattccttcattgttctgtgacgttggggttgtggcacaacctttttcagctagccaagatggattgggccccttcgaaaaacatttcagacatgatgttcatcaattataaaggttttggcaaatccaagagagggttggttttgtggcaaaatgcgtgcatagctttaatttgggttgtgtggcgggaaaggaatgctaggatatttgaggataaagctaggaatttagagaatctttgggactccattcatttcatcgcttctgtcatgccccaagacccactccaagggcgtgatggtcatttcacacttcaaacccgaaagcttacagtgtaacctgatccaaacacttattttgtaatcggaagttaccaattaccaagtacctgttcagagtagcggaacaaatctaaaatcctcaaaattcaatttcaaaactaaacatccactatccaaaatccattgtccaaatatttgcaaacttaaataattcaagtactagaacaaatttcaaaatcttcaaaactcaactttgatctaacataaaatttgaaggatcaatatccaaataacttccaaataccaaaagatccaatgaacacaactaacagttaaacaaaattcaatataaaatcctaagtcaaattctagtgatgatcattccttagcctagccatcactcctcacccgaactaagggtacctgaaaagtagtcaacaaatgggaatgagctcatagcccaataaggaacattaatgcagtccatggatcaaacatttcaaacttacttgcaaaataggagatattgtaatcaatcattttcataaagttgtgagtaatttttttttttttttgctaatacattcaaaatttctaaccgtatgcatttatttctaattcaaacaatttcatatcaaattcagtcaaaacattccaataatttatttactctggtcatcaaacatcaaagggtgcctagttaggtgggacttttcaaatgggtggctagcctcaaattgttcctttaaggtggacggaaccaaacattactagtactagtaacctctaaccgaaacccctagaggctggggttcaaatcaattacattccccaccaagaaatgtaaaggtcaattattatatcctattgacaggggccaaaagtcaattattatatcccgttgacaagggccaaacaaaccagagtcaaatatttatttcatttattcaaatttacaacatataatatctccacatttatttgtcaaaaacataatataaaattctaacatacttttcatgcaaaacaagtttgatccatgcataaaacggaatataactcaaacgttttcaaataatgtatatatatatatatatataaattgttttaaaaaaaaagaacttaacaattgcattaatttcccttacctcaaaagaagtcctcaaaaactttggagaaaaataattctgaaaatctactcttcacttaacaaaacataagagaaacaattattactatttatctaaaattataggtttgacaatcctaaaattttaggtattcaaattaattttttttttatatttatgaaaggtagtttaatctattcatattttaaaatttaataaatttgtaattcatataaaattgaatttatttatttattttaaaatttatttcttgggacacaacttaattaaactataatttatttcaataattaatttctatgttatttattaacttacgctcataattataatataaaaaaaaaactttgcttcctttttatttaaaacttctattctctcatttttatttttattttttttaaacgtaaactttattcccaacaatactccattattgtcaacaaaataatagacatgtatatatatatatatatatatatatatatatatatatatatatatatatattaactaacaactctctcatccatccgtacacacacccacaccccatatttatattatattatttttttcattctccagtcccagtgtgcacacgcgtcctccattttttttttttttaatccttaagccattctccaattccacagtgtgcacacgcgtcttccaggtttttttttccctaaaaacttaagaatttccaatttccaacaataaatcgaaatcttaaattttcactatttgatattaaaacgaattaaaaataataataaactaaccctaatctaaatcgaaatcttcataggatttttttttttttctaaaaaaaaacttaagatctccccaattccaataataaatcaagatcttaatttttcactatttggtattaaaacgaattaaaaaaaataaactaaccctaatctagatttggggttttccaaaaaaaatatctaatgtgcttgaaattaactaatgaatctaaaataataatctaggggttagaatcttacctatagaggtttgttcttcaaaccttaaaatctgacctcaacttcacgttctctagaaactctctgcgaacaagaatacgattcaaaaaaagaacaggaagaagagaattttctatttatacctagggtattattcgtaaaattactttttcacccctcttccattttattaaattaattaattaattaatttaatatcattattaagaatttcctaaattaccctttaaaaagaaaacttgggcgttacagcttcgttttgggctttttgctcaacatggtttaagggcattccccttaactttttacaattaaattggctagcagtgtgtaggtccaatgagacggtgtagtgtcatgttattttattgtgttgtttagttttaattctggcgggaggacttctcatcctccttatgtactattttatcttatcaatatattcatgcgtggtttcccatcaaaaaaaaaaaaaagatctgatatgagggtggtagaggtgaacagggagcaacatggaaaaagcttcaacccaagaatctggttgtttcctgaagctgttttgctcatagtttgcaggcttgcagccaatcagttaaatttgtttagtaatttttattttcttcattcattggcacataaaattttgaattcaaccgacacaaactggcggtgcatatgctacaagaatgggagcgattgcatttattgttatctgaaatcttactactcttacattttattaaattgattccatgaaatggatgtgttttggtttagtagagatacatggtattccagttcatggaaatctcgtcattttggattgtttcgattgcagataatatcaattaaatccgagtttgaatgtcaaatttcatgggtttttgtttgtctatttcctgccagcccattggattgggagcatgtttaaccattgacttgcatttgtttcccatgtatcatgatcatggtaagtacaatgttcagtacaattaatactttggcttgtatatgattatgaatgatgatgtgtcaggttcctcagtaatttcaatgctgaagagattgaagaactataatttgatatttgcatgtatgcatgtatgcatttatgtatttgaaattctgtttttgatatattataggttttataattattgatgtgtcctttgttgaactcttttgcagaaccctact

SEQ ID NO: 12072 - DNA, 2989 bp, Vitis vinifera
  Intron number 1 from transcript GSVIVT01014787001 (locus G SVIVG01014787001) derived from phytozome v7.0 (chr-ID chr1 9; pos 9739714 to 9742702)
tttcagatttctcctccttctccctcattcatcccgtctctttgataaaagctctaggatccttgtcttttatgatatttttgtggttcgatttgacttgaacttgaagctactataatttgctttcgtgtttttgcagatgaccaaggttgaagatgatgatctagggttttgttgtgggatgctgtgaaatttcgagatctattagatctacggaaatctggatgcttgtatataattttttcttcactatctagtttattgagcgaagctctctttgtggatctggatacgaaatgttgtgaaatgggaaaaaatttgtaaacacacccaaaaaaatatgtgaatctgaatgtgaaatggcgtgaaatttcaaaatttaaaatttgggttattcttttatcagaagtgagaaaaatttgcaagcacatcccaaaaaattaaattattatgttccaacccaaaaaatttatatgcgaagatgcgtttttccagtaaaaatgtagagatgaaaaatcattatttctaatttctacccatcataagaatataaagggatagcatcgccaaatgccatctaggttatggcaaacggcaattagatgtaattataattatgtgaagggggcgggcccacattacttggagaagaggaaaaggttggtctaaaatccaacggttgtgggcaagggtttttaatccaacgggttaaaaaaggggtagggtcgtgagagcactatataaggagataacatgtaggggtttattcacgctgaaggaggaaaagggagagggggtttagggttttcagaagcttgtgggatgagcgtgtcggaatggagggaaatagaattctcctccattcgaaatcagagtcctttccgactccgctcattccattggcttcagatcactcctccctctccctcaaacctcccattttctgttccagatgcctgatatctgtctgattcgattttcgtttttttggtgttcttgttattggttttttttttttctcttgcagatctctcttctgtggattgtggattgtggagcggtcgggttgatccgtggatctgtgattgcgttttgaagcttgattctctggagtttgtcatatttttgttgtgataaattttatccatggtttataagtgtacttccgtggatctgtgttttttagggtttcattttttggtgtttccctcgaagtcgaagtcattgtctgacgaatactgataaatgatatagattaacgtgtgtgaccggctatggctgagggtttcatcttttggcgcttccctcgaagtcatttcctgacgaatactgataaaaaatattgattaacgtgtgcgaccggacatgaatgagaaattattgaacgggattctagtccctacttcctccttggtttatataactataaaaagaaaagttatttcatttatttttatttttcttttttttttttataaaatttataacatatattttgtagtaattaaaattttcgaggaatccgacgaggtttgaacccatccctattttggattgcatcccaatccgaaccaagcaaatggtagataaaacgtttttaaaggtataccgtttaaaattttgaattttttgtttgtgaaatttattaatcttcaaaagattattattattattatttaaattatatttaaagaaaagaaataatttttaaaatggaaaaagataaatttctaacattcggcgaaggtggagcattgggacaagttcacattggatggctatgaaacttggaagatttattcgtctcaaagtgggaaagcatattataaagtccaattctgtatttgagtacaaatgctatatttagtaaggaatctaatattttttttatttttattttttatttttaaatttcatgggctttatgttctccacggtaaggtacacctgaatcttcatgttgcattaggggtatcttagagtttgggcatttttttcatgtgctaagttctgaaataacattgttacaagcaaaaattaagtaacgtctaaataggtctgaaatatcaatcagacttgagtccaacattcaataagtttataaataatatgtaatagaaaaatctttataagtttataaatatgtatttctttatataaatgcaatgttatatttaagaaaaaataaatatatatattgaaaaaaaaaaaaaaggcattcatgaattttacttattgaaattaaatatatatgaaaaatagttaattcttgcaatttaattgatattggtttaattaataattttttggatatagtgattctaatcttgttcattttattttattttatttaaaattatttaatttttttaaaattatattaaaataaatatattttataaataatgaaatattatatttttataaattattttattaaaaaatatttttttattttacatgtgataataaaatttaaattaatttaatttaaaaaaaaatcttaaatgccaatttcgaatttaaaacaaaaaggaaatcctaaatttgttattattttatttatttaaatttcaaatctatgtcgtcatagattatgataggccattatcatgctaggtgaagggtcatatattgcattgaatattagagataacattgaaaaagtagcaaaatattggtgatatttaatggatgccgaaagcaaatatggtggagaaatattagagctactatttttcaaaaaactgggtagaaaaccattgataggcttggagatgaagattagttttggtcgatttattcccattttttttcttcactttttatagcagatttttaggatgtttcatcatgtgttgttgacagatcatgaagctaaaaatagtgaaaaaaaatcttagagccgttgttgttggagttgtatgacatggttcaacaactattttgattgaattatttggtcccattcattatcaatgggataggg

SEQ ID NO: 12073 - DNA, 8016 bp, Vitis vinifera
  Intron number 1 from transcript GSVIVT01022867001 (locus G SVIVG01022867001) derived from phytozome v7.0 (chr-ID chr1 2; pos 18573327 to 18581342)
gtctggcaccccacttcttctggaagctgggtatgtgatttttctcattgtttttgtgggtgtaattattgaattggttgtgcaagggaattgttttggctgcatttgaaggtgggtttttcgttggtctgttgttattttcattgttttgatggttttgagcataggactgttgggctagttcagtttttgtgaattttgaaaagggtctttgtgggtgagattgagtggggtgtgggagtcgttgtttggcattcattgacaattaaaagtttggttttttgatctttatatgtatgacacgtgtgattatatattgagttttctgaaatttgagatgggttttatcataatttttaaaggtttgatagtagagttgtatgggtgagttcaatttacgtgaattttgaaatgggtgtttgtgagcgagattgagtggctgtggaaatgttggttgccatttattcagaataaaaaagatttgaatttttgatcttgtaattatatctgaagttgtaacaatcattgggttcataatgtaagcttagttgatcattaaatactagctcttttgttcacaaagtaggctttttttcattgcctaaaaccgttccagcttagaatcactgtgaatatgatacgagggaagcatatttaacactggtgctaagattgtcattggaaatcctagaggtcatgtgagactgagggagtgtgaataaagaattgtccacttttcctctttaggttcaattcgatcacagagtgaatgtaagaaaaggaaggcaatttccaggatccaaattgagcctttaggtgtcttaaggtcctgttcattctcttcaattgttcgagaattttgaagtcccagaactcagaaattcatggaatctggaatctcaagatttgagagtttactgctctttacttctttgaggaattgaaacatttactttctgcaattcagattatgttgttcttttgatttttttggtttcaaatacaatttttgcttcttgttttattttagttatttccttgatccaattttgagcagctgagtgataaaaataatctgaaacatcatactttgccatgaaaattagaaggacatccctatgaatgaagcactgatcataagcagctgagtgataaaaataatctgaaacatcatactttgccatgaaaattagaaggacatccctatgaatgaagcactgatcataaattagatatgaaaaaataatttgtagtggccaatggaggtatataacattgatcaaaattaaatgctaaccaaaattctatcacccttaatattagaacaaattccgaagtctcactctctcctcatgaagatgtttaagtgaccaagattgccttagtttaagatcgatggtgagaagtgtttcagtctttgctcatcatcagcaaggttttgccactacaataagattagtgccgaggtcttcaagcttcttaactttgggttgcatcattattcatcctctcttccacaatatacttttttttttgttttgtttttgatcagaaacaaaacatatatattaataagaaaagaaacacgagaaggatgaggaatcctccccatgatgtacaaatctgatcaaaagaactgagtaaacctctagtaaccaaggaaggctatacaagaggtacaaaaagcctatacaagtataacgtctcttgaccctataaacccaatcctaggtgtacatatcaaaagtcaactaagctaaattacatctcaaaggatagtgtttaaaaatgtctgtacagtgagcctaaaaagaaacatagaaatgaagttgatcccacatcattaccggtgttttccaaatgtcctcgaaaatcctagcattcctctttctctacacaatccataacagagagagacacatgattttccaaagagttttgcctctaatagaattcccaaaacacgtgaaagaaatcaccatcatattgtaaatacttttcttttttcttaattgaatcaaagttgagacttgagatcattagatcattagacctggttgttttaaggttccagtgaaagcagtttgatcaactggatggtaaatgctacatattctcatataattttgtttctgcatattattttttcttaaaaagtacagtgaaccagattcatttgtttccttttacccatcagttatttatatctagaaaattcatatcataaatcccctgttaattataaaatagtaaactaaggtgtcatttggatatacttcttgtttcctgttttaaaaacagaaaatgatataactcctatataaaatgcagaaactctttcaggtttaccttaaaaaggtaatgatattttaaaagctgttttaaaaaattaaggtattaaagaatatttaatatttcaaatttgaaccattttaaaagtattttttgaggacataaggtaagtccatattttttatataagaatatagaagttactactatttttctatttttaaaaataggaaatagaatgcatatccaactgagcactaagttacatatttattatataaaggagctggatgcagttaaaagagaatatgggcatcatcctaattttagtgcaaggctaaagaaattaaagtgaaaacctatgaaataacactaagcataaatttagaaaaagaaaatgaaactcaaagcatggtactttttcagttaaatctctctactcctctttgtccgatgaaaatgcgaaggcttttttccttcaggaattgtttggaatccttgggttccatagagactcaacttttttgcctcataagctgtgtggggaaggatattgaggttggactatgtaacagccaggaagaagacacggtatagactaaaaaatagagcttttattgaataaacttctcataatctctaccaaaagaacctatctctttatacctaagagtcactgactcaacaaaaataaaaggaaagcataaatcacggaataaaatcaaataaaatcaagcaattgccaaacttggcttattcagaaatacctaaaataaccaaaataaaatcaaacttggcttacttgattcttgatagtatctctcaaaccacttatgaagcaattgctgattttattttggttattttaggtatttctaaataagccaagtttgacaattgcttgattttgtttgattttattctatgatttatgctttccttttatttttgctgagtcaatttttttttttgataagtaagcacatatattaacagaaggcaaaaaagccgcaaagcatacagggagtatatgaggtgactatggcctcccaaccaaaaaacaaaacaccccaacccctaattggaggctaaccactccaagaaacctattagggagttcgactccataccaatgtgcactttagcccaaccccaaatattacacacaaacgaagtttttaacttctgaactgctaacacccccccccccccccccttaaaaactagcctattcctctccttccaaattgtccaaaaaatgtacagcgaaatggacttccacaattttttcctttttttccccacaaaagagcccttctagttacatagaacctcctttacagattctggaaagacccactgaacaccacacaacacaagaatgatatcccacaaccctcttaccactgtacaatgaattaaaatatgattaatcgtttcctcttcacaccatcacaagaaacaacggttaggaaattgccaccctcttctctgaagcctatcaagagtgaggattatttttgctgagtcaatgactcttaggtataaagagattggttcttttggtaaggattatgagacgtttattcaataaaagttctattttttagtctataccatgtcttcttcttcctgactgttacaaactagctcaaaaaaggggatggatgatgccaaatagatgttttatgtataaaaaagtagaagaaatagttgatcacatcctccttcactgtttgaaagcaaaaaccttgtggcaactgatttacgctctatttagaatagagtgggtaatgcacttcttattaaagaatgctgttgtgagttggcatggatcctttgatgggagacaaaggaagaaagcttggagagttgctcccttatgcctattttggaccatgtgaaggagataaataggtgaatgtctgagaatattgaaaaagcgggttaaaaaatcaaacgatcatttatgaatgggttagagagtaagtaggagattgtcctttgtccatgttggattttattgattggttgagctttatgtagtgtgtgggagttttttttcgtgtattcctccatttggtatggccgtttggtgcctttgtttacatcgtcgtgtattctttagtgtgctctcttgttaggtactattaatataatggatatttgcctatcaaagaaaaaagaaaagaaaagaaaaagaaaatcaacaagagatgaaccaacaaacgagcgatggttatggtgttgggttatggaaggttataagaaaattgtgggaggtagtaaattgtagaatatccttctttgtgggcaataggagaagggtaaagttttggaaggataaatggtgtgacaacgaacctttaagtgtttcttttccctccttatttaccttagctagttcaaaggaggcttaggtggtggactttggaaagcaattacgaaggagtggtgaagaggaggggggttggtgcacttgggaagtaagtgggagatacggtgttggggtttggaaagcaattaggaaggagtggttgtttttaaatggaagattggcctaccatgtcggtagtgggcagagagtgagattctggacagacaagtggtgtggagatgaaccactttatgagtccttcccctctttattttccatctctttgtctaagaatgcttgggtttcggatgtttggaatcccgttggtgatggggatggttggacccctctttttgcaagggcgtttaatgattgggagatcgagttggtggagcattttttgcagaagatccaagccttccgggtgcaaagggaggaggaagatagagtattctggatagctttaaagtgtggcgctttctcagtcaagtctctttattctattttggagctcggaggtccttctttgttcccttgtgatagtatttggagggtgagagtgcctcctaaggtagcattcttcgcttgggaggcttcctggggtaaagtcttaactttggagcaacttcaaaggagggggttctctttggcaaacaggtgttttctttgtctatctgaagtagaaacggtgaatcaccttttacttcattgtgttaagacgcgggtcttgtggaatcttcttttctccctctttgatgtgacttggactttttcgtgtatagtgaaggaaactcttcttaggtggcatggagcgtttgttgggaaagttcgtaagaaggcttggcaaatgattcccttatgtattttttggtcagtctggaaggaaaggaattttttagcttttgggaatggggaactttcgcttcaaatattgaaatattcttttgtatgtaatctttggtcttaggtcagggtttctttagttttaagtccttctcttgtaagttttttagactggttaggctctaagtaagggaaggtggtgtgttgctttcctttccccttaggagtgtgtctttgggcttgtttgtatactccctgtatacttggaggacactatttttggtgcttcctcttttcgtttaatatacttcctttttatctatcaaaaaaaaaaaaaaaaggaggcttaggtggtggacttgtggtttcattctaatggaaggggtgtttagactcctagattctctaggtgtttaaatgattgggagattgaaattgtggagtgcttcttggcaaggctacaagataaggtggtagttgatgaaggagaggataaggtgtggtggttggagacaaggagtgaaactttctttgttaagtccctttactctagtcttgagatggggagatcagtgccgttctcagtaagtactaggtggaatgcttgggttccacctaaggtgagtttttttgcttgggaggcgatttagggaaaaacttggactcttgattagctatagtggagagattggtcattggctaatagatgttttttgtgttacactcatgaggagtcaaatgaccacatccttctgcattgtagcaaggcgaggttgttgtggtagcttttgttatctctttttagtatttcatgggtggtttactcttcagttggagagactttgttaggttgacatgactcttttgtcggaaggaagtgggaaaaggttagggtagcggctcctttatgcctttcttggataatttgaaaggagagaaacaaaagatcgtttgaaaatgtggatttctttgatcaaagactaaaagtcttatttttatgtagcttgtttttttagaccaaactttttataggagaaagatcaatgtccttatttgatttcattgattggttgagtttggtttgagggagggagtggtttttgttttcccttcctttttttttgtgccttttggtagtcgttgtatacatcctgtgtactttggtgcacccctttttggcgcttttcaatactattgctatttacttattgggaccacatttcctagtgttcgccctgaccaactgggttaccctaatgggtaatgtcattaaaagcccttctattcctttcaatagtccacaacaggcataagagagaagccctccacgcttttttctcttttttgcacacgaaagagccatgtcagctcaacaaatcccatctaatagaggaacacaacacccactgcactccaaaaaacaagagatgaacctggaaaataataaagaaaggaaaaagggaaaagactgttcagtaaaatgagaaaaaaagttcaaaacatgtgacaaaggcgtttagtgatgaaactcttagatgaaggctgtaaacttataatactaatatgctgcgaaccgatagttgcatgactaaagtccaacagacagatctgaaaattgatgaagaagaatgaaatataagaagaaagaaaggggtggctaggcagtgcatgtcaggtttgttgctacaaactaaataggagattctttaagagaagacaaaggcaagagatattccagtctttccattttttgaaatgacaagaggagatgtggggatcttaaatcctttgaattttgggaattaaaaatcttgaccaagagctgggacttagaaacacttatgagaagtcctgactcctgggacatggtaaatcacacccttcaacattacatcaagcatttgcaaaaatgctgtggttttaaaatacaccccatccatactgggtgtaataaaattttgttatggaaaatggttagaagttgtgtgtcttgcttaagactaaaaatatttgtttgttctaaaatagtttcatgttatcgctagatcactggttctgatatatcacccctatgtgctaatcccagctacaagggacatgtgcatgagtctcatgagtaagttgtggacttgaagtcttggagcaccctcttttctacaaatggcatgtgttcttgcatgtcatgataacaatgcatgcacaggcttagtgggctcctgttgggaatattcttggttctttgaatagttattagcaaataaattttgtcatttgttttggatgcccttttttgggccatttctgcagtctttggttttgttctgcagaagttgttctcagaggttaactgtaattggaactaacatatgaatttttttcatctactatttggaagtgcagtttagtttctttaaaagaaattcatctttttcaaacctgtaataacttccacttgtttccattctacagtgagttactagctaaagaaaggaaagatctatttt

SEQ ID NO: 12074 - DNA, 1347 bp, Vitis vinifera
  Intron number 6 from transcript GSVIVT01014163001 (locus G SVIVG01014163001) derived from phytozome v7.0 (chr-ID chr1 9; pos 988134 to 989480)
actctttgatatccaatttcatcctcccattgcaggtgatttctactgtcatattctattactatgctcactgtttcatttgtatttttttagtttttattttcttgtatttgttgctattacatgaaattaggactgaaactttctcaaccccttgccacttgagaacttctgttttccaagtttctactgaataaaaggataatattctgatttaggccaggaaatgatatttcatattcgagtgccctgcggtgtatggaggcttggtcaaactagttgattgaactggcatatagggcataactggcctcatttctccttctgtccgaactgatcctttttgtttcacccagctaaaaccattactaaaaagcagcaaagttggtttactgtgtaaatttcttatccatacatggatcgtcgaatagcatctgttcataggcaatagctgcaatccaccaatgtgacattacatattaagaagcatatatgttaataatttaaagaacttttaattcagaatcaaattgttccaattctaaatactccaaactttatccactcagtcaagaaggctttggggaggtttatggtttttggggagttttacattcatttgatattaatggttattataacaatacctaacaaatgaagacatgagatgtttacccatgcacacatgcacatacctacacccatgtggttgctaatttggtagggagtaagcatttaaaaaattggtgaaaggttttaattaccatttatgagattttattaaatatttggctaaaattctcaagacctttatcattggatcctcaagaataaagaacacctaaatacctaaatatcatcattttaacgatattgacataaattttttcaactagaaaaataaagatatatgaaactatttctttcattgccactgtgaatattatcatacatctgagaatagattggatcctacagaatcaaatatttaaaaacccttacaaagccaagaaaattgcttcaacctaatcttatttaaggaaattcagcaggttagttatgttgtggtttagtgtatattacttatatcacctacaattttttgtgtttggtttggccaaaattagaacctattgactggaggttctaattgggggtttggcattaacaaagcctcaaaaatctacaaatggacgtgagaaacatctctctctctctctctgaactctccataaagattaaatgttaaatgttgctttctgctaacagtttcttaatgtttttccatttattaacttcaaattgagttggtagttcatgatgatcttggttgctttctaatgcagg

SEQ ID NO: 12075 - DNA, 32180 bp, Vitis vinifera
  Intron number 4 from transcript GSVIVT01033121001 (locus G SVIVG01033121001) derived from phytozome v7.0 (chr-ID chr4 ; pos 7859860 to 7892039)
caaagcaagagctgaaagtacctgaagtagttcatgtgaataactgattataccctactgtgtatttcacagaaaagtagcacaatgactctggcctaattcagttgacgtttgaatttaggtcaactccatgtgcatattataaaggatctgtgcctgtatgaattaacgaagatgatcaagggaaaaaattacttaagatgatgaacagtagtgatgtgctgccaattcatcatattcttatattcctagcccaaattttgtttttcctataattttgtctttttagtgcccccatgctatagccccatgctatgacactgccacagacaatttaaaatatcttacatttatatttaaaataaaataaaataaaactattgaagagagcgcactcctcttttgacccggcccaaaagttatggccaaagatttatttattaagcccaaaatgatcaccccatttcaagcataatccaattaaaatttataattgttttaaaaaccggaccaaataggccaccggtttgaccactggccggtcaccaatccggttcggttcggccatttgagctggggagcctttgaacctgtgtcggattgccagaaccgcggttggactggtgaaccggatgactccgccggtttcgggtgagccgaacggttcactttcctccatcaaatcaaaatattaagaactgagatttatatatacaacagaaggtaaaaactaaaaaaagataaaaaccagacagattataggttttagggtttgctaaaattgttatcagtgacagcaccaggtaaagaggagccgagatcggccatgttaaagttctccttgctgttgctcatggagactttagagattgggaggaagaaagcctaaaaaccaaaaccctagaagagagccttgttgtggtcggtaggaaagctgatttgggaggagagttacggtttgaagacttgcttcaaatcttctccctttctttataaacctcacacctttcgcctatttattgcggttgtgccactagaaggccgcgtttgacactttcccttgtttctaacattcttattttactcttacttttccttttttaaatgacattttttttataattttaatttcttaaacacgaatgggttggagtttttcccattaggattgggatttcagattttaaatcaaaattaaataacaattataatttaagtcaaactcatctattaaatatccaatcaatttcaactccaactcaaagacgcaatgcacaatcaattttccaccataaattttttaaaaatagtttcctaataaataaaataattattttaaaaatcataagatataaacaaactacataataaaaacaaaacatgtttaaaggtcattagttattaattaaacattaacaatagtctataaatttgattccaacattcataaatgttttagtaattagacaaaaataatgaatctactagtttaatataattaaaaatattccatttttgtttttaataatataaaatgttaaatacaattcttctcatcccctcgcaatgccccaaccccttttccgatgcccccaaaacccttccttcctaaggaagatacgagattcccattttcctatctttttggctgccttttccaaattttaattttttttactccatcaacattattatttattttattttatatttattatttttttacttcatgatttttaaaacttgtgattttaatttaaatgaatgaaaatattataattttaaataatttatgattataaaataagtttttgatttaaaatttcaaaatttaaattaatattctaattttaattttaatttctaatttgaaactaattttatgaattttcaaataaaattttaatttttaaataatatataaattattattattattattatttttataattatttttaaatttaaataatatgtaaattatatatttatgacatcaccgattcgacggtgttggaaaaatttaaaccacaaacaggatcttatgaaagacattaaagcatgcaataaaaatttggaattaagaaaagctgaccttgattgattccatagaaagccattcatgtgttcttctagtattcaaggatgtactcaattcgtgaaggagagaaaccccaggttcaattgactcttcccttcctatgcccaaaaattgtgtgtgctctgaagagatcgttcgtgtagtacgttctttttttcagtcctaaagagaaaaatagaatagaataggatagccaccctgcctttttcccttatatatatatatatatatatatatatatatatatatatatatatatatatatatatatattacacatatcacacatacacagtttggaccacttgacttaatgggcagtcaagtgaattagggtgagcccatagaaatcaagcaataatgtgtccagccctattatggaccacaatgcaaaaattaaattaacactaatttatggcattatcaaattgattatgtaagtccacacataaaaattccaacaattctcccacttggactacataatcaaacatcacaacatatacataatcataaatcgatgtcccatagaatctcatcaaaacaaaaacaaacgcaatcatatatgcttcattgcttgattcacaaggaaatatacaataatagcaatccttccaacaataacataatattacaataccataagattctcccactaacttaatacaacctaggcttccaacaaccccatttgagatcactactacaaaaaatgtaatttatgacgctttttttcttgacgcttatataaagtgccattatttattctcaaaaatgggtattaatgacgcttgcattatcttggcgctttaatgggagaaataatgacgtttttaaataatgacgattttttaagtgtcattgtacaatgaatttcaaataatgacgctttttgtgtaagccttttgttagtcgatacatgttcctgaaacacaactatgggtaacccttttgttagtggatctgccaacatactttttgtggacatgtgcttaatatcaataagagactctgccactttctccttaacaaaatagaactttacatcaatatgtttggagcgagaaatactcctagtgttcttagagaaagcaacaattgtggaattatcacaaaataatttcagtggtctagaaatggagtcaacaactcccaaagctgaaataaaattctgcattcacatagcatgacaacaagcctcataacatgccacatactctgcctccatagttgaggatgctgtaagtgtctgcttcacacttttccaagatacaactcttcttgccatcataaaaatatagcccgtagtggatttcttatcatctatgcagcaaggaaaatcagcatcacaaaacccaactacatcaagtatgttggtgcgccgatatgtcaacattaagtccttagttccttgcaaatacctaaggaccttcttagcagctttccaatgttgactcccaggattgcttaagtaccttcccaacatgcccacaacaaaagcaatatcagggtgtgtacatacttgagcatacataaggccgccaaccacatatgaataaggaatggttctcatttcctctctctcatcatcattttgaggacactgagcctttgaaaactcatcacccttcacaattggcactctattagaactacagttgtgcatattgaagctcttcaatattttctcaatataggttctttgagacaatttaagcaccccattagccctatcacgaagaatctttatgcccaaaatataagaagcctcaccaagatccttcatgtcaaaatgggttgacaacatgtgctttgtctcaattaacaagtcagaatcatttgatacgagtagtatatcatcaacatataaaacaagaaatatgtaactactcccactgaccctcaaatatatgcatctgtcaactatattctctttaaaactattttgggtgataatcttatcaaacttcaaataccattgcctcgaagcctgtttaagaccataaattgacttattgagcttgcaaactaagtgttcctttccaacttctgtaaaaccaataggctgctccatatgcacgtcctcatccagatcaccattcaagaaagctgtcttgacatccatctgatgtagctccaaatcaaaatgagctactatggccataatcactctaaaagagtcattggtcgacacaagtgagaaggtttctttaaaatcaatcttttctctttgactataacctttaaccacaagtctagctttatatctctctattcgcccactagaatcacgtttggtcttaaagacccacttgcacccaactggtttacaaccatgtgacaagtcaaccaaatcccaaactccattcatatacatagaattcatttcatcatccatggcttctttccaagaagtgaattgaggacaatgaattgcttcttgataagtgattggattagaagcatcataaccatcatactcatgtttttgcaaataaatcatgtagtcatctgaaataaccagcctacgaaccctctatgatcttctcaaaggaatcccatcaacaacaatatcattaataggaatgccaggttccacttgatcaccatgctctccttgatttgtggctggctcttggacaataggaacatccacatttggaacatgagatgtaggaaaaggaatcacaacatgctcttctccaaaaggtatctcacgaggcacaaaatttgggtcaacattaacttcatcctcaaagtatacaaccctgtttgactcaatgatcttagtggtatgagatggacaataaaatctggaaccccttgatcgaatgcaatagccaacaaagaaaccaccgatggttttaggatcaagtttctttgattgtgggttatatggcctaacctcagccttacatctccaaacatggaaatgatgaaggctcggtttcttccttgaccatatctcataaggtgtcttaggcgcagacttactgggtacttgattcaaaatatatgccgcaatccttaaggcttcaccccacaaaaattctggcaaggaggaattagacaacatgcacctcaccatatccagcaatgtgtgattcctcctttctgcaatcccattctattgagaagtgcctggcattgtatatctagcaacaatgccgcattctaatagaaacttagcgaatggtccaggattccgcccagtctcatcatatctcccataatactcaccacctctatcagacttcacaactttaatgagcttttccaactaaaactccactttagccttaaaggccttaaacacatttagggagtcagatttctcatggattagttcaacataaccatatctagagaaatcatcaataaaagtgatgaaatatttataaccccctaaagcagttggtgtcaaaggaccacatatatctgtgtggatcaagtctaaagtgcttccatacctatcaatcttctcctttctggtcttagctgtcatcttcccctttaagcaaacaacacaagtctcgaagtctgagaaatcaagattagaaagcacaccatctctaacaaatttctctaatctttgcttagaaatatgacctaggcgtttgtgccacaacatggaagaactcaaattcattctagcacgcttgcaacctataatagaattaacagaaaatgaatcacacaaaggaccatgatgcaaattgagactataaagattgccaaacaaaacaccattgccaattaaaactgagttgctaaaaatatccacttttccatctccaaagtggaaagagtaaccatgtctatccaaaacggatacaaaaatcaaattcctcttaagtgagggtatgtaaacaacatcgtataacagtaaaaagctttcggtggccaatcttagcttcatcatgccaaaaaattatactttcactttgcttccattacccatatacacacattcttcatgctttgacgacctcattttctttgtcatctcctgcaaagaattagtaacatgaatagtggcaccagtatctaaccacaagaattagcatgaacatcaacaatattaatctcaatcatgtttgcattcaatagaattcttgtgtggaggttttttcttcatattgctcccttggttagtaacaagagcaatgaagtgagtctcatttttcttcagtgagacttcatgttgcaccacaatggacatcaacttctccaaagtccattcttccttcaaggcattataggtcaacttcattgcatcaaaggaagtaggaagagactcaagtatcaaccatttcaggaatttctcactcaactccactttcaactcatttgccttgttgaagtagtgctttagcttgatgatgtgatctctaacaccacctactctatcatacacagtggttgtgagaagcttcaagtaagttgccatttatgccttatcagtcttggtataattggccttcacatattccaaaaaatctttggccctttccatctttgacacacattctttaatggacttatccatagtgtatttcatcaccatcaaacaactcctattggagtgctcccatttctcatagaaggatctttcatctgcagagctcatatcagtgggcttacttggctcatcaactctcaaagccaagtccagattttgcaaagtcatatgcatgttgaaagactcaaaccattcctcaattgtttccagtaagaggcttgatgacagacaattacagagtaatactagaattgctaatagctggaaaatagcaaaattaaacaataggcaagttactacaaaatcatgctatttgatagtttccagaatttctcaatttaccaacaacttagaattttgaaaattccacaacggtaaagacaactaattaaatatcacaaccaagatacactaattttattattgaaagggcaaagaaaattagtacggttcataatatataattaatttccttcaccaatctaagcatcctatcaagtattataatcatcaataggacaattacaatacccgtatggaccttagtaatcacaataataaaacaataaaaaatgtgggaaattaaatatctcaacaaagacaatttgacacatataggatcacgataggcaaccacatatatgttcactattgtcatgatgaattcaaaatatcttaatttgcacaacttgacacacttggaattgcgataggtaatcacacaagtgttcttcaatgtcatagtaaattgagatattaaaacaaatagcttaggacaacattattggtataacacaaaaattatacccaaaagaacaacaacaacaacaacaacaacaataattgtcccaataaatccaaatttaataaatgcataataattctaacatatgcattatcattccaagaattacaagacaaaaaagaaaaaaagaaaaaaaagaatttgtttgtttttttaatgatgtcatgatgacgtcatcgtcttcttcacgggctgaatagacctggttcgggttgaacagatttcgagaagaaatttttttttttggccaaaaattatgcaatttccgatgcaaacaattagttttccatcctcaaacattaatccatcaatcttgaccaaaaaattgcacaaaaacgcataaacgaagaaccataagaaaccctaaccttcgaaatcccatcaattgagttccaaaaaaccaaaaaaaaaaaaaatgatggggtttcctccaaaaggtgttttctacaattctctaacatcaatttggcttcaaaacggagaattaacaccaaaaaaaaaaaaaaaaaaaaaaaccccaaaattggcttccaaaacaaaacggaaaccttaaataatccaaacaaaaatgcagctgaaatgtcatccatggtggctctaataccaattgttggaaaaatttaaaccacgaacaggatctcatgaaagacattaaagcatgcaataaacatttggaattaagaaaagttgaccttgattgatcccatagaaagccattcctgtgttcttctaatgttcaaggatgcgctcaattcgtgaaggagagaaaccctaggttcaattgactcttccctttctacacccaaaaactgtgtgtgctttgaagagattgttcatgtagtacgttcttttcttcagtcccaaagagaaaaatagaacagaataggatgaccaccttatctttttctcttatatatatatatatatatatatatatatatgtattacacatatcacacatacacagtttggatcacttgacttaatgggcgagtcaagtgaattagggtgagcccatagaaatcaagcaataatgtgtccaaccccattatggaccacaatgcaaaaattaaattaacattgatttatggtattatcaaattgattatgtaagtccacacataaaaattccaacagatggtggtttgactgccggtccgaccagtgaactatgaaccgataactttttcggttcaatgaccggtccgattctgaaaacattgaaatttattgccaggataacttaatttttttttataaaatttcaaatgatagagacacccctatcagaaatcatccctcacatatgaagaaaaaagatacatatttctctcaaaatttcctccactttcctacaaaaacaagaacagaaaaaaatagaaagaaaattactcatcaacctcttccttcatttccctctatctttaaggttataattaatctagctacatattgatttatattttctaacgttcagccaatgcccctgcgtctcataatatgagacctggtacttccttccaatactaagctaagcttctattcaatttcttcttgggaaaaaaattcaaattcaaatccaaatgtcataccgtgcctttggctaagttatctcaaatttttaaatttggaagagcatatactccatcatttggacttcttattcaaatattcttgttacgccctaacactataattcaaaggcatttacttctcattccatgtttattatttaaaggttaatttgttgattactactcaaaaagtgctattttgtagcttgtaattaatccttttaaacacttttgagtagtagttattgccttttaacccaattaacatgttaaggacccttgcaatcatttctaatcaaattgtgtaagttttggtgtttttgttagtaatttgatcaccaaagcaatccaagaatgagggagagctgtatatagttcatggcaaagcttttggaagctcaaattcatgaagaacaaagctttggagctccatatccctttgccaaagtcgttcaaagtatgcaaggagagaagcaaggagagaagcaaggagagaggaaaaacagagtgaagaaaacagaggacaagcagctgcagtcttcatgtgcacttttggagcacttcccgaagtccattttctacattctatataccatttcaaagctcaggaagtcaagaatccaatgctttaaacggtacgcaattcagagttgaaacgaaggagttacagccattgcaagcagatcactccaaagtgttgcgaaatcagccttttgttgcgagaatttcgcagcctttttgtacagtgctatggaattcctcctgaagccacccgatacatgccgcaagctggaacgctgagaacctcaaggtggaagccaacttagcagccctgcgagttcagcttgttgatgcgaaaatatttcgcagccctcttgagtgtctgcgaaatctcgcagacaccatttttcacctgcgaaatgttcctggagcttcccgatatttttgcaccgactcttttagatatttttcttcagatttttgtgtctaaatttccattttctccttgtattcagccactcatgtaattccttagctaggaagtatccaaggaagggtaaattaccttcctatataaactctcttgtaaacactctcaggtgacactcggggaagtatgtaatatatagatatatcatatatagaatcaaggaacagagcacttgctctgtttttcatatatattcttatcttctctttcattttcattttctagccaaccaaactctgaggattttttcacagagaatgagaggctaagctttttgtctcttggagtgaggaaagccgggtaagtttccacatgtataatttggaagttttgttgttttagtttttgatgaagagaaagtgtgacccgttagtgatttctatgtttttagttaacttaaaacaccttagagtcacctgggccaacacttggtaaggcaagtgatttccaaccatggaaatgcactagtttaccccttgcgagcctctgggaggtgacttgaaggtaggattttctagaattgccaacacttggtaagcttttggactccaaggagacatccattagttatctcttgcgagcttttgacgggtaatccaaggttaaagatcaccttgaatggcaagtgctaggtgagaggtatgagtcattgcaagatgcatcagtgagagggatttagtgtttgaacccattaatgggaagcatctgtacaacaccggttagagaattaactatatgttaattctctaatgcgaggaaaataaacgagtgaccggaactccctttttgcatgaggaatctgagcctagtgatctgaaactccaagaaacacttttctttgtaagtaaaatcatttactatttttggttagtttaaaaccaacctttttctttcaaacatctttatgttttcttttaaagctaaccattgaaatgaaaaggcaccaattcaactttgaattaatatcatttgtgaagtgaaaacccatcccagtgaacgatcctagagccactatgctatagtagctttgtctttgctaccctagtatatggtgtaataggttataaattttgttgattactccctcaatcaaggagcaccagctggacacgaatcagctgagacaccaattgggcacgaatcaaatggcgccgttgccggggatcgaacctcgaatcaaatggtgccattgccactgccactgctagggacgaatcaaatggcgccgttgccggggatcgaaccccgaatcaaatggtgccattgccactgccgctgctagggacgaatcatttgtgttatatcatgtacatgtacaaaagaaaaaaaagtaatcaatgttcctatttttgactcagtcttccctaagctcttactcatcatcaaagccaaaattaagaaaatgcaaggaaatggagagtttcttgtgtgttcatttggtatatttgctgccaactaacatacatttgtaatgacggaaggtggttgactgggtttaatggtatggtataaaggtaaacacctccattgggtatgaagatcgaagacatagtcaatccttgacgcaacaagaaaactatttatagggttgtggtttttgatggattagagggtagtagttatagacattgagttagtgaaagaatatctcagggtttaccctctcttgctttgaggttgccaagaaaatacttcaatattgttcctcaagtagtggcagtgactttattgtagtttggtgttgacgacaattttcaagttgatcatcttttcctcttgattaacaaccatggttcttagaggtatgatatttattcttttgctcaagtgggtgacttcttgcaatagtccaacgaaattgttgagctattaaccaatctccaaggatttctactaactttttcccaatttggatttttgatggtaaaaggaagttactacaactataaaatgtaccaaaggttgctgaagaatggcattgcaaggcaagtgataattttcactaggaaatggactttggtttggactagtccatcttttactttagggcgagctgatataaggcatatgaagattcttcataatatcctatcgagtcaaagccatgacctcttcatttttccaaaacagtcatagaagagtaagtcaggtgatcttcctacatcaacaacaaacctagtataacttgaacgactcattttttagtcgctttgtgattaagttgatttgatcaatgctcgagtgttcccttagccctggtttgttggtcaagttactttttgctaatgagtacttgattagtggacttctagaaggtagggcctttttgaaggcctccaccatagttctttaattgttgctttctacttacattattttttatatgaatcaataaacaaattttcttaaggactccttaaatgcttaccttacattgaagacatagttcacacctttccttggtcaggggttgtagatgtactatttttggaatagttcacaaggttggtggagctatgtattaactgtctagataattagtagaaccatatgaaagtaggtcatcataagttgataggagaaactcgaaaaggtagaccttcacaattgtctactagtatcatgagttgatgacaattgtaaagatgtatgattgggttttccatgccatagtgcaagttgaaccttgaggccacatagtgtataggcaactctttttgaagcaaaatgtgagtagtaggtgatgcacacactcaattccaatgcttcaatgcctctaagattgagttgacttgcaattttaacaagtggaccttcgtagataattctttatacttatgtcccaactttgtttgactccaaacttggtcgtttaaaggattttcagtttgagaccaactaataatgggattgtggtgtcttgtaatgttattatctgagagtcctttatgttgcatttggtctgacaagcttttaggccttaagataagcttcctatatagttgacatatattgctactattaggaacatcaaatttcttcgttccctatccttgggtctaatagggtaaatgtaaaccatcttaagcttttctaaatctatcgtagctgaaacatatgactataagaccatattaggataaagatttagagaaaaagtgctcatacctagatttagatgttcttagatcaattccttgttgtaaagagtatgtttgaatagcttagaggtctcgtacacctaagattttctacccgatgacttgaaccatatccatggcactccaaagagtggactttagaagggtggataccttggttctctctttagaggtggaagacgagtaactaaagtcattgaaaaaccttaaccctttaaaggggtatttatagggttatctactaggcttaagtgacttgagcccatcaaggcttgagtcacttaatctagcccaaaacgagttctaatcgattaattaatcatatgagaccatctaattaatcaattagcctaatccaaagaccttgttcattatctcttgtgcaaccttgcctaattatcagaatgttcttatatacaaaaatgaagttagtgccaatccaaccctcataaactatgtcattatgatatatgagcttgagcagagaccattgggacccataggagtattgactccctcaaaattcaattatgaagttgattcaatactccactaaagagaatcaactgcactccaataccttatgtaaataataataagacaaagctcgggtctgtgcatgtagactcctcatgaactagtgtccataatataacaaggtggtgctatcacctatccaaattacctctcaaatccttgagttacagatcttactcattacatgatcaattgacatactttaactccaaggagcatctgtcaaattccactaaaggaactactatagccataaatttcatgatcacatgtcctttagattacctaaggggatacactatctcaatcccataagatatcatggtgcttctattgagaatacctgttgccatcgacatccatcaatagtgacccaatccataggaatatatgaactctttaaggtctcacccataagtcaaagcctcctgttgattttggcacatacttaatatcctctcaaggttgagagtccatgtagtatagaaacttggtgaatcatgaaaattgatagtgttgcatcatgattcactatagatcctatctagtgtgtatcacatacactactacactcaccatgggaaacttttctcgacaaccaaaacaattcatccctctaactaagtggtggtgctctatagtttctactggattgcccaaatccatgaatcgatcgtggataacttatctacttacaaagagcccatgactagtatcttctgtgcaactcctaatacacctaaatcatgtacaatgtaagagacatgggttgaatgctcaaatcaatgtcaatacaccaaaaagataacaaagagatagttaagtttaactttgttacatcatatcttgcttttagggccttaagcccaacaactaatttagctctatatcagtaatgtatctcttttatgggtctaaaactatgaattggaagtattgtagacaagtaacacacaaatcttaagttgtttgtagtaaaattctaacgttgtacttcactattagagatttggttgtgcattaacctttttcttcctctccatgtgaggctcatgggtgcatttatactaggtccaatctctttgctagacttcccaacttgttgctctcgattaagaggttgtcattatatgcgagcttgagatttctaatatgttatttcaatgatcttctcatgagatggacttattccacaacctgctttgtcttgaaatagttcctatgtcataagttaacaagtaagttcaattgtttaattcacatacaattaatgaagtttgtaatgtttccaaagtaatagtagaaaaagattcatgttgagttttttacatattggaattgttggaatcgactacttaggttttgacgatagttcaactttttttttttattacagagcacatatgaggacatttggttaaagttttttttcgtagggatgacacatgcatgaggtaagaggaacaatatttcttcttctcccaattacaggattacacaaggttgctatatatcattttaccatgtaacttgtgggtttatatagttagtacactttgtcatggaacaattttttattttattttgatgggttgaaatcatggattgatagccttgattctctaaatgctaagggttgataatatcttctttttagagccaggtctggtagtttaccgtaccttgaggtagattgctgccaaggtgcctattttagggtgggttgactttaggtagctcccatatggaagttggtcttggtgtaagattgacccatactcaaaggtacgacttgacttaatgcatacaagtgcaacctatacctaagggtgtggaggtgggtttagcaaagagatgtcttgagataagacgattaacacatagaggtggggttttaggttagtgttttcttcaaggttcttataaggaatacctttagatcattttttattgttcatcttaaccgtttgtttttggctagactatcgataagagtctttgttttgagactaacttggctttaggtttttagttggaaggtattcctaacttgtaagatattgggctttcaccattttcctttgtagaacaaaataaatgagctagatataataaaataagtaagttagagaagacttatttgaactttagttgatcacttacttgggtgacaagttttccttgtatttagttgatgtgtatgtgagttgacatcaagatcattcttatgttttctgatggctttttttgttgaggttgggtaagttagacgacctcttaagttgcatctgatttatgagcacatgaggtgctttgaagtatgtttgtccaccatatgttgttagtgacttttatagcttcttaatttcatacaagtgccttcaacttgggtagttgttatgaaagaggtttagctatcaactcttttgaaaggtgtgttggttggtaggtgtaggttgggttgctttgttggtgtttgagaataaggtacctttggatgctcgagatgaaggttgtcttattttatatgtaccttggatttgtaactaggtttctaaccaccttctaatgtgcagtagctactaaacttgcaagcttcaccttctatactcgcttcacttcccatgcaaatattttcaaatatgaccatggacaaggagggtcaagtcatagcacctgaggcttaggtcatagaacctaaggatacaaattttaggtagacatatcaccttagaactctatcatattcaagaattgctctctcaatgtgaaacaagggtcttaaggtgctattccaatccatatttgcttctcttcaatcccatatttatgaagcttcaaagctaatattttcttgaatatcacataagacaaaaatgattgaagtaagaattacaagagaaaaagaaataagggaaaacttccttggaaagattcagattcagtttttgtccccgctatggctttttcttctaactaagtagggcttagactttcccatagatggtgccaatgaagatcaatctcaaattctttacgaacaactgagttttattcaaaattagctaaatatagaaaggaaatacaagcaaggatcttgtttttcatagaaggacctctccttcccttctattagttgcatatttttataaccactcttcacatgaaggagcagaccttttttttttctatgccaaaacttttttgccacaatctaccaaatgcttttttcaggccttttttcaacttcaggtaggaaagcatcaactaggaaagaaggttagtgctgaaggtcatctcttgtgatggaccttactcataggtgaagtgatttataggtgaaatgatttttgtattttcaggagccaaaaaggtggcgttgctgcaacattcgatgaaatcccttttgtgaagcttttcctagcaaaatattgcttcaaatatactgcagttcaaccaagattcaagttcgatggttttggactagtaatttctctcacatataaatgtgtacaaattgtctttgtgtcggtttcttacttttttgaatttcaggtctttccaaagcattcgcctctggtatctaacgtttcaatgcaaatcttaaatgtgactgagggaaatcaaatggaaaaaattgtgcaagcatggcttggtcataaatcgagttgtccagagctcagcaacttggtttctttagacagcattggactcaatagtttttggggtctattccttattgctggagtggcttcatctgccgctttcatcttatgtatggccactttcgtgtatgaaaatagagttgctttagtacacttgtatcccccagcttcagtatggagaaaaattaaagccttggcaaccgctttgataacaaggacctcaatttccatactttcaaaaaaagcgaaacgacagacgcaagtggcatcaatggcatggatgcagtgattgcctcaccagccactaactgccagtcgagtccatcatgccttttagttcaaacagagagtaattttgctttctccagagacaaagcaacacctgcttttgaaaatggtgatccaattagtcccaatggatagacatctccagagacaacatttggtatcgatcttgccaattcaaatcatcaagagcaaagaggactgcttgaagcagttcatgtgaactactgattcatttttcttttcttgtatgctgtatgacagtggcaccagtatacacaactttgtatttcaaagaaaagtagctccataacattggacaattcagttgatgtatgtgctcaatttatgtcgactctgttgacacggtctctctctctctgtgacacccatacacccacacacccacacccacatcgcaagagcaaaaataagaaaacgataattaaatttatttggtgatgaatgtgatttttgtgtcaatgagcacaccaatatttaataatttatcaatcaaatgaaggtagaaggtttacaatgattaaggttcccattcttcttgtaattaccgttgtacacaatttttttctcttaaaactctaaatcataaaaaagttaaatacaatacgaacaaactccttatttgataaataataaaagaatttagattcaaagggcattgctcctttcaactcttgtaagttgattggataactcaaccttgacatattctacataatgtaaaaaaattgatttagactcatggtccaataaacttcatatacatcttctaaaggatttgcgctagtatgaattagcaaaaatgatcaagggaaacaattacttatggatgatgaacaattatgtgctgataccaatgcatcaaacttggatatcaatggagaggaaaaataaaatgaaataaaataaagagaaatagaactgttggcacattaaatgcttgagcgtgaggggttgactcaacatggtagaacttatgatagatgattttttcaaaatcacttttattacaagtattttaaataaaaacacgtcaaacatattttaaaatatcttacatttatatttaaaataaaataaaataaaactattgaagagagcacaccgacccgacccaaaagttttatatggcccagacttatttattaagcccaaaaagaccaccatttttccaagcataatccaattaaaatttattgccaaggtatcttcaataattttataaattttcaaaaaacaaccctattagaaattatccctcacatgtgatgaactcttttatgtacaagctatgaagaaaaaagatacatattttttctcaaaattttctccactttcccgctaaaacaataaaagaaaaaaatagaaagaaaattacccatcatcctcttccttcattttcctatatttttttagttaaaattaatctaagctaagtattgatttatattttcgaatgatgagtcaatgctcctgcatctcatgatatgaggcccggtaattccttccaatactaagctaaggttttgttcaatttctccttgagaaaggaattcaaaattttaatccagacgtcataccgtgactttgcctaagttatctcaaactcgtatgtttggaagagcatatactctatcatctggacttcttattcaaatattcttgctgcacctcaacaatagaattccatgttaattatgtagaggtaatcaatttgtgctgtatcatgtgcatgtaaaaaaaataaaaataaaaataaaagtttcaattgtcgaatcatcaggtagtgtttggttttttactttactctaaataaaactttaatacttaatagtgataagtattaaatgacttgttttgtaatattttatttatattaagtattaaaaagtaaagaaaaatcaacatgttattcttttcatttagaaaaaattaaatattatgattttttttatttaacaaaaaatttataataaattataaaaaaagtaaaaaaaacaaacaacctaaaataaattattttcagtaaaaaacaaaaaaataaaaaaaataaaaacatcctctcagtcttccctaagctcttactcttcatcaaaaccaaaattaaggaaacacggggaaatgctggatttcttttttgtacatttggtacaaaaatgacctcaaaagcaggaaactttgaaattttctaccaacatacagttgtcatggcagaatctggggactgggcttgattggagtctcaccgagtgaacattaaaatttcaactctcttctaaattctgatgactttaaactgccaacaagagtatatttaaggataaaaaaattacaaatgaaagaaaatacataaactaaaattataaattagagttacacatatataatgttaaaataatcaaacacattggcattatttacttataatttgcttgtcaaaccggcagaatactttcttggaaagtcttgattaaaatggcaagactcttgtctaattgcctcttggtttgataggattggtagggaatttctttagaatttttttatgaatgaaaggagcggcatcttctatatggtttgtagcataatgtgaattccccaaaaatactttgacttgttcaaggtaactgaattctacaggatagaccttatttaattatacagttcccactcctatggaccaagccaaatatgatattatatggttgcttttgcttctaggacatgcaagttatatggatatttggtgcaattgttatggactcacaacgtgtccaataagaacttttctttagttacaattttactttgttaatctaaatttataaatgatgaaaaaaaaatacgttattgaataataattaggattttgaattatgtttgactgctaagaaaatattagaatgtttttaaaaatattagaatgtttttaagttaagtttcattaatttataagtggtgttcttcaaattaatggatttatgattaaaaggcgggattcttcacttgataaaattgatatcaaggatagtggttatatacttaacttggatatgaagtgattgaatcaaccactatggtcctacttgtatggtctaagggctaaatataagagctatgttgatcttgccttagggttaaataaggcaaaaagatcaaattgagagggtcttcaccaagtaataagatcatgatcacttgctcaatataggcttcattcttatgagacaaagatgtctagcaaaagacatgtagtccaaagagctctatattttgctaagttcatatggtttgctttatggtgaacacttagttactaatgcatgtttaatttttgtatgataatcatgttgtataatccaatcactttcattcttacaaggaaaggtggttctaggctaagatttcgacttcgcctagttggcctacttttagttttaggatctttttgccaagatggcttggttatcagttatgacttatcaggagcccatttatgtgaccttagttgacgtgttttactcctatatatggaatgagatgggtgaccctataaattttctaattagtggagtctagatttagttaacagttactaacttatgtgttagttgtttctaaagaaaaagagagagggtttatagagaaaatttgctattcattcattttttctgaagatcttttatggagtacccaaaaggcatgcctatatagagcctagagaactacacccgtaattgacttacaagattacaaaacagaacaaaacaaagcaaaatagaaaatacaactgatttgttactaatacaaaaatgccctattattctaatacaaaaagggagagggtttatagagaaaatttgctattcattcatgttttctgaagatcttttatggagtacccaaaatgcatgcctatatagagcctagagaactacacccataattgacttacaagattacaaaacagaacaaaacaaagcaaaatagaaaatacaattgatttgttactaatacaaaaatgcattattattctaatactctctctcaagatggagaatgaatattgtgaattcccttcttgttgagaataaatttaaaatgtgttggtaagagagcctttgtaaggagatctgcaatttgatgttgagaagatacaagcattgttttgagataacatgtctgtatcttctcgcgaataagatgacaatcaatttcaatgtgtctggtatgttcgtgaaacacaggattagcagcatgtgaagtgctgccttattatcacaaaacaatatagatggttgtttgtgtttaatgtgaaaatcacaaaggagagacatcaaccagactagttcacaagtggtgtttgccattgctcgatattctgcttcagctaatgagcaagaaactatactttgtttcttagacttccatgaaatcaatgattctacaagaaaaaggcaaaacccactgatggatcttcttgtatcttcacaagcaccctaatttgagtcagtaaaggctttgagttgggttgttgaagaagaagggaagtacagaccttggttaactatacctttaatgtattgtaaaattttgtgaacaacttgcaagtgggtagattgtgggttggcaagatactgattgagtcgattaactgagtaagatagattaggttgtgtgatcatgagatataggagcttgccaatcaattgcctatacaacccaacatcttcaagaatcccctcattatcttgagaaagttggatattagcttccatatgtgtacttgcaggtttacaaccttaaaaacctgtatcagatagcaactgaagagcataatgtctttggctaatagaaatccccttacttcatctggcaacttcaagcccaaggaattatttaagttgtccaaggtctttgagcttaaattggttgttaagaaaccttttgagatcttcaatatggttggaattattgcttgtaatgacaatgccatcaacatacaccaataaggcaataaaggagtcatcatcatatttggtaaacaaggaatgatccacaattgattgtgtgaaacctttagctaatagagcactagaaaattttgcaaatcattatctaaaagtgattcgttcccaattggtgtctcagctgattcatgtcctcttaatggtccctgacagtggtgccatttgattcgtgtccagctggtgtcccttgattgtagtcttcagggagtaatcaacaaaatttataacctattacaccatgtactaggatagccttagctagcatagcatagtggctctacggtcgttcactgggatgagttttcactctacaattgatataaattcaaagttgaattggtgttttttcatttcaaggttagctttaaaagaaaacataaagatgtttaaatgaaaaaggtttggttttaaactaacaaaaaatagtaactgattttacttacaaagaaaaatgtttcttggagtttagatcactaggatcagattcctcatacaaaaaagagagtttcggtcacttgtttcttttcctcgcattagggaattaacatctagttaattctctaaccggtgtggtacatatgcttccatttaatgggttcaaacactaaatacctctcactgatgcaccttgcaatgactcgtgcctctcacctagcatttttcattcaaggtgatctttaaccttggatttcccttcacaagcttgcaagagataactaatggatgtctccttggagtccaaaagcttaccaagtgttggctattctagaaaatcctaccttcaaaccacctcccaaaggctcgcaagagataaactagtgtatttcaatggacggagaccacttgccttatcaagtgttggcccaggtgatttaaaggcgttttaagttaactaaaaagataaaaaccattaacaggtcacactttctcttcattaaaaactaaaacaacaaaatttccaatttatgcatgaggaaacttacccggctttcttcactccaagagacaaagagcctagcctctcatcctctgaggaaaaatcctcagagtttgattggctagaaagaaaactaacgagaaaacaaaaatatgaagaacagagcaagtgctctcttcgtcgatttcatatatctatattcttttttctttacattcgttcaaagatatatatagagaagatattttctaataaatatcccaataatatctttgactgattacaaggagaaaatagaaatttacacaaaatatcttgagagaaaaaatctaacttagtcgatggcaaatatcgggaagcttcaggggaacactacggcactgtgcaaaattcgggtaatctgaaatgtcggccgcagatgctctccaggtgaacgctataagaggatccagacatgcctatccggggaagttgaaacgtcctcctctcccatccggatgtgagatatcccgcgccacaaggctatccggattcctcagggtggaaggagctatgttgcaagggggaccgtttgcgtgtgcaaggtgtagggacccctctctcggatgacacggagcgcgcattgctatccggcgcaactccatccggatccctcaggggacacgcgccgcaacactatccggatatggtgttcgaatggaaaacattgactaaagtgagcaagccttgctacagcccacgttccaccgctctccaatggtgtgtccggacgccttgtttggacatctttgccatggattccaaagaactttcctcaatctcggattgctttggtgataaaaaagctatcaaaacaccaaaacttaacacaatttgattagaattgattgcaaggttccttaatatgttaattgggttaaaaggtgataactactactcaaaagtgtttaaaagagttaattacaagctatgaaataacactttttgagtagtaataaaaaagcttgtttcatcccataaattgacttgtggagcttgcaaacaacattggaaggtaaggaccccccctcacagtgataccctagaggaagggacatgcaaacttcttcgatcagatcatcgtgaaggaatgcattgataatgtcaagttgagtgaggaaccaaccatgaatcgtagcaagagctagaagaagcttgacagtgactaattttgctacgagagagaaggtgtcaagataatctacaccctcttattgagtatatctttttgcaacaagacgagctttgtgatgctcacgagaaccatcagctcgaaatttgagcttgtacacccattaacatcccatgggatgttttccaagaggaagggatttcaaagaccatgtaattttattcaacagcttgaagttcaacctgcatagcttgttgccattctgaaatcacaatagcttgagagaaagaagttggttccatgtgagaagaaattgcatgaacaagagcacgatgagaagaggagagattaccatagtcaaggactctagagagaggatatgttatagaagatgtggatgaaactgtggaataacaatgataatcttggagatataatggttgtttagggaggcggataggacgagaagtggaagggacaataggtttggtaaaaactatatgaggtgagataaggtttggaccattagaaacaaaaaatggattgtgaaaagtattgggaatggaagaaggaagaactcaatcaaaaaagaaatcataagaggaggagtttgaatcagtggattgaaaatgaaatagagattcatggaaaactacatcatgaataatgtatatggcattgttggagagattcaacaacttgtaacctttataaccaagtgggtaactaagaaacacagaaagaatggctcgtggagagaattttgtgagatgatgagtaaggttagaaccataacacaagcaaccaaatacttgaaggtgagcatagaagggaactttattgtataaaacttcaaatggagttttgtttgataagataggtgttggagtcttattaataaggtatgcggcagttaatatacaatcactctagtatcctaatgtgacattggattgaaacaatagtgctagtgcaacatttagaagatgttggtgcttacgtgcaactactgaattttgttgaggcatgtcaacacaagaatgaaaagataaaatccccttttcttgaaagaaatttgaaaaagaaagcttaagggcattgtcactgcacacagatttaattttaataccaaattgagtatgaacaagattataaaatgctagaaagacatcaatgacattagatttagcatgcaacaagtatatccaagtaaattgggaaaaaacatccacaatggtaaggaaataacgataaccttcatgtgtgggatgatgaaaagaaccccatatatcaaggtgcaataatttaaaaggagatgatgaaactgtatctgaagttggaaatgacaagcgcttttgtttagctaaatgacaaattgaacaatgagaagggtggccaacaaattgtttgagatttcatacatctttcaatgaattgagcctattgtaagaaggatgacccataccgaaatgccaaagctcatgttcaatctttgagacattattacaaacagttgtgacactagaaggtataggaaaaaggttggtaggatccaaaacatagtgattgccactgcatctacccatcccaatcatcttcccttgcatacggtcctgaataaaacaagattcagatacaaaatgcactgggcagtgatgatattgagtgagggcactaacaaaaagaagattgaaatgaaactgtgaacatataaaatattttcgataatgaaacgatcaaacaattcaacagaccctactctagtgacaacaacagaatgtccatttggaagagtaacagtggaattatgtgatggagaaaaggttttgaacaattgtagggagcaacacatatggtgcgttgccccagtatctaatacctaagaataatatggaatcagaatatgacaaatagaagaggaaataaccactttaccactgaaataggacatagaaggaccttcctgcgtttgtggtttcactgaggcagttgagctacgttgtagctgggagctcaataaggccatacgctgctgacattgactggaaaagagattgatcaacattgattcaaaaggagctgagtcatcagagagaataaaggtctaattagcgtgaacatgacctggtgtattttgaaatttgggtttatatccaagtggatatccatgtagcttgtagcacttgatggtatgaccttggagcccacaatgagtgcattggggatgctggcgcttccctttagaggtaaaattaccagtattagcattagccaaagctagatttgattcatttagaacaacagaatctaatagaggggaaacttcattattaatatatagttctttgatgttccttctagactactaacgcataaactttcgtgagtggtggaataggctccatcatcaaaatctgaccacgtgtctgaacataggagtcatttagacccataaaaaattgtatgacatactcctactgctaatactccaaccatgcctgcattccatcacagtgacaagcaggtaagggttgaaaggtcttgagttcttcctaaagtatcttgaaacgagtgtaatatgtgttgacattgagcgccctttgctacaaagtgattagatgtttcttcaactgaaaaatgtgaggggcgttgctttggcaaaaatgatctcttagatcattccagatttcacaagttgtcgcactatgcattagactatccactatttctctagaaatgaaattaaggagccacgaaatgatcatgctattacaacagatccaagcattatagagaagatcatctgctgctacacaagaaatggtgccatcgacaaaaccgactttgttctttgccgtcaaagccatcatcatggctctactccaagtgttgtaaattgtccccaatcaaagagtgcgacatgagaacaagcccagaatggtctccattataaagataaaatgggctaccagaatcctccatcggttatgactcgaaagatctgctcacagcacgcgtgttggattgattacctcgagccatcagagaggaagatgaaaacgaatagaggcgagtagaagtaaatgctctgataccatgttagttgtttctgaagaaaaaaagaaagagtatagagaaaatctactattcattcatgttttctgaagatcttttacaaagtacccaaaaggcatgcctatatagagcttagagaactacacctgtaattaactcaccagattacaaaacagagcaaaacagataatacaactaatttgttactaatacaaaaatgccctgttattataatattatgctagattttggaaatacctcaaatcaacctatgtctctttgagactaagggatgataaaatatagatgattttgacattaggtaggcaattcaacaactctgtgacctactttttgataagatgactactagacatcatgcatattctttcacgattagttgagtccttcaccacatgattaactctacattgagataaagtttcatattatgaagctttctttattgattccatcttgactagtcagaggatcaatctcagatttattatcttccaacacatgaagaagtgttgtgaaagcaactcctagatactccaatatgggtgcttacttggattcttaaggcatatagcatggagttgaggacttagaaggatgtacaagccccgacagcatgtgacacatacaacacgaagtccatcaagcagatgttgtttttgcgccttctagatgtctcttggattacaaacggggcatttaggagattctcaatgagcatgttaaggaggtcgagatccttggcttggagagagaagacatttagtagggcccaaggctaaggagatgtagactagggagcctcaccatactgatcaacctaagatgtcattttagacttaactagagcctactatgttgagtgaggagccatttcattctactcctgcttccactaacatgcctttctctctgtcgtctagtttcactatgccacacaccatcttaccctttaatcaacggtattggacgaatatctctacttagattaggtcccttggtactcagatttaggagattgatttagttagtgatcattgtttctactttattgaggagcacatggattagtataaaaaagagatgactgcgtaggtctaggcttaatttgaccttcaatgtgcttagaatattcattctcatcacaactagatgatggactgcctatgctctatctttccacctccacctccctagccctaatttcctttttagttataagtttctcccttgtttattgatgttgtcagggtgggggagctatttctcttaatcatattcatatctagggtaagagatattttattattttggacatgattgatactttatactctttagatcgtcttttgttgatgctattttagacacatgtttgaaacttcatactctttaaatcatcttctattaatgacattttggacatgattggttttggatatgcttttgtcttgatggtcgttgctatggttattactatattttttagctttgattgatcactacttggatattttattgctatgttttcagttttgttgatcactaattggatatctacatatatttggttcttatatactcgaagatcttagttatactccacaactcaaactatatttattttttgattttactcttcttggttagcctaggatctttacttaactattattggatggatgacctcccatttgtgtatatcattatcatccacctattttttagtatccttacttaggttcttatgagtttttaacctgattactttattaacttattgaggaggggtttttccctagataatctagttttgttatcagtaaaaaaagggaggttgtttagctcaagggttcttctaatcaagttttgatgatgacaaaacaatgttacgattactaaaagttgaaatcaagttaattattttaggttcacttttgaaaatttgaggaaaactcaagcaatcatgaaatgagatcaatactttgaagatttggtagactttgaagacttaaagtgacctaagacttgttgtaaggttgttacttgttgatgcactcagtccaaaaatttgtcatgcatttatagtttcaaaatcatccatctttgaaattataacatcaaagtttataataaattagatgatttcaagttttcaattaaaacccgaagtataattctttctaaacttattttaaagggttttgtgatgttgaacacaagttactactttatatgcactttacagtaaaacctacttgagggaggaaggaactagttgagttggttaggcttaattgattacggtgcactttgcacacacacactctctcttttagtagtctatgtttagccgatcgagggtttgaaccccaatagttacttgccattgcattaaatgcacaatgactagtgaatcacttgaactagttgctcaactagttgaaccctttttgagggatttagggatcccaagctagaaaactataaattgaggtttttaagagcatttatggacatgagacttactacattcaattgaaaaaccatatttcttcttattaaaagctcttccaagtacattcaattctaaacttgctattttctctagtttaccttcaagtccttcctagtttttacttctatttagagcccttgctactaggattggagttcaaaaattcaacttcatttattctcgtgagaaaagtttttcaagtgaggtcttgaaatccaagtatactcattaaaggtttgtggttcaagctttgaaagtagtaaaaccctcactcaattaggaattcaaatcgagtggacataggttgttcgacaaaatactacagaagagttttcttattgatattcttgttcttcacttaatctttgtcttcgtcatatcttaactaaaattgattttttttttcaaaaaaggtttaacacctaatcccccttctcagggatatatttaagttgaattatcttatttttacaaactaattaattacaaactaaatccaacctaagatttgaatccaagtggacacaacaacaattatatttctttagacaattgtgtagataggtcaaggacctttgacccatctttgattcgtttctagatatgtgttgcctattataaaagacttacaattttctaaaaagtgacgaaaaatagataacaatgtagaaaactaaaatatatacaataaaagtaaacatgtggaaaagcaattcacaatagtgttaaatatatgctagacagataaattgcacaaggttaaaagtcaagtttatattaaaaaagaaatgattttaaaaatagttaaaaaacattaaggtttaaaaaactcaagcatttcttactattcataaaaaaattataaaaataatctttaaaagcatacattaaatttatgctttttatataagacattctatttttatacagaagtttctattttttaaattaaaaatagaaaatataataaacaaacattgaatttttttcatctttgcttaatcaactcaactccattatcttgtctttgttatgtcataatgctaacattctatttctatatggaagtttctatttttgaaattaaaaataaaaaataaatccaaataaacacgaattttttcatctttgctcaatcaactcaactccgttctctcgcctttgtcatgtcataatgctatcatttgacctactcaaaattagttcatacatttgcttatttttttagagcatcctcactcctgaatgttatttcttatttaattcaaaattttatacttggtccaataagttcgaaccgctaagtagaatatattgagagattcattaaaaatgcaacatattgtatacttattgtagcattattattttcctttggatgcgatatatttataattattttattacgattccatttattttaaaaaaaactataaatgataaaaacaaattggagtcggaaaataggagtgactttcttctatctcaaggagcatagaagttccacgcatccacggtgtactcaagaagtattcctttctattcaccagtctcggtgggtcctttttgctcacgcggtagagtagtctttcttggatgctgctgactcctacttttcaaattctaaatactataaataatatctttatcctcccaaacattatgaatcccaaagcctcccataaaacttcagaatgagaaacaaccttacccaactccctttatatctcttctgctgtctgtctttatggattttcttcatagag

SEQ ID NO: 12076 - DNA, 6787 bp, Vitis vinifera
  Intron number 4 from transcript GSVIVT01013567001 (locus G SVIVG01013567001) derived from phytozome v7.0 (chr-ID chr5 ; pos 21025063 to 21031849 reverse strand)
gggaagtactgaggcatcacatttttctgcaatatgtatcctctgcttaaataatgtttcttgacatatgaaaatgacactttccaattatcacaatttttcacgggatatcaatcatggggtatcctctatggcaatttggcattcagctctacaaatatcatatatttaacatgccaaggtctaaagatactagttatggtagtgtgcagtaaattttgtttgacttttatttagggtgtggggttttgtgcatcgttaattttctgaattgctatgttgtacttattgtcaaggtgattggttaacactgcaagcattttcttttttcttatgcacaatttgtatggagaatacatatatttatgataatctaatttatgtactgtgggcatcaccttttaggaattagcatggatggtgttttgcctctagttttggtttttcttttccatatctttccttcaagtattgtaggccccaatctttgtttttcttttccacagccttgcttcaaaccatatttggttatctcttttacactcctaccattgtgagtttctagagcaattagaaatgggttttccctatattttctaccttggagttttggagctcaaatataattttgattcttttattgcaaccaataaaatgcatgtgctggaaacctaagtttgtttttgtggttggattcccaaagcgtagctgcaaagaattatgagctatgtgtcttggacttagtcttttcctaagctcgtgcgacacctagacaagccaagacccttgatcttgctaagtcagcctgatgggggaaagccttttaaagtttattcaaggaagaaagggaagacctaagtaaactttaagtagaattaatattaattagaattgaattgggattagtctttgttggggtctaattaggattagctagttgagttataatataattagaatttgagtcatgataggttattagagtcttagtagactttggatgttataattagaattaaaattagaatcataataggttattagagtcctagtaaactttgaatttcttagagaagcctataaataggttaatcaatgtaaatcaaagggatgaattgatatgaataatattatattttctttcattgtaaggttgcaactctcaatggtgagactccattgattttcttctaggtgagactcctagaaggccttagtgagactttaaggttttccatcttttcttcattgtttcttctttctctctatttcttatcatataattttctctaccataaaatttattccttattcctctccttacaccctaaaaataaaaccctagcccacctacccttgaatgtaggcaaccatcctagggttgtcctacatcacatccttactcccgatacttaacttgtcaggctaagatgcacacggcttggaagctttagaaggtataataggcaactcttgaagaatgaaagctttcattactcaaaggaagttttacaagtgctttggaactcacttacttggtgtcttagccaaatgagaccctccaccaatggaactctttgggaccttaaggggttccttacaaatcatgaatattctagaacaccctatacaattctatatacaagtctatgtatatacaagagatctctagaattctctagaaagccttggactcctctcatgctttccaccatagtgtagagatgtgtggacatctctaggcatctctagaaccttccacactcttcccaccaatggttaagtgtaggagtattcaaaagcttcctgggctctatataaacccacggggaggctcacttgaagcatcttgtgacatatgactttattttcctgttggaatgagtaaccatttgctcttatgtatgtttaatttgctattgataatgtctttgtttcagttttccatcttcaaaaaaattcaatttcaagttttcttggtaaaataagtccctaaaaaaaatttcagatttagcttatccaactgtgcatggtaagctagaacagtgatttcaatagtgttattccagttttcttctcttaaaaaaaattggaattcctagttattaagctctccttcctggtttcctatggaatccaatagcattgtgttgaatgcctaattatcgcattctcctttcccttgaaatacctccatcctttgcccaaattggaaaggtaaggacctgtttgagaacttttttttttagaatagttttctattctccataataaaaaatatagaaaaatgttttacaaccaaaaattgttttctattttatgttcttaagaacagaaaacagggtgttttcaaataatatcttttagttgttttctattattttcacttgtttttttagggctgttttaagaaataattttataaacgtgtaaaatgattataaaaaaaacactagatataaaaattatttttaaaacatatttaaaaatattaaaaaacaggttaaaaatattttaagttttcaaatagacttttattctacaaaaaccaaagaataattttcaaaaattgttttcaaaaactattcttcataattgtttttgaaaatagttaccaaataggccttaaatgtccatgaggcattttgattatgtgatgaatggttgaacttcaacttgtagtagcatctcttctatatttgctacgtggatagacatgtttgctttgtccataacaagaacttgtgcacatagggagagggtttgggctagttaccacataaaagttacaaacaagtcttgggcacatgggagtggtcactttagtgcagttatgaaaataaagtcatattgaggggatgattttagacatatcataacgacatataggaatggagaacaaaaagtggcatggcttaattttttttgataggcaaagagtcttctagaggtaaaagtgcctaataaaaagggacacgccctaagaacaagtgggggcataaagggtgctaaaatggtggaaagaataaaaaacaaacatcctcaacaataaatcgccatctaagctctagacaattaatgaagtctaacaaagatgaaggaccatcaataaaaggttgttgagaccattaggagaagtggctaataagggagttcttgagcaattaatttgagcactcaacaccactaaaaaaatatataattgcattaacaatcgcaaaggggctgctttctaatctttcttcctcctcttccttacggaactcccattctagccatgaagagactctctcattgaattggggagaatctaagagataccgaaaagaaaaaccaaataaaataccataatcttcttgctttcccatagtggatgaggatatgattagtcgtttcttcttttttcttccacttgtagcaacaatttgtaataggtcaccctattcttttaaactaatctaaggtttgcaaccttgcctcaatgggatcccatgcaaaaaaaaaaaaaaaaaaaaaaaaaagacaaaaaagaggtccaccttggaacggggttaaagatctccaaacctcctccaaggtgaaagcctctccatcacccaacaccgaagcatgataaaaggatctaatagagaaattcctgcccttattaccttcacaaactaacctattgtcatcttctttgagactttttcttctcaggaaggcttttaagcaaatcatcgtcaccgttcaactctcaatcatggaatgccttaagaagtatgggttttaaagcccttgcccacttgtagcctcctaaacagaacacaaaaaagggaaaacatcccccaaaatagagttgtcacctcaaatatctaggcaaaacatcactttcctctattgctcaccttgaagttggttttaacatggaacaccctttattgtcttcttatttgtttccataaaccaacaccatagtcctccctttctttgtaggattcaagaaagccaacctcccaactcttccttataccttcctttaatgacttgcctacaaaatatgtcccttttcaaagcaaatctccaatactatttttcaagctagacttttttgagagtaaatgaggcttcaaaacctagattctatttctttttatacctttaatactcgcctacaaaagatgtccattttcacagcaaccccaatactatttttctagctaggctttttggggagtagacggggcttcaaaacctagattccatttctttttatccttacaaatggatgaccacttcacaaggtggagttccttctcaaggactccgctcccctatgggtagtctaattggattttttccaatctcaaggccatcgttaaagggataatgaacaaggacatgaagtaaatagctagacaagaaagaatacttttatgtagagtgagtttcccaccctttgataggtatgtcgcctccaccttgacaactttttatgaaatttctcctccactacattccaaactatcaaagacttaacgaggctccttgaggttgaccaagtacttggcagacaagttccctaccccattacccaccaaggaagctaggtcctctatattagggatcttgccacaaaaattaattcactttctccaagtcaacttccacatgatgggatccaactcaaatatgtcaacagttttgagcatggctcatagaagaggagggtatcgttagcaaaaaggatgtaggaaacatccactcactctctttccttcctaccttgaaaattgaaataaaactaccttccttgccttccctaaaagaaaattaagagtccctattaggggtggaacttggacaggttggcctgacctaacccaaacccaactttatgtttggacgggtttgggcaaatattttcaacatttgagtttaggttaagttttctcgacctgtacttaatttgggttaagctcaagcgaaggtttgaaaaacctgaacctaacccaaactcgatttgatgtttttataatacttataatgtttattattgtataataatattcattttctttttatattttaaagaaagaatatcaaattataagtatatcatatgttttcttatttttttagaaggatatataagttcgtttttacttttttattgttatcttgaaatatgtcttattatttaaattttggtataaatttatagaaaaaggttttttaaaaaacattatggatggattttgaatcatgcaatccaatcaatccgatcaactcgagtttaacccaatcaatttgagtttaaccttaccaacccaagtttaacttgactaactcaaattcaacccaagttttaaataaaaaaggttgcattagatttgagttcgggttagaggtcgggttggtttgaacttaggttgattgtttcttaattcaggtatgacttgagttagccatcaaaccaaccaacccacccaagttgcaaccctagtctctatcaccaagacaaacaaataaagagagaggggtccctcttgctttagggccgttgagcttaggaaaaaacctataggggtgttgttcactgtgacaaagtacctcactgttaagataaaaaattgagtctattcaatccacttttgccaaagcccattttacttgacacctccaaatgaaagccctagttaacatagtctctaatttacaaaatatactaccactagaagtcctcatccttgcatcaatggcttcgatggcaatcagagctgcaattgaaatttgcttgccctatatatgcattataagattctgacactactttcctaaccacttttaccaagaagcttctacaaaccctccactatagttgttgctgtgtttcagctctccattccttcctttggagcaaccccaaataaagtagcattcaaactcctctcaaacatccatcactcctctatgacccctaaataactctagcatgccacccttaaaaaaatcgtaacctgccaaagtgccattgagaaactatggcctagggggctttacacccccctaatagtggagcatgaacttccttctcacaaaaaggctccaaatttagagagttgtctctacaaagtcttaaaaatgcaatccactagtgctaggtcttgaatcagtggacctgtcaataaaagttggaagcagttcactacccctataggacttccttagccaagccctggttgccctcagcctcctaaagagattacacctttggtgagcaaatgccatcctgtggaataacttctatttttgccccattctttgaaccacagttccctcaaaatctacctccaagatgtttcttccaaaatagcccagttgctgaactctatcaacgctgtctttcttgcctcctgatcatctaaagacaatgggccttcttgttttactataattgtttgtttgaacaaatagtgtaacagatatttagccttgtggctcttggtaaaatttctccttgatgctagttttcttctccctctcatgcccataatttgaccataaaattctgacatattgttcttattgctcttccttaatagacttcaacttgggtttattatggagttttgttcatttagaatttcaactcgtacttactcactttgtgacacttgtgttgcaattgtaatgtttttcttgttcagtagatagctaattctctctaatatatgatgaaatcaagaatgtccttacatcaacctgtacagacccgcagaaacctgccccttgtataacagttatt

SEQ ID NO: 12077 - DNA, 2053 bp, Vitis vinifera
  Intron number 18 from transcript GSVIVT01023393001 (locus GSVIVG01023393001) derived from phytozome v7.0 (chr-ID chr 14; pos 12763945 to 12765997 reverse strand)
tttttttgctgggtatcaggccttagctcaggtatgcctagtcagtatgtttatcaagtttccagagacgatgttatatgtaggcgcgcacacacacatacacagctattagcaagttacactctgcactattctggttatttaaattgttgtggttatttactttatgtttgaactcaaaacatatttcaaagacgtagttatggtgaggagcggcagtcagcaattaggaagtgagttctggaacagcttgccttttctcttctctttaatcatttacgtattgattatcatctttagttggaaaatcaatgacaaatatttcaattaaataactctacagtgttggcttagtaatagcatataacacatgctaatgagactacaatttatagatttacaaaatatggacatatgcagatatttatgttaatattgagattgatgaaaatttgaaaaagttgaaatcagtggtaaaagagatttataatgactaatttggagtgttgttgaggtttagaaaatatggagacataaaaataaatattgatgttgaacaactttgacaaagtggaagcgatttataaaatgtagatatctttaatgattacttgggtaatgctgaaaaaaagtgagcaaaaggcttgctctagtaagaatagagaaaacatctatgaaaaattggggtattgttgaggtttaaaaaatatggagacatggaaataaatattgatgttgaacaactttgatgaagtggaagctactaataaaatgtagatatctttgatgattacttgggcaaggctgaaaagaagtgagcaaaaggtttgctccagtgagtttagagaaaacatctattttacagatttcttttcatatatcttatgccacaatgaagtgtactctacagttgaaatctaaatacgttatcataattagtctatataagtcatggagctctttcaaaagtcaaacatgtcatccctatttataccttgatgagaaccataacacatctcacttgcttaccatctatttttagttttccttttattgatctcttattctgttataattaaattaggttaatttccctcacatccttgaggcttggtgcaaataacactaagctacaattagtttcaactttcattggttagcacccctattgatttcttccattcttatttaacacacttatctaacattgttctatctaaaatttctctaaaaaaataaattttataaatgggataaatcaattggggtgctaactggtgaaatttgaaaccaatggtgactaaatgtatttatatcaaaccttaggggtgtgagtgaaattaatcctaatttaattttgtgaaccttttttaaaattatttttggtatcttattctattcacatatgaattctataatttggtatcaattgcattttttttaagaatattgccacattagatagttaattgtgtagccctcaaccatataaaatgttgtgtcatattttattagaagaaaattcttatttggtatctgctgaagaatgaatgagagtaaaagataaaacaaacataagacaaatgtcctttgttttttgttgagatatctattaccacaatcaaaatctcaatgactttgaaaaggaaaaacaaaaaagggagttttcattaaattgaacattttgtcagaattggcacattatttaattgtatattgttttacatatatttatatgtttcattctttcatcaatatctttaatgcatttgtgtttgtgtgtctgtaatataataaaatataatataatataaacttataattaaaccaaaacttctaacctaataaagaccccaaagggaaatttgttttggactcctaatttaaccaaacattatgccagtgaaaagccatctttgatgcacctgcaaattgttttctctcataggaattcatttggatatgcaattccttttttttttgatttttttttttttctaattttgatgcatttattattttaataaaaatatatgacttgtctgttttagat

SEQ ID NO: 12078 - DNA, 2118 bp, Vitis vinifera
  Intron number 5 from transcript GSVIVT01030553001 (locus G SVIVG01030553001) derived from phytozome v7.0 (chr-ID chr1 2; pos 6694204 to 6696321)
gggtatgtctttcacctctgtggctggattctgtttcgactttcctctattttgtaaatttcattggctagtaatagctgaaatttgattttgctgaagatctgcattgctgatttgaaaattgaggatccttagcatcttttaacaatgcctttggacctggtcaaaatcagagacctgcaagtaaagaatacaaaataacaataatagtaatatgactgcgatcttacaataaaatgagagtagggaaatttcgtttaacatgtgacatgacaaatggaaaaccaacaaacaatgaacaaaattataaacgatcttttcttcatggcatatcaactgtcacaaaggatgaggttgatgggcctttatgtagggcttgtgccccaacaataacagttgcaataattctgggataaagtttgtcatatttccttgagccaaaataaacaaataggtaaatgaaagcaacccattctgcattatgctgaaactactaaagttgcatctgtgtagtgatgccaagttgcaagtgcatagtttgatgctttggttctctctatatctttacatgtcatcgtaataaatcaatttggtgatttatgctgtagatcaaacttcttcaaggatatatatgtcacttaactttggctccaatgcattgatgttggacttgttattcctcattagcacttgccctgttgtgtcaatagcatgtggatttaatgcattagcttttagtacagatacatgttaaactttgggacaaaattgacatctcaaaacattatcagcgtctctagttgtatattttactgcatttaaagccacattagacaattaaaaggttattatctctatgattgatctaggattacggtaggagttaaatgtgttgtgttgaggttggtagatgccatttcggagcccaattatcattacatgcatcattctagtgtttcatcaggttttgactttgctttgaggatggatacaggcctgttattcttatagttgcaggctggttagcctatagttgcccttatatcttgtataaaaaaaggcatttatagaagcaaattaatatcccactaaattatttgtatatgtacgattgtcaccccttgagattatagataaaagaaagaaacaaatgtcaacaatgtcttgacacaacagattgtgaatataagaaatttaattttttgcagttcagttaaagaatgaattatcataatcagattcaattttttttttttctgacatgtaacctagaacctccccaacttttcatcacttcagccaggcttcaaagatctggatttgaatcttaatccggtgtcataaaggctaaccacccagagtgtaccaaactattgactggttccaaaattctgtatcatgtcccccgtcttgagtactcatgcctcttaccctacagaaaccaaagtaagttgaatgttctatctcattgttacccaatttatgattaatgaccacacattaagggactgcaactgccactgatggtaaaactaagcaactgcaagtacaactgggttggacagaagttatggaatggagaagaaacaatacaagtgattcattcttaaaactgttacattttatttaccatggtcatgtatgtattatttttgcagttcccaagtaaaactggtggctatgtgggaatttagcaggtgatttttgcaattttaacaaaatctcttgaattattctgaaattttgtagatttatcccaatctttttgccaaacacatcaaacacatgaatagttccacatatttcagtaattacttaatattctgcagatgcaaataatattatgggatcacccacttattctccttagtatcttaacatgcattactttttcttgctagcctattattggatttttctggtgaattctttgttttttttttctttctcaaataattttgcaattcaaatgaaagaaggattgcaaaatgtttaggttcttttcaaggtggcatcttttgagaaattgaatttcctgaaggggtgcaagctttaagataactgtctatttttcttcgcggctgagcatttctagcatatttgcattacaggtctggg

SEQ ID NO: 12079 - DNA, 4096 bp, Vitis vinifera
  Intron number 2 from transcript GSVIVT01023509001 (locus G SVIVG01023509001) derived from phytozome v7.0 (chr-ID chr1 4; pos 10655106 to 10659201 reverse strand)
ttgggaggatccaacgcttgcagagtggccagaaagtatgattcgttttccctctatctttgccttttcttttcttttcttttgcattactgatgaagatgacaatctttttgtaaattgtgtaatttgagttaatgattaaactatttttcaaatgaataatgggtgataattttttggaaattatttttcatacagataattggagataatctttgttcctgtacaatgactgctgtaagcttggtttgcttagtggtgcatctctttcgcagaatctgaaactaagaatgaaaagtatctaagttattggtttggttgtacaattttctgtttgatgaatgttgtcaaaagttctatgggttctatgattttctagtttctagtatcaaatacaggtcatgggccttgactttgatgtcagttctttttgaatccaaatctgtgtattgcacatatttcgtgaaagttactcccaactgctagaaattgctatctttatatgtttctagtatcaaatacaggtcatgggccttgactttgatgtcagttctttttgaatccaaatctgtgtattgcacatatttcgtgaaagttactcctaactgctagaaattgctatctttatagaagcgcattgtgcttcatggattaactagaatctgtgttagatgctatagagacctcgagattttaggtttttgaggttaataaactagagagtgggagagtcctaagggcttggccatgaaaagatctttggttatcaaaaaaaaaaaaaaaaaagaaaaaataactagagagtgaccttttgttctaattagatattaatatttaaaatgtcatcagaagtaaaattagaaaagctatcagctattaacacaaaagataaaagatgtgatgttatcatgtttatgatgctcttactgtaaatctccttgccaagaacatgctttgaaattttcatataattacttgatttggaaagggtctcacaagaatgtgggaaacagaaattagaatcgtcagcaaaaaaaaatgtttgaaaattttggtgcaaaggtataggagctatgtgaggagctttagagatctagatagtatgtattgaaggagagggtgtaaaatgttaggacagaaaacaccgacaagctttactgcattaagattcctcttggaattgtgttttttaggatttttgtccccaatgggtttttcatttgatccatgaccatatttatagttatatacatcatatcacccagtcacataacttcaccctactcttgtaaattttggatgtcaagagatagaccttctggaagctagctgatgatgagaatataaggctttgtttggaaactatccttaaaaacagcttttgtttctaacataaaacatgtttggcaaacttctaatgaaaaacaatttcatgaaaatttatttttaaaatagactgttttttaggacaaattttaggtgtttttagttgttttttacatagtattctgagcaacaattgaaaaaatggagaacactttaaaaacttttgcattgtacataaaggcatagttccaattaggactaacttctttgggtgggaggcggcctggtgcaggctgctcaccattgactgcctgaagagatttggttggagcatccccaataggtgctttttgtgcaaatatgaggaggaaaccacatatcaccttctcttgttttgtgagaaggctagaatgttatggcttctgatcttcttcatttttagggtgcaatgggtgatgcactcctctgtgaaaaggaacctcctcggatggcatggatctttcgtgggcaagaaaagggagaaagcttggagagttgcccccctctgcctaatgtggaccatttggaaagaaaggaataggagggccttcgatgatattgagaggaacgaccaagatattaaatccatgtttttgtacacttttgtgaattgggttagggtgtatatagaggaacacactctctctttgttagattttgtagactggctagtcaccaagtaagggtcaaacttgtttatctttttgttttttgcctctttgtatcttggtatactctgtgtataccctttctttagccttttggctcttaatgaattatctttaccgatcaaaaaaaaaaaaaaaaaaaaaaaattcattgagaacaaacctagaaaattgtttttcatatttaagttcccaaacagagttttatttctgaaaaactatttttaagaactattcttaaaagttgttttttgagaacatttccaaccagaccctaagtttgcccaaacttcatggagaaatatcaaatatctactgaggcaactaataccttaagcaattgttctcttttgagaaatctttgatggacccattctttgtcaaaacaaatggtcttttgggaaaaagtatttactttaaaaaaaaaaggaaaaaaaaaaaaaaaaagaaacaaaggagacaaggcaaaaaaaagaaaaaagacatgaaacctaccaaaaacagggggaaaaatagataccttagcaataaatgcattgcctaattcaccgatttgaattcacatttactgatccatcaaatttcctttttttttttttcgtgtaaggaatcgttggctctgatgactatgagatccagagaggggcaaccacccttagaaactctccatccctttgacacaacccctggagcctcattcttgatgttttttttatttttttgcatggaagaaagtagaaggaataataatttcaagatctctcatccagctttgcataataatactagtactagtagtattcaatatattttgcttatttacctatcaaaaaaaaaaataaaaaactagtaccagtagtagtggtatgcagttttttatcaactgaaggtggatagtttgtgttaatgtcaccaggattaaataactgaaatattgcttgttgcatttgatttgctaccatgtaagctgtgggaactagcacattttttttcttaggcaaattaaagagagttaatggtggaactgttgggttaaacatcatactatttcccatctttaaagtaaaacttaggttttgacctttacgtaacttgaaagtaggttttttatatatgtatgtatgtatgcttgtattatattagaaacaacatattcatttcattgaatggtaatacaaagaaaggtgaggaattcttctaaaactattttcacagactatgggcagaaaaaacgtgtttgtactaaaactgctttgtgcacttgaggaggaaaaaaagtatccaacaaaaaaatctagtttctttgcttcttgctgatgtggactactgtaagtatgggcataagaattgatttaggttttacttacaatcagattttaggtcctctctaggtccacatctgctttagaaggatcaggttgaactttccttccttttcaatatagatgtgttgattttgaagcatgggcataagtactgatttacttaccatcagattttagatcttctcttggtccacatcagttttccattgaaggatcaggttcaactttccttcttgtcaaatatagatgagttgatttgggctatgtttacggttttggttcaatgtatgtgctcaaccttatccagccgaagccattgttatccctaatgaaatattattactgcttgtttggtctagtgaaagtgtaatgccaaattctgggttcttggaccagccattggtgtaagatctaattatgttagaattcgatctggatttgggatgagttacatgaggacagcctaatatgagttgccatgtgttgtttcttcataggcaaaaaaaaggatcatgaatatgatatacaacacctaacaaaaagtagatttccatgtgcatcaacacaaaaacaaaaaaaaaaaaagtagatttccatgtgctatatgcttttcttgttgactattgacatctcattggttcattgacattattcctatgatgctgtatatgttcctacccctcctttttgcctggatatgcttctctcatgcctggcagaactgttggcatcctgcag

SEQ ID NO: 12080 - DNA, 3978 bp, Vitis vinifera
  Intron number 1 from transcript GSVIVT01012010001 (locus G SVIVG01012010001) derived from phytozome v7.0 (chr-ID chr1 ; pos 2225933 to 2229910)
gtcaatttgcaactgatttgtgaagtagggttgcctcacacccacaatctacaatgcccactactgcaaaattctagctctgaaacccacaaccagagggagaggtggagatgaatctaattgtgagggagggtaacctcgccgatgaaagaccgaagtttttagtctacttgacgggcaccaccatggtacttccaacaccgtaccaaagatcctacagttcggcaatggtccattttttataaaatcaagtaaatcctaaatcgttggtggattctcctctagtctttggaaagggtcacggggtaggttaaatttgttttattcttctgctttgatcttctcactcatgggttaaaagattcaatttcagaatcatgggtgctcacttttggagaatctctgatttttttgaaaaaattttgaatttttgttgtgattgaaaagaaaagagaatctccatattacgttggaaaattctgtgtaacctaatcaagtcaaccaaattaactcagaaactcttgctggttaaatgtcgagtttatgcattatatgtatttggtatctttgcgacagctgtggaggtggatacgattcagccgagtcgtaccaaattcaaccgatactttgaaccctgctacaccgagcaagaggaccacgacatagtgggcaggttgtgtgcttatattgaagccatcggtcctggcaaactctgtgaaagagatggtcacatctcaattctctaatctcctctcctccttcaatcttgcatggacagacaacacattcttcttctccctcctcacagcgtaactttggcttatgctgggttcgtcatctccattttgtagcatgttgactgtgtaatttgctgaaaagaaatggtgaagcaacaaaaaccaagaccaggtaatgggcagaatggaatggttccattgaccattccataatgttttcacttgtcagtctgtatgtcttgttgtgtagcaaactgatttcattgattgccaagtgctcaactgctttccatttttcagttcacacgagtccaaagtcaagtgaccttttttcatcaatctttctatgagaattgtgaattgtcatttttatatgatttcaaatgtaaactccatctgtttctttcctttttcttgagtgggtgaacttgaatccatccattctattataaagtttttctccagcacatggggaaaaaacaaaggactccattattgaaatacttagaaatctagtcatttgtttgctagtaaaatggatataaataaaatatgaactttctgatgtcacaataaaagacgagaattgagctctgatacgttggatggttcaagttttctccttttaggtacattactaaaaatgtccttctgttgcttcaaatccatatatatatcccaaaatcttaaatagaaaaaaataaccatgttcctaaagtaatatttgatttttggaaattactatgaaaaggacaaaaaaaattgttgggttatgtttggttttgaaaaaatttgtgaaaaaataaaaaagaaaagaaaataagcataaaaagtagaaagaaaggaaagtgaagaaaaataaaaagcaaatttaattttaataaaaaaaaattatataccctcttaaacttattttgcttattttaactcttttatataaaagttaaataatttgatagtgtataaatttttaattaattttaattatcattttttccttttttttttcatgctaattaaatccaaatatgataaaatattttccctgttttaccttttcttttttcttcttttctagatccttttgagaatcaaacataacttaaaaaaaaaatatctcattttttatttatcacgagaaatatgaaagaaaatcaaatataataaaattaattaaaattatatatatatttttaaaaaataagtaaaatagatttcaataaccatatacaaattatttattaatgttaaactttttccttatattttcactcaaatttcctttgctccaaataaaactaagacttggaatagaaatctccattaccatcaatcaactggtagggaggctacttcttgtttcaaatttcctttaggatgttttcaaaatcggttcttaaaaaatatattttaagaacaattcttaaaaataatttttaattattttcataaacaaaattctatttgaaaactcaaatatgaaaagcaatctatacattcaaaaaattgtaatttattcatttaccaataatacaaaattttgataagtatttttcttaattattgttcacaacaccttataaaaagcatttaaaaatatatcaatttttttttttaaatatatcttttagtaacacattctcaaaaaattgtttttttttttttgtcaaaagttgatcaaatatgttttcaattagaaaattatttttcattctagagaccaaaaatattatttttaaaaacaattttcaggaccttgagttttcaatgctctaaaccatgaagtaaaatcaactagtaggattttctgtgtctttttttcctctcacacaatcaacttcaaatgtatttgtaaaaaaaaaaaaacagtagttatatccaaaattcaatttattctattattacactttcaataaaatagatatttgggagttcaatttatttgcttatgcacttttgatgttatattgaattaattacacaaagacatataattggtaattattattattttttttaaaaaaattaatcctttctagttatgtctacttggtagtatgaattattatgatttagcgatttttatttttattttttactccataatattgttataaaaataacaaaattaacaaaaaaaaagtgaaaaataaaggaattaaataagaaccggtagaaaaatgtgtgattaaaataattgaaaattacattaatttgaaaaaaaaaatggaaccatctattttctcacccaatctaaatatgtagcacaaattttatcattaattccataataacaaactaaaattactattactatctcaccttttttttttataagtaaaagtaaacaaacacaaaattgatagaaataaataaataaataaaaagaaaagaaagaattggttgttataaaagggggttgaatcacagcggaccgtttggaatttcgttgtgtctaaaagtagagttgagcgagagacagacttgcctttttctcttcttgaaaaaacaagaagctcagtagtcatggcggttcatctgaactggtctctaccgactcagtcttccctcgctttcctccatcggaccttccacaaagctccggctccgcctagactcctctgcatcctatctcagaagctcagctccggttctggagatccattcctttctaatgcgtccgggttcggacctaggaaatccgcgaatttggatagtccagaagctttgatcggatcttccggttcttcttcgtcttcttcatcgtcgtcttcggctattgatttcctcgaattgtgtcttcggttcatggtatggatgtttccttcagtttcattatcgtgaaaaccgaggaaaagaaaacgaggagattcacgatagttgatttagtttattttattttaatgcattttgttatcaacgaaatgaggatttaggaattggcttgattgcatttgatctcgaaatgtgtttcatatgttcagtacaaatttcacactattgtgaaacttatcaagttgtttggatcgaaacattttatttaaagccggtaatactatgtgaaccaaaacagtattaagctgaatcaagtattgaactaatgacctaactataatcccaatagaagtgtcttgttggacgggagttgctgattctatcagcatttgcgtagagtcctcatttacaagattgcgattgttatctcacttttatctatcttttagaccaaagaaagaaaggg

SEQ ID NO: 12081 - DNA, 3029 bp, Vitis vinifera
  Intron number 3 from transcript GSVIVT01035543001 (locus G SVIVG01035543001) derived from phytozome v7.0 (chr-ID chr4 ; pos 2159085 to 2162113 reverse strand)
gttattttattgggcgagatattcgcagtgagaaggtacaaggaatttttagaatacatttactccaagccagcatataaggctattactaactgttttgtatgtttatacatttgctgcttgtagaattcagtgggataagatgaggcttaaatggtcttcattttaagtgatgtgaaaattcattaatatgaaattcaattaaggttgtgactcatgaaaaaattgattcttgagaaggtgccttctttttcagttgaaaagcacccatgttgcagccagagcattgaaattgacatagaaataaccagtttactgatgaaaattaaaaaggagatataaaagccttactaagcacaatgattgccctagtgggctatgataagaggagatatgaaaagaatacaaatacttatacatccatttatggctgatgttagcctggccttagacccttaaccaattttacctaacctaataacaccaattatatctgaaagctcagataaattcttcgaaatagcattgtcttggcccacatgggcatgactggctgaaaatttcatagctaaattattctcttgaaaattacgaataacctgaagatctgttgttgaatcatccatctgatgctttaagattggattacagaaacaagatggagcaaatttaggcatgaggaaatctactactacttgtctgttcatttcatacacaatgatattgaaatgcaattttacactcttggaggaatgcttaccttctttaaaaatataatttgggaaaaagggagatcattattgaattaatgagttcaatatgaaggttaactattcaaatggttgtgttaatacatctctggaattcttaggggccttcctttgtcctctggtatctacccttaatccgggttccatttcagccttaaaacattttttctctattttagcctttctttttgttctatgggacacctttacctggtgttgtggcaaaaattatatctaattttgatattttgaagatatcaattttataatacagcatgtatcctagtaaaagatggatcatttgagaaaaagtttctatgtccttggtgactgttcattttcaaaaatcaattggtgatgatcttcattttggcccttacctagctggatctagatctggtggatacgtctatattctagaaaaaattctggtaatatatgtatgtttatacacattccagtttttattcccacagattgataaaagggtttaaatttcttcagaaagggatcagggatgagtttcaattatcacttagtagaggggaagttggttgctttccaaagaaagtggcaggtagaggatgtcaacttggatagatcaatctcttttggtggaatgacctcaatccttgcagttgatagggagattttgttgaagaattaggtgggatagaagtatgggttagatggcaggagtggtgaacaaacatgggatgggtggaaatcagttaaggaagaatgcaaaagttgtcgtcttaaggggtttgggatttgtgtagcatggtttggaagtttggattcaaggatattatggagggagaaggacaagcttgtatggcttggtgataaacaggggactttttctgcagatcatattttgaaagtttagttcttgtgggggaggtcatttttccaatcaagaaaaagtttgagacccgcattccccaacaaggtgggtttttatatttgaatagtgttactagataaatgctttaatagttaatcatttgataggaaatgttacgtccctcaccagtaaggtaaatgcagactcttctaaattatctttttttacactgtggtaaggcttcggaaatagaggcttttagattgattccatggaataaagtgagtgattctttgtgctagagatctgataataagttggtatgttaaaggtggtggcaagatgaagtgaaggtgtaggtagtgtccttgatgcagtgtgatggtgcatttggaaggataattagaagaattaagagcaatatttcacaaaattgaagtttatctctgttaaacttcttttctgctgaattgggtttcacttctgttgattttttttatttctccttgcttcttgtatacctcatgtgtacatgggcttgcctttttcctctttttgtgtttatttggttgttcaaggagaaatgagaaaagaatcatctgcatcatatatgaatgctttctaaagattccagggtctgcaggttatgctgatttgtcacttgctgtctatacatgtgctcacagaaaaattttaattgtatccatctcttgtagatgatatttattatttgtggttcacaattggtgttgctataatgttctaagattaaatttacatgaacctttgctggtaattttgcgctaaggctaacctctttggccctttttgtcatttcatcctgatttttttttttttttcattgtaggaatgttattgaaaatcaacatattagattattttacccttagattttgtagaatacagcttagcaatagcataggacttttattttctaaggcaaaatttgaatatataaacattataaataaataactaaatatatgtgtatatatatatatatatatatatattccttcaacaatattttgaaggttttaataaatgtatatatggttaagatctttcctttccatcattttaatgtatgggagagtaaatggagggaaataaattttaagatatctaacttcatggaggctaatttatatttctaaaagatcaggcaatgctattacatcttacagacccctctgagggctttctctattaaaataaaagcctctcattagggtacaattttttaaagaatgctcttagccaaaaaaatttccccacaaaaataaaaacatcacatttggaatatgtgctactgttgccatattttctctttataaataaaactatcatgtgtggcattattgcaggtgatttggggcaaaatttcc

SEQ ID NO: 12082 - DNA, 1460 bp, Vitis vinifera
  Intron number 3 from transcript GSVIVT01025981001 (locus G SVIVG01025981001) derived from phytozome v7.0 (chr-ID chr1 8; pos 26355449 to 26356908 reverse strand)
aagggtttctttaacctctagcaaggtatgtgttctctctcttcttttttcattcactaatgaataaaatatttattagatggaattagtgaaaaatgaaatatctagataacatttgaaatcataacccagctgatatatatattttcatgattttattttaatcacgtgttcttaattatcccaaaattttaggagatttttggatcccgcagtttcggtttgtctgaaagttaaaaactcttttttaaaaataaaaataaaaattaggacttattcaagtagatagattatttagattatattctatttaattgttgataaaatttaagtttatttaaataatttatattttattaaataattttttatggtaggttgctttggttgactttaagatttttactaccaatttactattgataacgatggtgctacatttatattatattgttagaaaaaaaatttaaataaaatttttatcaatttaattatttctaagtttttttctttcataaataatatcaataattaaaacttttctttatccatttcattgtttcattttttattttatatattttttctttcataactaatatcaataatcacttattttgttaaatgataaagcacttcatgaaatattaaaaaatttgtatgtttattataattcatgattcaaaaataaaaacaaaaaagttactttgcagcctacttatctgactcggccactcctttaaggccatatcaagattgtttgaaacatgtaacttatatgcttttgagtttatatctatattttcttatttagtcattacaataaaataaaaatgttatgatgcagtgaatccaaccaaaaaagatgaagatatctctagtttccaactctaccccataaggtatgccttctttgtctttggtgtttattgaaggttaaaatatttagtagaattagtggaaaaaaatatatagatatattttaaaatgatcacatgcttgaaagaatatagagttcaatatggaattagatatagtaaaataaaattcaaatttcattttttttatgcctttattttattttatttgtttttaattattccaagattttatgaaattcggagatcctgtattcttagacctatctaaagttaaaactcctttattttttctaataaatgtcttaggacctatcaaagttttatctttggaatgaattattgattttaaaaagaaaaaccatattactgtagctgttttggtaggccataattttgtttgaattaattaaaaattttatttagagcttcattttttaattggtaggccaaaacaattatcatatgtttttcaaattgcatagcatgaattaaaatttgttttgctcttactttgcttcatttctaagatgaaaaagcacaggataattaaactatgactaaccattggtcaggttgcgc

SEQ ID NO: 12083 - DNA, 18547 bp, Vitis vinifera
  Intron number 6 from transcript GSVIVT01036698001 (locus G SVIVG01036698001) derived from phytozome v7.0 (chr-ID chr1 9; pos 23713778 to 23732324)
actgtgagttttctgaaaaagatatttacatcttaaatttttgtttctttgctgctgtatgtgtataaacatgtatacatgtgtgtgtgtgtgagagagagagagagagggagagatggaggatagatctgaatatttttaactccggtagtttaaaatggcaaattttccaagcactctaggtggttgttttggtggtcttactggtagcaattgtgccagtatatttcaagtgtggtactgatttaaggtgaaggaaaatcagtacatcgggacggttaatgcaaatggtatgttgcggctgtctagcaacaatgaatttataggtagattttatcttttgaaagaattaaaattgaattctatattgatcaaccaggttacaaaagcttaatacacacacctaccctcctagattaaatgggaataaactatacaagagaagtattacaaagacaatccctataattactcttagctgttaacctattctaagatatatacaatcactaattagttctaatttaaatcaataaagacttgcaatagaaacaagaatcaggaaattagccacattttctgacactacccctcaggttagcgcataggtgttatgcattcccagcttgcacacaataaaatcaaacatggcgttagtaagtccttttgtaaagatgtttgttaactaatgtttggtagttacaaaaggagtggtgatttgttgaacttcaattttttattttttttattttgtttttataaagtgtctattcacttcaatttgtttggttcaatcatgctgaattgaattgtgagcaatgctgatggcggctttgttgtcatagtagatcttcatttgttctttaggttcaaagcttagctttttaagtaaggtctttatccacaaaacttcacaaatcccttgagccatggctctatattcggcctttgcacttgatatggctacgacaccttgtttctcactcctccatgttacaaggttctcacctacaaggatgtagtaacttgcagtagaccttctattatgtccaatttgcatttgtgtatgcctctacaagcagatgatatttctcttgaacatcaatccctttccaagggaagatgaccttgagaaaccgtgctctcttagggaagcgactttggaggttccctaggaaagttttggtttgtggcattaggtgatttcgagcatttatgggacacacactaatggatgggacaccaacattatagttagatggtcacacaaatgtccttggaatgctattgttcaagtcttttaggacttttcctcttacatctgtcttgtggtagggaatggggagcgaactcaattttgggaagatttatggtcaggagatcaacctttgagtttacaatttgcaggcctttacaaagctattttagtgagaaatattaccatctttcaataaaatatttttttatggtcttgtccaagccctctaatccaattccattcctttcgactaattttgtttggaaatcaaaagccccatcaaaggttaaggcctttgcgtggttagtggtgcataaaaaggttaatactaatgacatgctacaagtgagaagaccctacaaatctcttagttcacattggtgccttttatgcagggagagtggataataaattggttgtttttttctaccttgcctaataacattgaggctttggcataagctcttcgtagttaatttggattgggtttcacaaaggagtattggagatatgatgattatttcatctagaggcttagggaattcaattaaaggcaagacgctttggcatattgcatgtatcgttgtattgtgggttgtgtagtaagagagaaatgctaggatttttgaggaaaagtgtagaacgaaagggatgttatgagatctttttcaattttactcctcttttgggcctcttgcattatcgcttttagaggaatttcccttaatgttattctacttagttggcttttagtttgtaattagaaaggggtggataacttttgagagtttggttttgatttttgagagattttgtacatgctgttatcagtgtttctctttatatagtggagggtatactcttactttgataaggttttgtaccttgtgggaaggacctctcatccttctcttcaactttattattatcaatatatattttatttttgataaaaaaagaagtgtagctttctaatatcttagaatccttagtacaacttccatgccacactttaatggtgagtacattaattggcttacagtgcgcataacatgtgctatatttggtttggtgcgtgggcaaaaaacgcaagaaagtttggagagcgagcctattatgcatcttttgaacggtttggaaggcaagaaatagaattgcttttgaagatgatatgctctccatcccaaggctaaaagcctttcttgtttgctttcttgattggagactatgatgtatataaatcctattatgacctgcttaaaatactttctactgaagatttagggtgagatgagagcatgggaagaagttgttttgtggtggagtccaaatcctttgagattttggttgaggatttgggaggaaagctgaaaggctgcatttaggagagaagcagaggtgtctcctcttggattagattcggggaggctagtttacgttacttactggatggagtagaagcttgttgtagagaggctaataaccaagtttgggttattggttgggaggaggggaataggaagtacaggttggagtgacgtttaaatgaggcaggaaggttcattctttgctcagttcgtgatattgaataaaaaagatataacattatttttccagaagggaaaggacagtcttttggttggaattccttggccgtgaggttgagaggccttggtgtggccccaacaggtggcttataggtaaccagaggttcagaggatttgttgagggcgaaggggggctcgaaggtcctgtggagggagaaaggggtggagttgaagtcttacgtagatgctgttaagtcgagcctgggaagggtaggtgagtcagtttggttagaggtgggggaaagagaagtgcaaggaaggttagatcagttgagacaatgtctggtaggctggtggggtatcaattcagcttcttttcttgagttggattacgtaaggagttgggctctgcaacattgggctttgaaggggaatctgagggttgctgtgttaggcaaaagtctcttgctatttgacttcgagttgccaagtgaggctgagcgtgttctagccagaggcttaagaaatataaaggaaaattttattattttggataaatggaaccctgaggtggggtgcctttgcaaggactccgttgctaacgaggtttgcgtaagggtggttgggctttcgcttcatttgtagagtacgaaggtgtttaaaagaattggtgatgggtgtggaggatttgtagcagtgggtgaagacattgtttcttcatctgagttgcagtgggctcggatccttgtgaagcgcacggacagggagtttcccaactttgctcatattgttgtggggttgcgatgttattcttttcagctttggtgggagtctttaccttggttcacgcaggtggtgtcggcgggaagcctcggcggggagggcggctcaagggaaggagaagaagatggtggaacatcatgcgctgtttgttatgggagtcaaagggagaaggtggaacaattgaggttgcagcagggagtacagaacgtgtcaactattggaggtgttctttccacccctcctgctgtggcctttggtgcagggactgttgtggagggtagggtaggtacttctgatggacctgtgaaagggggcagggagacttcttttaaaaggtcggatgtctctcttctagggccgaaaagcctttgtattgggcctaatgttttagaacatggggaggtccagggccctttaagcgaaatacaggtgggcttgggctaagactccaggcccaatgacttattcgttttgaaagggtgcagcgagggggtgacaggaatgggccttgggcctaaaggctctgacgcaatgggtggaggggttttatttggggaagagtcttctatcactcgtcctagggcacaaagtgtgagttcgataagcaaggagagaggcgcaagtggagacgctgacccccttgtcggcatgacgagggttgcaatgttgatggaagtctttgcggtggtgaaatgggggttgatgattgacaaagtgctgcgacatgaagcttccaggtacatcgaaacttcttcgctttttgtggagggttgggagctctcttcttctactttttcttctgggtttgaccgagctgtgttgaaggagggggcctttgctggttttgcctctatgattgttggagaggagcagcttcctctgagtattattttggttgatggcaacaatggggagatggtcttcgagggggagaagtctttggttggtgaaggagtggggggtgagtttgaggatttgttacaggatctggaggggaaaggttgtcgatgggacgatagctgcttggcaaggttcaacaagtttctgggtttttcgacggaaggttttgaaggtgaaattttgaatatgctcctaaggaccaagagaagaagagagcaaaataataagggaatctcggggtccattaagtttgatcgtgaattgaaaaaattggagtggtccattaattataatggtgcgagaaaggagaaatctttggttagagaaggtggggctagaatctcgaaccttagatgaagataaagattttatcttggaatgttaagaggggccaatgatagaaataaaaggaaggttattaaggctttgattagatcgcaaagagtggatttggtgtgtctgcaggagaccaaaattcaagatatgtcctaggggattgttcagagtcttggagtgggaagtttcttaggttggggtgctatgagtgcaaggggggctgttggtggggtggtagttttctgggataatagagttctggagttagtaggcatggaggtgggtctcttctcaatttcgtgtcgttttaaaagttgcgaggatggcttcttgtggatctttacgggggtgtacggacctaacatgaaacgatatagagaactgttttgggaagagttaggtgccattcaagggttgtggtctgatccttggtctattggaggagactttaacgtgattagatttcccagcgagcgtagtagagaaggaagaatgtctggaaccatgagaaggttttcggaggcgattgatgagttgactttaagagatttacctattcagtggggctgaatggtctttttttgatgtcggaggattgggagaatcatttcagtggggcgatctagtgtactctcccgagattggtgtctgatcactaaccaattttgttagatgggggtggggtgaggagaggtccaattccgtttcggtttgagaatatgtggttgaaggaggaggggtttaaggagctgctaaaaggctggtggcaaggtttcaacttcaatgggtcttatagttttatcttgacagaaaaattaaaggcttcagaaattaagttgaagggttccaataaaaaaaaattaagttgaagggttgaaacaaggaagtgtttggaaaagtgggggtgaacaagaggttggctctggacgaagtgtctttttaggatgttcaggaatggctaagtgttaaacgagcaggagttagaggctagaaaggaggctagggaggatttcaagaaatgggcgcttatggaggagattttgtggagacaaaaatcaagagaaacgtggttgaaggaaggtgataaaaacatgagattttttcataagatgacaaattctaatagaaggaggaattgcttgaaaaagattaaagtcaatggcatttggctataagaaaatcaagatatttagaggggtgtggtgatggcctatcagaatctgtcatcggattcgagtggttggcgctcttgtttgaatagtcttgaatttgacagtattggggttgaggaggcagccaggttggaggagatgttttctatggaagaggtgttttcggctctttcagagctgaatggggataaggtccctagtccggatgggttcccccttgctttctggcagttctgctggaattttgtcaaagatgagattatgggttttttcaaagatttttttgagaggggaaaattcgtcagaagcttgaacaccactttcctagttttaatcccaaaaataggtagggctgaagatttgagcgattttagacccatcagtttggtgggaggtctatacaagctgcttgcaaaggtcctaactaatagattaaaaaaggtagtgggaaaggtggtgtcttcaacccaaaaggcctttgtagaaggaagacaaattctcgatgctgtgttaattgctaatgaggccatagactccttgctgaaaaggaaggaaagtggggtgttgtgtaaattggatttagagaaggcttacgatcatattaattgggattttttgctgacagtgttgcaaaaaatgggttttggggagaaatgggctgactggattagatggtgtatatccactgcctcgttttctgttctgattaacggtcctccaacggggtttttcaggagcactagggggttaaggcaaggagaccccctttccccttacctttttgttttaggaatagaggcattaagtagcctcattaacaaagcattaagagagggttttttaacaggctgcaggataaggggaaggggtggcaatgggatccaagtttcgcacctgctgtttgctgatgatacgttggtcttttgtgaggattcccaagagcaaatgacttttttaagttggttgttactgtggtttgaagccatttctggtctgtgtatcaatttgaacaagagtgaaattttgcctatgggtagagtagagaatgttgagatattggctgctgagcttggttgcaaagtgggatctctcccttccacttatttggggttccctttgggtgctccgcataagtcggtggtggtgtgggatggagtggaagagaggatgtggaagaaacttgccttgtggaagaggcagttcacttctaagggaggaagaatctctctcattcgaagtactattttgagtatgccaatctaccttatatccgtaatgcgtatgccaagagttgttaaattaagacttaagaaaattcaaagggattttctttggggtgggggagcattggagaagaggccccatcttgtaaagtgggctgttgtttgttgtcataaaaagaagggtggattgggaattagaaatctttctactctcaatagagcccttttgtgcaaatggagttagcgttttgtagttgaaagggattccttttggaagcttataattggtaggaagtttgggaaagaaggaggagggtggagttctcgtgaggtaagggagggctatgtggtggggttttggaaggaaatcagtaaggaaggtttgttgctgctcaaaaatgtttccttttttgtgggggatggcaaaggggtgaggttttggaaggatatttggtgcgggaataattccctttgcgaggcctttccctctttgtttgccttagcggtatctaaagatgcatgggtagcggattgttgggaatcaatgggggaagagggggattctttgcaattgaggagaccctacaagtccttctgtcctcaatggtgcattctttgcaaaggaaatggagagtcgattgatcctttttcttcattgtcctgttaccattggactctggaacaagttgttcaagctagctgggttggattgggtccctccaaggagttttgtggacatgttggttattgcttttaaaggcttggggaactctttaagaggcaagactctttggcaagttgcttgccttactttggtttggatagtgtggcaagagcgaaacaataggatttttgaggataaggggagatcggaagagacgttatgagatttgattttgttctattcctctctttttgcttcttgttctgcagcttttagaggagttcctctaaatgtgttacaactcaactggagtgaggtttgcgcttcaaaagtttgagtttgtgggggtttctctttgtttttagctaatgttgggtgttttttctgttgttcagattgtgtaggaaggacctctcatccttttagtggtttcttttgtttcttttttcttttctttctcctgtatctttccttctattaatatatttctcttcgtttctgatcaaaaaaaaaaaaagaagagggggggtggactccccgattctctagacctttcaatgattgggaggtggaggtggtggagagattccttttgaccattcaaggaaagaggctgaatgctgatgtggagagagacgaagaatgagattttcactataaagtccctttataattctcttgatcatagctgtgcagtcccgtttccgtgaagcattatttggagcccttatgttcctacaaaggtgggtttttttgcttgcgaagcttcatgggggaaggttcttactcaagatcaactcaagaggaggggctggaacttagctaacaggtgctccttgtgttgtgctaaagaggagacgatagatcacatccttgttcattgttccaaggcaagggttttgtgggatctcgtgttttctttgtttggtgttaattgggtccttccgtttacggttagagacactcttttaggttggtttgcttcctttaaggacaagaaacatagaaaggtttggcgggcaactcctctttgtttattttggacggtttggaaggaaagaaataagatagtttttgataatgaggttttgttgatacaaagattgaaaaattcctttgtttataatctcttctcctgggctaagtcttgtatagttgtaggtcccttatctttaattaactttgtggactggttgagttcttgttgagggtcgatgagtgcttgtctcttttgtttcttgtttttaggtgactcttgtatactccctgtatgcttcgggtcgcctttcaagcaccctttatctagtatattttatgtgggtttatctatcaaaaaaaaaaaaaatgttggtttttcgatactagttagtttcattaattggttgggctttcgttgagggtagggttgtggtagtacctcctttattgcaacttcttttttgtttgagttgtttgggggtaggtgtatcattcttgtatatcttgggtcgcttttttggtgcctctttctaatatgtgctcttcttcacttaaagaaaaaacaaaaaaaaaatccggtttggtgtgagacaagtagactagatgttgtttgagaagtgttttaaaaaacggttgtgaaaaatagtttttgagaatggtttttgaaaactgttcttttctttgatgttttgtaaaaaaaaagtttgtttaggaacttgaaatattttaaacttgttttccatgtttttaaatttgttttaaaaataatttttatatgtagtattttatttttaatcattctttatatttgtatgattgtctcttaaaataacccttagaaaacaagtgaaaataactaaaatatgttttttttttttttgattggaaacaaaacaaatatatattaatatagaaaaggagtacaagaagaaggatgagaaatcctccaaccaaagacaactaaattacgtgaaaaaacacaaaaaacaaacgaacacccactaaggaccaatccctatggagtacacaccgctatccaatccagttgaatcacattaaggggaatccccttaaatgccttggaacagaaggcccaaagggaagcaaggaaaactatagagtcccaaaggtactctgaattccttgctttatcctcgaaaatccttgcgtttctttcccaccacaccacccgaattagagctatgctcgcagcttgccacaaaactatccctctcttagaattaccgaagcctttaaatttgatggacatcatgtcatatatgctccttggggaaacccaatccaacttagctaactgaaatagcctgtgccacaacccaatcgtcaaggaacaatgaagaaatagatgatctgctgattccccgtgcttcatgcacaggatacaaatatcaggactaagggctttgtagggtcttctcacttgtaacatatcattagtattcaccttcttgtgtgccactaaccagacaaaggacttcactttgaaaggaacttgagaattccacacgaactttgaaggaaagttctgagaagatccagaagattgagataatgctagaaaaaaggatttgactgaaaaaagccctgacgaggataaaggccataatctggcatctgggaccgaaggagagagatacaaatcgtcaagagaccgcatgaggccttctaagtcctcaatctcagaatctgacaggttacgacggaaattcaaattccacaagaaaggccgagatggaccgagaactgaagaaatagaaatgtttttgtccacgactactctgaatagtcttggatattgggttcccaaagattggtccccccgccacaaatcttcccagaaccgaattctatccccgtttcctaccacataccgagtaatcaaagaaaactcctgaaagacttgagcaatagccttccaaggacagcgatgagaccatctgactacagtgttagcatctcaaccattagagtgtgaaccataaatgcttaaaatgacctgatgccaaagagctgaaccctctctaggatacctccataaccatttccctagtagagcgaggttcctctaagaaatattccccaaacccaaaccccctattgtctttggtctgtacacaatatcccacctcactaaatgatcccttttgccttccccaacccctgaccataaaaaatccctttgcaacctctctatttttgcagccactgtagcgggcattttaaataaggataggaagtaacttggcaaatgggtaagacaagactggataagagttatcctcccctcgaaggataagtaggccttttgccacccatctaacctacttgagattctctcaaccactggatcccaaaatccacacgccttaggattcccgcccaaagggaggcccagatatagaataggccatccagacgccttacaatcaagcatctcagccaatcttgaaagatgagcctgatcaagattgatgccataaatgctgctcttgttaagattgaccttgagcccagaaatgtgcccaaacactaacaaaagactcttcagagtctgcagctcttcctcccttgagttagaaaagaatatggtgtcatcagcaaattgcaaatgggacaccctagttctatttctacccaccctgaaaccctccaacatatttctttcctcagctctcatgagcatcttgctcagtacatctgcaactaaagtaaacaaaaaaggggataaagggtcgccttgtcttaaacccctagatgccttaacccaccctttagcactaccattcaccaagattgcaaaagatactgaagataaacacccactcatccatttcctccatctagggctgaaccctttcttttctaacacatgatccaaaaaatcccacttcacatgatcgtatgccttttcaaagtctattttgaaaacgacaccttcctcccctgaccttcttctctcatccactatctcattcgctataagaaccgcatccaatatttgtctcccttgaacaaaagcaccttgagtatagtggatggtctcatgtagaacccctcttagacgcccagaaagcactttgactattatcttgtagagactagtgatcaaactaatgggtctaaagtctgatattctctttgatagactctttttgggtattagaataatgaaagaggcattagtgctctgattgataattccgctcctatgaaattcagcgaacactctcaccaaatcctccttaatcacatcccaacactcttggaatatggcaatagtaaagccatctggccccagagccttgtccctatccaactgaaaaatggccttagaaatctcttcttcggtgaaaggggattctaaccttaacgcactctcttctgaaataggggaccaatctaaaccttcaacaccccaagactctcctgtaggatttgtgtaaagcttctcaaagtaatgtaaaatctcctctgtgatactctcggcattcttcagcaccaaacccctctcattctccaactccttgatatatttcctatttcgcctgccattagtcactttatgataaaacttagagttacaatccccttccttgacccatttcactttggctttttgtctccaatgtatttcctccctcaatattaattcctctagctccccttttcttgagactctttgacttatcaagtcaggattgagacccccttcttgctcaatggcgtcaaagttagctaaatcattgaggatactttttttcttttctttaagctctccaaaagaagacttaatccactccttcaatttagctttaacatattgaagtctcctcatgaacttataaccttcccatccgattccttgaaacccactccaccaatctctaaagttctccttgaaattagtgtgttatagccacatattctcaaaccgaaaaggagttggcccccacataaacgggttggtatccataacgattggccagtgatccgatgtccttctgattaaggcttcttgaaggccttggggaaagagcaacccccactcatttgagtagagaaaacgatccaatctcttacacacgggagactcttgcatatttgaccaagtgaatgaagcattccgaagaggtgggtcaagtaattcacactcactaataaaactatcaaagtccctcatacttggagtaaggctagaaccccccattttttctgagcttctccttatgacattaaaatcaccgcccacacaccatagcggataagttaaaccataaatgtcaaaaagctccacccaaaaatccttcctaagtgaggggctgtttggaccataaacaacagaaatccaaaggggtccacaaccgtctaaagagaacttgactgagaccgagaaagatcctattaccacctcctctctactcagaatttttgaatcccagataatcaaaatcccacctgaagccccagacgccggaagagcaacccaatccttatttctgaccgtccagacactacccacgaaccttctatcacagttctccttctttgtttcctgaatcatcacaacatccggattctctgatctaagaaaatctttaatcatcctacgcttattccttgaacccaaacccctaacgttccagctgataattttcatgggaaaacacaaagaccctagcctaccgagccaaaaccaacatgtctcaatgccctgtggggcctctgctcttcctcctagaatacaccttaatgtcaagagagcataaaacctctcgcactttggccattttccggggggacaggccatcaataaggaaatcacccgaaacctccttgtgtgacctgacaatagaatccttaggggtacagctctctgacatctggttagataaagcacactggttctcctcctcaacacggttgggactgtcaccgtggtttaaatagtcaacatcacttttttcaaaatttttttttgagatgccttggttttccgaaggatactgaggaagagagactgagttgggaagaattgggccagagggattcttcaaaggagaatccggactacaggaaggaatagagggtgactcgggtggctgagaaagagagggctgacatacctccaaatttttggctcccggaatttcacaaaacccctcgcagatgagtcctttacctctgattattgaattagaaggtgaacccatgtctgaatagccacgaggatcaaaccccactcgtcccgatagccctccttggacttccacgcggctcgccgaggtgtcctccttcgagagcttaccagaaagatgacatctggagagaggattcactctgattcctcggtccatctgaaagcccatcccaaactcctctaccatgttgcggtcttcacttgacgacgacgaaccccgagtgaaaaaaggctcactgcaacaccgatgtccctgtcgtcgatctgcgcttggagggaagagggtagaccacgtctaatttgaaattgccgtttcttcctcctgcgtagcatctctcgtgtaaaccgcgggggctttccccttccttgcttcgatttcttccctccgcgacctggcttccataccatagggcttcgatcctcctaatttttggcccaaccccgacgggtttttgaacttacagcccacgatgttgtctgacaatggcctagagttgggaaaggactgggcctttagctcatcggcccgaccttcttctccaaagaatacctcgacgccggcccttgctccgtcttgacagagcgtcgcggtcgcctttgtagaagaagcagctcgctggggagaaaggggcgaagccgatgcagactggtggtcttgaggctcatctgggccatcttgaagcccacgatgcctcatcccactttgggccctaacctgttgggctttaaaagaagactcatgctctggcccaataaaaattgcttcagcttggcccgatctgctccatccccctcctgtctcccctttgtccgccaaacacgtccttgactgccgataacgtgcccggggaagacgcctctttctgtagcactcaatgtccttaacgctacctcgtagcccttctgcagcttttgacgactgagagacgcaacctcccactctcacccactcgttcctgctacggtttacctccgacgtgacagcatcgacgtcttcgtcttctccggcgactgaaactgctactgtataggaccattccccatcttccacctcaagcaacgctggtaacactacgtttggaagcatctccacccacagcttcgccctcgttaggtccaccagcttcaaggtttcctttgccaccttcgttaccctcccccatttcttcaaaatgaaattcaactgaacttcatcccacaaatggaaagggagacctctcaatgctaaccagcccctcctgaactttccttgaaccaccatgttttccttgggcgaccatttccttagtagaatcgtcctccctttcactgaaagtcttccctgatcatgaacactttccgctctccttattgtactcacaaagaagcatcctttgaaagcggaaatggcatttatggacaccattcctttcatccccatcatcctcgcaatggctcttcctacatgagtccagtcatggacttcttcttggctttcacatattacagctctggcccattttccaactgaccacgtacctccagtcctcaaaccagcctctgccaccacttctgcatatgaccttcctcctctgaaagtgtccctattcatccggatatcaccattcttctccttcgaagctcctccgtctcgttcataatattcttgcactgataggatcgccttcctgagatcttcccatcctttcccttttacgccctcggggacgacaagaactagaggtttcctttttgtaacgaattctgtaattttcatgaacctccctctgttattgaagcatatctccatcaggagggtcttagtcttacccctgatctttcttacaaaacccatagaagcctccacctccacagctttcttcaaatgctccatcaaccaatccagctcctccatgtcaaatcctattgaaaccacgaaatctcggctcctttctgttaccgatacccaagttccaccattcaaaccttcaaactctacctgaaaatactttttctccacagtaatactttttcccattttttttcaaaataactaaaatatgttatttgaaaataccatattttctatttttaagaacagaaagttgtttttttttttttcacataaaaaaaattgttttttgttttctgattaccaaacaatttttactgttttttgttcaagcgaatagaaaattgtttttgaaaacagttaccaaaaaaagccttagttttcctacaactattgatgtcttcctttatccaccggaaatccttcaaacttagctcctaatttatggttaggatcaattggagtgtctattagtttacaaccagtcatcccagtctcttgtgaagatcccaaacatacttttgtttggaaacaaatatcctttgtggttttgtttttgtgagaaggatcttttatccttcttttgtacttttattattattttttgataggttcttttgtacttttattattatcaacatatatatttcgcttctgattagaaaaaaaaaacagatataccttgtcttgatctagccacttacatgcccagaaagtatcttaagaaagtcttcaaattttttatttcctctaaatcatccgcttttacaattatgtcatctacattgacaataagcactgtaagtttcattagtgaggatcatttaaaaaacaatgcgtgatctccttggctttgagtaaaaccatatcttttcaaggacttaaaatctctcaaaccaagctctatgagattgtttgagagcatatagggactttttagtttacaaactctctttttatcgaacaagttttcaaaactaagtggagcatccatatagacttcttcacatcaaactgatgtagatctaggttgatcaccatggacgataacattttaattgagttcattttggcaactagggcaaatgtttcttggtaatcaatgccaaaggtttgagtgtatcattttgccactaacctggccttataccttcctatggagttatttgctttagagaaaacccatttacaccttactgttctattccataaggcaactctaccacttccccaaatcttattcttatgcaagactctaaattcctcaaatacaactttcttctagttgggaattgcatgagcttcttgtatgctgttgggaatgagctctagggataggtttgttgtaaaggctttgtaggtggggtagagacggtgatatgacacatggttggacaacaggtgtttggtacaagtactaacacatttgctaatagcaataggaatatctaaatcaattttagatgaaagatttgaaggaaagattttaatacctatctccggagttggaggttggccaattaaaggagagatagggattgtagtatttggtacaagttctaacaccttccctaataacaataggaatatataaatcaatttcagatgaaagatttgaaggagagtttttaatacctgtattcggagatggaggttagtcgattaaaggagagatagggattgcaatattgtcccatttccttcttgagtaaaccaaaggagttttttcatcctcctttgtgattgctttctcattttcatttccctgtacagttgggtccacaccatgtttagttcctagctcaagtacttcttggttaataatcaaagattggccaagttgataaggttctgtttggataaaatcatccaacattggatagacatgtgccaatcattactgattagggaaggacgaatcttccattcagtacttcttcccttgaatgtctatctctgcataataggatagattttcaaagaacttgacatccataaagacaaaaattttcttggtcggagagtgaaaacagttaaagccttttttttgttttttttgataggaaacgacaaaggttaattggaacctttgaagcaagaatttttgagggatggtgattttggacattagtaaattctgagtggatggagattttgttttgatctaatgagtttatgaagagggagcatgaagatgtgacacatggatatggaagatcttagatctattgacaaaaatggtttattgcttttcttgggatgctagggtccacccacaaggtagcggatcagttggttaagagaggagtcgttgctagagatgtttactggggaattagccctgttttatctggttgatttgtgccctgctggtatttaggatgctttagtttctcatattggggtgggtggtgctgcaaccttcagcaaaaatctttgcctcattttttggcctggaggattgctcctcctttttgcccacaactttatcttcctaacatggtggttgtgacattaaataggattttttaacattttttattttcatcaacttttattgccaattgtttatattccttctgtgattttctcaactgtgtaggtaaacaaacttgttgaactgtacaaagagagttc

SEQ ID NO: 12084 - DNA, 5260 bp, Vitis vinifera
  Intron number 16 from transcript GSVIVT01034603001 (locus GSVIVG01034603001) derived from phytozome v7.0 (chr-ID chr 13; pos 14572434 to 14577693 reverse strand)
atcgtcctttgacactccaggaggaagcacaatctgtgagtacttctgcatctttttgtgtgcaacagtatcaactatatgtatatatgtctgtatgtatgtatgttcatcagaaacagctgatatacctcatggttgtctaaaataactggttttttcttaaatttattttgatatttatgtatttgtgaacatgcttactttgtagcattagccattctattaaaaggaactctgtttttgtacttggtctgacaacttttggaggtaggtgctaaaagaacactgtagaataagttcctgaggaatatgatttccatttgtatatctcaaatgcacagcagatgaaggccaggagtggagggttgagagtgtttttagtgcttgttcttatggattgttatatttggatgatgcagacccttaaaatagtgtaccttttcatgaagtttagaattaatatcattgatgtccaacatcttaatattcaattgagagtgtatttggtggatgcgtcctttcccattgttatttctatgtgagttgacttgtttcatttcttctgctccaattgagttgcttttaatgaccttaggttgggtgaagatattggtagatgaagttaaaatgaactcttggtaggtatgttggattacttgatgaaggactgtatgcatattttattgttagagagcaaaactatttgaagccacttgttgtaattttgttaacattgagagaggaatattaaagagagattgttggtcaatattgaagacagattcttggtcttagtgcttaatgacctaaatagaggaataaggacttgtttaattgttagaaaacaaaactaaatcgatatatatatatatatatatatatatatatatatagtgtgtaaatgcttgtgcaaatgtgtgatggaagactgttttgcccttattacaatatctgattcctatgcacttaactttctgatactccctttagtttggggcatggatatccatcatgatctacattttacatggatttggaaaattatgaccctatatagttttagtaaacattgttctcggttggcttctagatggagaattcaaagaagtcttggttgtctaagtgaacatgtttgatggaatcagtgaagatttcagctttgaggggatgcaaaggaaagatttggagaataaattactgaattccattgtgcaacatttctcatccaagactgaggagaaaaaaacacattatgtgaggatattaaaggggaggaaagttcatggattggtcccttagaaatcctctggattcaaaattctggtctagggaggaggtgaaagctagtgtgctagagggttgattcctccaccacatatcctcccagaaactggtcaataatccaatgcacccatatttgatgaatgcagtcctggtgtcactggattatagttttccaagaaatagctgcagcattctgcctcgggaggtgtcatccttctcattcttgtgcaaaccataatccttctagtcaccagtgccataaggaatgctccctgggaattgtgagaaccactcgccaatgacagttccatctagattttcttagttctgaaggctactttttttttatagataaagttctgaaggctacttggtccaggattttggagatggaaaagttggttggaaccagatgaccttgaatagcagtaataataccttgaaggagatattttctttctgaattgccaagaggaaatttatcaaagggtgcccaaaaagggagggagatgcagcccaagtacatggttagtatgcaaagggtgttgaaaggcacaaacataagaataaagagccgaatatcactagtaatgccctctacaatcgataaagactaacaaggaccaaataccaacttacaagaccttttggatcaaatgaaaagaagatatagaaaagattctcttaaaaattgattagtgtgtttcaagtctttgaaagttctttaatacgttcttgtcaaatgttccagaacaaacacaatggtgctgtccttcaaacctttcttcctttcttgcttacaaaagtctcatgccaacctaataaagacctatttcatcaatctaggaagaacctccaagagtccatatatggggaatgggaaacttcttgatttacaagttttactagtgtaataggacatggttggctactttggtgcgctcttcttggcgcttttaatgcatttttgctttcctatcagaaaaaaaaagaaaaaggacatggttggctcattctttttgtactactcctttcataagctgatccaaatacagaatcctggacccattaagtagtttagaaactttatccatgattggaccttaaaaatgagcatctctggggttacctcctaaggagaggcattgataaatgaatcaataacttgaatggatgttaatcttctaatatgatcgagatcaaatttgtgccttgtcattgcttgtctgtgttaaggtttggatactgctgcatagagccaaagactgggcttgggactatgggcagtataaagaaagacgatgttatgagcaaattgcaaataagaaactattccttccaaccacaaacccgtaatgagaacagctctatagattatcctcttgtgggtattaaccatactagtaaataaaaagagaactgaaggtcacttttaaaatttttctggatgtttcaatccatccttcactacacttatactgagctttgcaaaactatttgacaatcaatgcccttgtatccacctttgcaatatatcgttgttgttgttggtttttctccccctcccttttcttagtgtgcagttcacttaccaatgtactttaatttgaaaactaatccagggtagcttaatttatatggttgttttctagtgaatctgagacaaataggtattagtgattgttctttaggaaggcaggtattagtggttagagctgtggacacaacttatctccggaacgtgcaatgggtaagagttttggtcagttcaaatgagaaaaggacgcttcggtcgttgcaagtggtagtgggcctatcttgcttcgctagataattgtggtgggaagcaccaccatggatttctctcgtggttccgagcaatgggagtaatggtgtgagggttaggggtgagcttgcgggaatgtcatgcgctaatgagagcatgaagaggcaatcttcattattactgaagggggcagttgatgcgttgctccagtgtgggcagagagcagggttagttttggtggtggctgaaatttctgaaaagtctatggtaagtagtgggttagtagatgttgtggagggcgacagtgattggagacaagctactagggggactgtttaggtgtgatgtgtagtaagggagcataaagtggggtagttggtgggttagaagaagtgggccttgaggacttgaaagaggcctaattcttttaaggtttttcaagtgaaggggcccaactttcaagcagcctaatagaagttttcaagcctcaggaggcctgcaggttagatcagggctgttacaagaagacgcagtcccaataggaaggtgtgggttgtgttgaggtggtccttgatgtttgcataatcagcccagtggtggagctggctctttttggggcctttctcgtctctagagggttcgattctcagatgcctgagctcctccgctggtggttcaccctcatggaccgatgtggccctcatggtggaagtggtaagaccccctggtactctctctctcttttgggctcttctttagggactcaggtaactatttctccttcaccttccaggaacaatcttggtttggagagaagtgaggtaaagttgcttcccttggggagggtaatgaccatttgaggatggttttggtggatggcactcagtagagtttgaagatgttgatgtgaggctgattgaagaagtggtgggtgagacaacttgggaaaagggcacatgtcttggtttggtttcaatgaaggaagtgcatatggaggattggtcctcaagcaacctagcagcttttagtaactggttgggcttaccaacaataggttttatccatattcttacagttgcacatgaaagttggtatttgaatttgatacactgatttaatttgaaacaactagttcaatacaaaattttttgagtattggttctatctagaatcttgatatgtgggcaaagattgactaaatttgaccgttggctcaattttgttcaggacttcaaaattctgaagtttaaatgcttctaaaaaacttgataaagttgaagttacctaaacagaaatagcttgtttctttacccagctagaagtaatatatattttattggcataccctttttctctgtcacaacctggttgtgtttagttaactgaggaagttgattcatgatgttttgtatggcattctttttttaagtcaaaacttggctgatttttttaactttgccagttattatacttaatcgtaggagcatgcattttgtttcgacttacaaaaaatcacaatttctggttctctacacttaaatcgtttctcaaagtatgcgggatgcttaatggaaaggcttgaaaatctggtggagaagattatgtctatttctcaaccattggttgatagtgtttcactcttgctcttcattatgacatttgggctaatagggagtgactgaaatgattatggaaaataggcttaatagggagcaattaaaatgattgattggtgttgtttcatgttgctcttcatttgggcatttgcgtttcactgaagttattttgcagttgtacacattaatgaatgtccatgatttgtgcaacatatagactctttctggtggatatttaaccagttctgcagatttgagtagtggcagtgtgcttccttctctttatttatttatttttttgggtggaaattcttgcattattattgaattacgatgcttcatgtgtggttgaaaattgtttttctgatatcatatcatattttgattggaagtatttccattttttatttgaatatatatatatatatatatatatatatatatgttttgaagtttgttggagctgtgaggtgttcaactgaagtggttaaccagtatggtaagcaaattttaagttgcttgtgtcattttccttgtaggttggacaattgagggaagtatccaataaggcaaa

SEQ ID NO: 12085 - DNA, 3280 bp, Vitis vinifera
  Intron number 1 from transcript GSVIVT01029239001 (locus G SVIVG01029239001) derived from phytozome v7.0 (chr-ID chr1 1; pos 18165143 to 18168422 reverse strand)
tggttctccgtgaggtccgcggcagctccgctgaggtaattggatgaaaacgacgtcgtattactaaaacgatgtggtacttttgctgaaacgatgtggtgttaccaaccccatctatccctcatgattttgattcgagtgtgacgtgggtttttcaattgaattggttccttgcttgtttggatctgtcatctggtttggtttctatgggttttgttgggtgttctggccctcaattctggttgctaattttaatttatgattttcctttttttttttttttgttaattgttgttggagagattgaatctgggttttgggtggtttttggttctgggtctggggaaatgttgatctatgctttaaatggtgttttgaatactctgttattggttttaatattttgacttatttattttttctggggtgttcatgatccatggtgagatttgctactatttttggctcgtgtggcattggaattggatgccctaattcaaaatctgcagcttggtaggttatacagtgcaatggatttggaactgagcaccatttttttccccttaattttgtttcttgaagcttactgcttcaaattagggcggggtccgtgtaattgtttactgaaaatgcaagttaaatgtctaaatatttcttctggaaaaaaaagaaacaacaaggtgaaaaacaaaaaaatgaaatgaaaaaaagaaactagttggctttttttgcctggagatccacttctgtgaattacttgtggcatgtggtgctaacgtcgtatcagctggtttttgtttgtttgagattagtaaccctttttaaattgggagtggtgggttttgggaagcaatgttgataatctatatatgtcaagtgcctcagcatagaatttttattattcttattattttcagcttctatgcatgcattctaacattgaaaaaacattagagttcaaggacctctttaaacaataggatttgagatgagtgcgaccttggccttaaggttatgtgctggataaaatggagcataaaagcttatagttatcatatttagactgtaaagtgcatgttgaatctggttgaaagttagcttacatagaaaagctcactacttaccacctatgaaaggaggaatggaattttggttttacaatgttgtttatttcttatgccattgggcttagaaaagccaattttaattcttaattacttaaattattaatcatatattaattaaatgtttactttttatttgttttatttttaagattgttagctggcactcattgtatacttagtgccctcttttgttggttgctttttaattatttttcttatttgcctctataaccttattaagagtagtgtccaaaggctagaaataattttgttcctccacaatttttcgcttacatttcttcaaatttcttttgagcaattaaactttttttttagtcaagctattcataaaatttcatctattcatttttctttataaccttccttttcaagacgaataacgatgaatactattggtggattcttgtttccaaaaaaacatgggttttttcctgttttcttttttgagaggttggggagaaacacagaactgtctgagaatactcactctgatttcctttgtaagggagatgatgagtcagcaaatcatattttaaatcattgtgtgatggcttgcaatttgtggcattccatatttttgttgtttagtgttttgtgggtgcttcctagggcagtcaaggagttattcttaggttggcatggtagatttgtggcgaagagacacataaaattttggtggttagctcccttttgctttatgtggtcattatggaaagaatggaatataagatgttttgaggttctgaagagtttggagtgggtgatgagaaactcctttattagttcttcatattcttggtctaattgggtttgtagacgcaacttcaacaccatgcttgattttgtagattctctttggtaggagctaagatcttctttgcctttggcactctatgtacacatcctgcataattgagttgcacctggttttatgaccagtctaggtttctcttatgtcattggagtaacactatagcatttgtcatggacacaagtttgctacataagtgcctagcacatgtaggcttgcaaataggttgagcttataagcaacaaattatcatacttgatgtttagataccaagatttaatgtgtcttagaaactccaacacgagcaaatatatatctcattcaaacaagtgccatcagatggcttggagaattcgtcatgcttgctctacctgcacctctaatggatgagagatggaggatgtccattgacagcaaagccattgatggagcaacagtcaagactattgattatcatattcctattccatattttgagtacatgcatggcatgatgaattgatggttgatcatctgattatgaggttagggattggtgagctctagtagaggctaggttctttggaaaattgcttgtttcacattgatttgggttgtttggagggaaagaaatgctaggattttttaagacaagatgagaacttcagagattctatgggatctcatacatttctattcctccttttgggcttcatgcaccacaacatttaagggcattcctctcaatgtggtttagattgactagtattcgttgtgcagattgaaagggtttggttagcaaggagaggagcctagattaggtttcttttggaagaagaagtttatctaatattggagcaatttttgtattttctcatgtgatactatactgatgcataggtctacttagcatattggaggtttcattcatacttttttgatcagttagttgtattttagggagggatttcttgtccttgtgtatatcttctccatgtttaattgatttttgtttctgattaaaaaaggagaaaaaaaaaaaggaaagaacttggtcctctttgttgatttaacaccatgaactacatataggctacgtacttgtgtggtcattgttcttaagatgctgctcgtctgccttatatttccttttattgcctatcaataaaaaaagggaaaaaagatgctgctctactgccttgttgttgtagcagtactaaaatgctggttattgtggcattaattttttttttttttagagttgtttaaagttgcaggttgcaagagtattcttgctgctatttattataatcttgtcctttgctttggcaggtgtatttgt

SEQ ID NO: 12086 - DNA, 4307 bp, Vitis vinifera
  Intron number 6 from transcript GSVIVT01014104001 (locus G SVIVG01014104001) derived from phytozome v7.0 (chr-ID chr1 9; pos 436652 to 440958 reverse strand)
tggtgtatctataggaatctgattttgatattgggataaggaaggatccggtttcgttttcacaagccatggaaagtgatgattctagtaaatggatggaagctatgaatgaagagttgaaatctatggcccataatggtgtctgggatctcatcgaattgcctaataattgtaaacccgtcggctgtaaatgggtctttaagacaaagcgtgacgctaaaggcaatatcgaacgatttaaggccagacttgtggccaaaggtttcactcaaaaggaaggtatcgattacaaagataccttctctccagtttccaagaaagattcgcttagaatcatcatggcacttgtagctcattttgatttagagttacatcaaatggatgtgaaaactgcattcttaaatgggaatttggatgaagatatctatatggaacaacctgaagggttcgcaaagaaaggaaatgaacacctagtttgcaaattaaagaaatccatttacggtcttaaacaagcttccagacaatggtatattaagttcaataataccattacatctttcggatttaaagagaacattgttgatcagtgtatatatctcaaaaattagtgggagcaagtttatatttctgatactgtatgtggatgatattttgcttgccagcagtgatcttggtttattacgtgaaaccaaggaatatctctctaaaaactttcatatggttgatatgggtgaggcaaactatgttattggcattgagatctttagggatcgatctcgaggagtgctaggtttatctcagaaaggatatattgatcgggttttagagagatttaatatgcagtcatgttcttcgggtattgcacctatattgaaaggtgacaaattaagtaaaatgcagtgcccaaggaataacattgaaagaaagcaatgaagaaaattccttatgcatcagttgtggggagtttgatgtacgctcaaacatgtacaagaccggatatcagctttgctgtaggcatgttaggaagataccaaagtgatccaggattcgaacactggaaagctgcaaagaaggtgatgaggtacttacaagggacaaaggattatatgctcacatataaaagatcagaacaattagaggttgtcggttactcggattctgattatggtggttgtctcgatagcttaaagtcaacttcaggatttgtctttatgccaatctcgtggaagagtgaaaaacaatcaattactgcttcatccacgatggaggccgagtttgttgcttgttttgaagcttcaagtcatgctttatggttgtggaattttatctcagggcttggtgttgtcgactctattgctaaacctttgagaatatattgtgataacaccgcagctgttttcttctctaagaatggcaaattttctagtggatcgaaacacatggatttaaagtatttagttgttaaagaaagagtccagaaacaacaagtgtcaattgaaaatattaggaccacacttatggttgctgatccattaactaaaggattatctccaaaggcatatttggaacatgttatgaggatgggtcttttgagtaatccataatgtgtatgataatgaatggtggttatgtaattgacaatttgcgcattaaaattgtttctgcttattcttgttttcaattatgggtgcacattttattgtttgataaacaagaattgtcctgacaagacaaattacaggggctatttggcattaaggactaggttagtaagggttattgatgtgtggtgcatggaaggaaacatgacattatggtcatgtgaccgccatgactcgcatttatgatctaaattgattcagtattatggcaaatgattttggatgtattggctaagtttattgtaatcgtgatcacgtgtcaaatttattttccaatatatattttatatataaactaaatatattatagttttcataatcggtttagtgggccaagtgggagaatgttatttccacattaaattaagtgggtggcccactaacctattatttagccaattaaataatatccactatctttaaactgttatagatatttaccattgatggactgggtaaattataataattttaatattattatttaagataattaacagttatttcgattgacacattcagaacggtttttgaacgtgtattcttggccctcttctcctatcaataaaatacatatacagaaaccccttcatgtgcggtgtgtgcttttccatcaattacagaaaaataactctgtgtattaaggtttgataaggagaagaagaatcaaggatttaagatctataagatgaagggaaatctctcatggctgcgtcttcttcaaacggtatgtgatctatttgttaattaatgtttattttattattttattatcagagacgagtttgaatcataatgatctggataattgcatgttaatttccgtgttaaattctataaaaaaaaatgatagattcaagagattttgggttacctgggagtccacaaagtgaagaatgtcggttttgagcgtgttgactatggatgggtgagagaaaaggttgaagaagatcatgattttatatataggatttatatattgagattttttggattgtgggtgagatatggaaacaatgggatttttatatagtatccatcattattaattctaaaagtgggctcattaagttataatacttaaaaaaaatttattttatatgatgtcacttccaaaaaaatgacactataaatataaaattaatatcatctaactacctcaattgaagattttttatatgatgtgtcacctttattaatcataaaccctatggtgtcattattttaaaagtgacaccgtaaatagtgacaccataaactatttttgtagtagtataattcaaattgaatttaaaagaatgaaataaaatgagtattttatatcaggtcaatacaaactctaatacctaatatcctaaaattaatttgaaaaccgtgatagaaaccaaggccgatgatatttggaattttttgaacaaatattatttattttgacttagtatgttaaatcatttttaattttaaatcaaaatattaagatattttattaaacatactttatgtgtttaataatttaaatcaaatcattaaattattaaattgattttctaaataatttttaaaatcatcttaaatcattaaacattaaattttatgaaactccctttataaataagaaaagttcgtcataaattaactttaacaaaaaccaaatcataatccacctaaaaatgcacatggaggagagtttcccaaaatgacaagaactattctcaaggataaacttgaaatttgttgagaattgatattacaatataaactctaattaagaagagctaaaaaaacagaaaaaaaaaaaaaaatcttgttttttcctccctatccaaccaatagagggaaattcatatggatgggagcttgaggtctatcccataaagtattcccccgttcaaaaacaagaggacaaaaggtctctttaccttgggtttcatccttttttttttttgtttttttcttatagcaatctaccaagagggagaaatagaacaagaagctgatttttctttagacttcactttgctattcaaattctaagagctttgaatcttctaccttaaagtttcatcatcatgatcattttcaaattcagcacatgcagaaatcaatatttgagtttctaacttgatggtatgagaaatgaaatttaaaaaactcagaaaggtaccaccatttgcattttctctaaaattatattagttaagtttttcacaaaaatttgaaaaagtactctaaatttcttatttcgaacaaaggggttatacttctaatttattatacttcttttcttttaattaaagtatttttgtgtaaatatgaaattcacttatattttatcagtttcaatggtagactttcataacttttttttgtaggttttcactttcaaatatgtattttcatgtaagttttacttttggtccattattacggttatcttttaaagtcaattatatcatctacttatcaaatatgaaaggaaataaatagactataatgtaattggcatgtgattttgcgctaccaactataaaaactcaattcaaaaaccctaaattaaatttatgcattctattgtttcttacctttctattctacttctttggatggccttgtggactagtttcttggttcaacttgcttgtctcc

SEQ ID NO: 12087 - DNA, 5335 bp, Vitis vinifera
  Intron number 4 from transcript GSVIVT01029407001 (locus G SVIVG01029407001) derived from phytozome v7.0 (chr-ID chr1 7; pos 16620801 to 16626135 reverse strand)
cttctacaggtgcactagtcttttgcttctttcttttgaagctctttattgttattattatcattcttatgtttatgtcatctggatcatatatacagaagctccttctatgttgttaatttcatttcattcttttgaagctctttattgttattattatcattcttatgtttatgtcatctggatcatatatacagaagctccttctatgttgttaatttcttttcattgtttttcttgactgatactcactgaaagattgataatctgatccctttttgtctgaaagtttcctgttgcaagaatggtagtgattgggtggctttggttcagatatccagttgcaactctgtgttaaagaagggtcacaactagtcagttgagcaccaaaaatccgagcatagtcattctaaaactaatctttaaggctttattatctgtacagttatagcagcagctggattctaatttattactcataggcaaggttatttatcgattactgatgaggattaggactagaaagcattctgatactctctgtcaaggtgccaaactagcgagaaataaatgtgagaagaagacatttgagtttttggaaggaaattgaaaggaaaggatttaaacttgtagaagagagatggaaagaatacaaggtaaaaattcttttccttaactcttttctatacagagactcacatatttatatacaaaaaatcctagtacctaaattaagaactttcctaactcaattacaacaaatccctttgatcacaggattacctaattctctctacaaaatcacaacttccataatttcattctttcacactccccctcaagttggtgaatggatgttttccattttcggtttggatacacttgcttaaaactttgtactgcttaaaccttttatgagtatgcttgcaagttggcagtaaatagaatccactacctagtttcttcttgataaaatgcttgtcaatttctatatgtttcatttgatcttgtcgcactagattatatgcaatgttgattttagattttttgttgctataaagtctcattggcctatcctatttaattttcaaatcctccaaaataatctttaaccatagtagttcacaaactccttggcccattgctcaaaattctacttttgcaatgaaccttgccacccaactttgtttcttacttctctatgtcaccagattcccactaagaaaggtgcaatacccagtagttgatcttctatcaaccaaaaatccaacataatcaatgtatgcttcaagtactagtcctgggattcgttaaaatatgatgccttttcccagagacccctaaaggtattgtagcactcggttaacagcttgcagatgaacctcttttggattgtgcatgaattgactaatcacacacaacatatgctatatcgggtcttgtgtgagagagataaatgagtcttcccatcgggtgttgatacatcccccctatctaccatagtatcttcctcagcctctccaagtttatgattaggatctattggtgtgcttgttggtttacacgccaacttccctatttccttaagaaggtctgttacatatttgtgttgagaagtaaaaattctctgcttaaaatgtgcacctcatttcctaggaagtatttcaacatttctaactatttaatttcaaattccttggccaagtattgtctcaaagtctacctctctagttcatcattttccgttatgatgatgtctacatatacataccaaaagagctggaactcttcttgaatccaaatgcttgatgaacaacatatgatctccttgactttgtttatgtctcatgtttttcattacttttgcaaaccttttaaaccacacccttggagactgttttagcccatataaagctttcttcagtttacacacctttttagtggttgggtcactactaaatctaggagggacttctatataaatctctttttccatatcttcattcataaatgcatttttttacagcaaattgttgtagatcccaattataatttgctaccaatgataacaaaattctgactgtgttcatcttggcaatcggagcaaatgtttctaaatagtccgcaccatatgtttgagtgaatcctttagctactagtattgtattgtacatttttagtgtcccatttgctctatgcttaacggtatagacccacttacatcctattggtttttttcttacagggaaatttaccatctcccaagttttattcttttctagggcctgcatttatgcattcacgacttgtctccaattttcattagataaagccttggatagagtagtaggaatatgaatattgttcgaacttgtgagaaaactctatgggatggagacaactttttaaatgacaccacatgtgaaagtggatataaaggacatttagtgcattccttcattcccttcctgatggcaatagggtgattttgatctatagattttttagactgaagttttgactcggtttgtgaggaaggatgagaaactattacctcatttctagaaggtggttcagatttttgggcttgtataagtttagggattgtaactttcttccttaagtacactttgctagtcattcgatttttaggagtaggcttaagtggcaatgactctggtttagagaagtagggtacaaatactggatcaaacactggactagagactgcagaagggtcaatgagataggaatcctgatccttgtcttccttgatggaattctccccctgaagataaggagcaggaaaataggactcacaatcgttgaaagtaacatttgttgagacaaaagaatttttggatagtggatggtaacacttatactccttttaagttgaggaatatcccacaaaaatatatttaaccgctattaggtccaattttcccttgtttggattgtgagcatgtacaaaggacacacacgccaaatatcttaggaatgagatggtttgtggttctcatattagaataaaacgatgaaagtatatccatgggagttttgaaacctaaaactctataaggtaatccgtttatgagatgtgtggtggttaggacggcttccccccaataagatttaggcatatgttttttaaacaaaaaagctcatgttgtatcaagaaggtgaccatttttcctctcagtaactccattttgctatagggtgttgactcatgaattattccctcgtgttgaaagtatagagttaggacttgattgaaataatttctggcattgatggactgaaacctcttgatagtgacaccaaattgattttttatcatgttatgaaagtttggatgaacaaaactcacatcggatttgtgtttaagtaagaaaatccaagagaccctaatacaatcatcgataaaagacacaaaccaacattccttagatatattaggaataaggtagagccccaaatattactatgaattagatgaaagggctttggactttttttattattattggtggggaaggttgaatgtttgtgtttggcaagttcacatacatctcaatggaaactctcaacatctaatttcctaaataaagaaggaaacacaatttaagagttctaaatgacggatgtctaagtctacgatgatgaagccaaattttttgtttattgacaaggtagtgctcagaaggaagagatacagatgactcgcttggtgtctcaaggtagtatagcttgttttgttccttaggcaatccaatcatcttccctaacctaaaatgcatagtgagtagggtaaaaagtcacgttgcaacctagatcttgtgtaagcttttgtatagagacaagattagtggacaacttagaaacatgaagtgcatttctaagtgtgagcgtagggctaatttggacatttgctacacctgtgatagtggtaaatgaaccatttactatggctattttcctttggcttggacaagggttatagttgttaaattggtgtgatgaatgagtcatgtgatctgtagcacctgaatctaaaacccaagaatttgcaaaagttttatctgagacttttactccaatgaaaataagaaacttaactaaaagtgccagtgaacaggtacctgaagatttcttacttgaaggtttctcaagagttcccaacaaagctctcaaattttcaatctcctcttgattgaatctaccttattccaaggatttttctttaatttgttgaatagaagacaagtttgcttgcccattatacctttgttaccctccattgtaaccccattctttgttagatgtggttagcttaccatgaagtttctaacatttctcccgtttatgtctaggtttttggcagtaaatgcaccataagttatccctgttgtcacggtttgaagcccttgatcaatcagtctttttgttatcaacaatgttaggcttctgatcaatccctgttgtcacggattttgcaatgacacctatttaggttaagttgaagaggggatttgaagcctccaaacctgtttttcaaattgttatggaagttacctgatgcaccaaatgatggaccttgggattccaaaaccaagctcacccatgtaaaacagtactttagcaacaagatgaacactaataatttttgacatttttttttaaagatttatgcaatgattttatttttcattttcattttttatttttaaatttcagaaacaaaatggatttttatttactgtcccttgttgctatgttgatgatatcagtgacatggttggccattaacactgggacttggagtaatgaaagaaaatgttatgattatgacactaattttgatccttgtgatatgaatttctttttcctactgctgtaatattgtcatatactgcatattgtaggaattcctcttatgctgagacctattcacagttctgaaaacatggtacaagttgaagaaagatcaatattttcttcagaataagaatatcatactcattttaggctaatcaacacattatggaacagtgcattagcttctttcttcttttaaatattatgcatgttcaattcatgcaaaaatgccaaagcttagggccgttaccagtgtatcctctgaaaaccctggaaacaggactatgcaggaaatggatttcaactgcttgtgaaaactcaaatgtctgaaatcattattatcaattggtgtttattatggtattattgtctatttcaatatcttcaaatggaattctgtaaacttaagcatgactgatgtatccaatttgtattctgcagtttaggctggcct

SEQ ID NO: 12088 - DNA, 6499 bp, Vitis vinifera
  Intron number 1 from transcript GSVIVT01038746001 (locus G SVIVG01038746001) derived from phytozome v7.0 (chr-ID chr1 2_random; pos 369629 to 376127 reverse strand)
aaaggagtgttaaccaaactttcataaactttatgtggaaataattatttttgaaaataattttggatacataaaacaaaataaatggaagtactaaagtaatgatcatattcttaccttgatccatgaagtgagattgagtcaccttgtgaattgtattgtcaaggtcttcaactcactactctcatatagtcgatgggtcacttgtgtggtgtatgttgttaaaaataaacaacaagaaagaaaaagacataagaatgagagtgtggcttgggacctcaatttataataagttgtacatctcttagtcttcccatcaaagactatatgggagttatactcattatttacacccattatgtacaaattaatgggtaatggtggattatgaacttgaatacatctatataattgcataggttatacttttccattttcctccataactcaaacataatgtacaaaataaatttcataatgatggggttacaaaagttgtaacaccacattcatataaagtaaattttctaactccacatttgtaatttgagttttccatacataagactcttggatgcccaatcaattgattcacctacctatcaattgatacccttaaataatattcatataaatataattatatatggtcacacattataggaaaaaaactaacaatctcccacttggcctacataattatatttgtaatagattaaaacataatatggccataacaatttctcaaaataggcatcttttactttaagattatgtttcatggaaccactaacaccaaatcattgaaatgattggatcacgcaatgatccaatattcttcaaggattatagtactagcacttccattaacatgaatcaatgacttttatgacattagcaacattaaggtgataatgttaattcattcacataatggtcccatcaacttttaaacatctagatagtgcacaaaaaggatgtataaaagtaacataataatcatcaatgtatcataatcaagaactttattctcgttataatgtgatcacatacattacactctcaattaatctaaaattgacaaacttgccaccaagcccatgcgcgcaacataatccataaaaagcttaggtggaagaccttttgtcaatggatctgccaacatgagtttatttttaatatgttcaatagagacaactccattttgaactttctcccttacaaccagatacttaatatcaatgtgctttaatcctcctatagtcttattatttttagagaatcccatagcaacattattatcacaatattttctcaatggtctcattattgaatcaataacatgaagccctgagacaaagtttctcaaccatattgcatgacatgtggcttcataacatgctacatattatgcctccattgtagacgaagctatcaatgattgcttatggctcttccgtgaaataggtccatttgataacataaaaatatacccagatgtagactttctagtatccttacagccagcataatcagaatcagaataaccaataatctccaaattatctgttcttttgtatgtaagcatgtagtccttagtcccttgcaagtaacgcaatacctttttaactgctttccaatgatcaatacttgaattactttggtatcgaccaagcatgcctaccacataagctatgtctagtcgagtgcagacttgagcatacatgatactccctactgtagaagcataaggaattttgtccatttgttttttttcaagatcatttttgggacattgaagttcacaaaatatgtctcctttcacaacaggagcaatactgctagaacaatttttgcatcttgaatcttttaagaactttttcaatatagttcttttgggataatcctaataatccacgtgacctatctcgatgaatttcaactcctatcacataggatgcttcaccaagatctttcatatcaaaattcttggataaaaattgtttggtctccaaaatcattcccatattgttgctagcaagcaacatatcattaacatacaatacaataatacaaattttgctcccactaatcttaaggtatatacattgatccactagattctctttgaaaccaaaagtgatgagaatttcatggaacttaagataccattgtctagaagccattgtctagaagcctgttttagaccatatatggactttttaagtttacataccatatgttccttacctttatcctgaaaaccctcaggttgatccatataaacctcttcatgcaagtcaccattcaaaaaagcagttttaacgtccattttatgtaactctaagtcaaaatgagctactaaagccatgacaattcttaaggaatctttcttggaaacaggagaaaatgtttccttatagtcgcttccttctttttgagtgtatccttttgcaactaacctggccttgtatctttcgacattgcccttagaatcatgtttggttttaaaaatccatttgcaaccaatagttttaattcctttaggcaattctacaagatcccaaacttcattatctttcattgatttcaactcttcttccatagcataaagccatagagttgaattttcactattgatggcttgattataagaagtaggatcactttccaagccaacatcataatcacactcattaagataaacttcgtagtcatttgatatagcaggttttttctctctttgtgatctatgtaaagataatacttctgtagttgggacattctcattttcattacgagaaacctcttgagtcacaccatattctatcattggtgttgatacttcattagaggtcaactttttaagcttaattttcccactaaaatattcattttccaaaaacacagcatgtctagtttcaacaattttagggccctgaccatgacaataaaatctaaaaccatttgatctttcaggatagctaatgaaattgcaacttatggttttagaatccaatttctttatttgtgggttgaaaattttagcttcagttggacatccccatacatgtaaataattcaaagttggtttcctacccacccacaactcataaggagttttgggtatagccttactaggaacacgattgagaatgtgaacaacagttttcaatgcttcaccccacaaaaattcaggcaaggttgagttactcatcatacttctcaccatatcaattagagtacgatttcgtcgctctgctacaccattttgctctagtgttccaagcattgtgtagtttgcaatgataccatgctctcttaaaaataaggaaaaaacactaagatgttgacctgattcggtgaacctaccataatattcaccacctctatcagatcttacacttttaatttgccaattgagttgattttcaacctcagctttataaatcttaaaaacatctaatgcttcaaatttttcacgaataagatacacataagaataccttgaaaagtcatcaataaaactaataaagtacttatgtatgttgatagttggaattgaataaggtccccaaatgtcagaatgaatacattctaacaattcagtaacccttaaggcaccctttttcttaaccttagtgtattttccctttatgcattcaacacaactagtaaaatcagaaaaatcaagtgaagtcaagatttcatctttaataagatgttccatcctttctcttgaaatgtgacccaatcgcttatgccacaatatggatgaattttcattcactcgatttcgttttttagagaattcatacacatgataagataaaagagactgtgaatatttgcaatctaaattcaatgaataaagattaccatgtaaagtgccaaagccaaccaaacaagaattatagaacaaggaaactcctttatttccaaactttaattcataaccataagaatcaagtcttggaactgaaattaggtttctaataaaaacaggaacataaactgtatctactaaatccataacgaaaccagtatccaaaattaaacgaagagtgccaatagcctcaatttccacttctgttccatttcccaaagtaatggttcgctctcatttacttagtctcttgcttgtaaggtatccctacaatgaattcattatgtgaatgcttgcaccagtgtcaatccaccaagagtttggtggtatatcaactaaataagattcataagacactaagcattgagttttacctttcttttccaaccaagccttaaagctagaacaatctcctcttttatgacctttcttgtggcaaaaatgacattgtatcttattttcatccttttgcccattgtgagatacatcattaccttgcttctttttattacctttacctttcttgaaggattttttatttggactaatagtgaggtgagccatatcgggcttttccactttaattaagcctctcttcttcttgaacacacatggcaattagttcactcattttccacttatacttctgagtattataattaattttgaaaggaccaaattgtgaaggaagggaagtcataatgaagtgaacaagaaaaccttcaaaaattgccatgtccattcctttcaattgagaagtcatgtcactcatcttcatgatgtgctcacgtacaccactatgaccatcatatttcattgttatcattttgatcataagagtacttgccaaggacttggaagttcctaagaattgtttttcaactgatttaatatagctcattgcattatctgaatctgggattgctccacgaattgcaggagtaattgaacctttcataatcattagactcatgcgattagagcgctcccacttttcatataaagccttttgttcattagtactttcggaagtaggctttgtgggtgtaggctttcttaaggcatagtctaaatccatgcaaccaagaacaattccaatttgttccttccattttttaaaatttgctccacttaattgtttaataccagacaaatagcctgtaatagcagtaggattcattgttgcaaaataaaatttaattcaaaaggaaaattattttatatcatgacaatatttaacaccacactttacaataatctaattacaacaaaaattaagttagatatcacattagtcataaacataagagatcatatcatagttctttcgttggaccgaactacaatcacagaatccaaaagtatattattataatccctctgttgggtgattataataattcataaatcatatagatatgacagaaatattaaaataaaagtattgaaacgtaaagaagtttaatactcttgggtaaaaacttcatcaatcttttattataaaactcttgtcatataatcaaacatggtgatgatcctctgttgggttgatcaacacttgtttcataagttgaacaacacacacacacacacacacacacacacacacatatatatatatatatatatatgatcatcttcaaacaaacaagtaaataaacatgcatactagaaaaactatttcttgagatttccataatcacacatttaaattactaatcatatttttttgcaactttcataaaatcatgcaaatatgattgaaatcatgaaacattgaaaatgtgtgttactacatcattcatatgcatcacatcatatatattttagttgtccataagatcaaacaataatcaaaaaacggaaaaatatgttttatgatccaaaattggttggctctgataccaattgttaaccaaactttcataaactttatgcgaaaataattatttttgaaaacaagtttggatgcataaaacaaaataaatggaagtattaaagtaatgatcatattcttaccttgatccatgaagtgagattgagtcaccttgtgaattgtattgtcaaggtcttcaactcactactctcatatagtcgatgggtcacttgtgtggtgtatgttgttaaaaataaataacaagaaagaaaaagacataagaatgagagtgtggcttgagacctcaatttatagtaagttgtatatttcttagtcttcccatcaaagactatatgggagttatactcattatttacacccattatgtacaaattaatgggtaatggtgggttatgaacttgaatacatctatataattgcttaagttatattttttcattttcccccattactcaaacataatgtacaaaataaatttcataatgatggggttacaaaagttgtaacaccacattcatataaagtaaattttctaactccccatttataatttgagttttccatacataagactcttggatgcccaatcaattgattcacctacctatcaattgatacccttaaataatattcatataaatataattatatatgaccacatattataggaaaaaagctaacaaggaggcctcggaaaaagggtaaaaagccaacaa

SEQ ID NO: 12089 - DNA, 20892 bp, Vitis vinifera
  Intron number 6 from transcript GSVIVT01034615001 (locus G SVIVG01034615001) derived from phytozome v7.0 (chr-ID chr1 3; pos 14248484 to 14269375)
catgttagtttcctacctcattttcttcagatctatatcccttgtgatgtgcagacactttgttaaagggattatgtcaacattactataaaattttaaatattaaaaaacttaatatttcctacaaatagtattgggaatattacacttacactaatacatcacgtgccaagccacacaaaccttttttttttattcataaaagattgcattcaatgaatgcaattcttgataacaatttgtcttaacaaacagcaattaccaattgtagttttcgagtaattttaaagttactagaccttttcacacttcaattcattttatcagttttggcaggacttttaaaaaacaaaacttctctttcccaaattcatgttgcaccactatccttaagagttttttaactaccaacccaggaaaaattaattgatatattaccgcaataggagtaattttttttcttttttaaaggaggaatgcattctttacaattagagaaatttccttacacactcggaaagggtggacaattaatcaaacggagggaatcagccaggaagaaggaaaagcatcctaggtctagttgatatccaaaagctgctagcaacaattaggtgagggtgttggggtgaaccatagaagtttagtagagccaattcaagtgttggctaggtgtaattgagaaggtaaattgtttcaagcaccagtagaactagaagccccttgtttcaaagtgaggaagggtattcacatttcatttgatgtctagaagtgaattaaaagataagatttggtaattctagagattctctagtggaaaaatggagatctcatatgttgcccataatacatggaagaattgaagtagtttaatggaatcgattggcctgaattctacatggagaacataagccagatgaggcaatagaaatttttttctttttgtaagagtagctacaaaccttttagaccaatgagggttgtggatgagagaagagctccatttggtttaaagaaacacaagcccttcatgatatgctacactgaaaagaacaagtagaaaaaggaataaatatattgatagttcaattatttttccgtatttgctgaatgtggttttttatgagagaaaaataaagctttcttgttttgcaatgtgtggcgtaaagtgccatgtagctttcccttattatttggtataaaatatcattccttttagattttttttttcattttaattttctctattttttaatataaatttgaagaaaaattctttgctcaagtcttattatgattgagtagctatgtccaattttttttttttttttttttttttgcacccaaagctaatagctagttgtgatgctgactgctgagtggcacaaacactttttagacctaatggatatggcacttccctaacactctttaaacatacatccgacactccttggatgtgctttgcttcttattgccttgtctttgtattcctaaaataacattgataattttcctccctataacaatagcaagttgagaacttgaaggagaagattttgcatatgtccttgtaaggcttgtttacaaacttaggacctgctggaccatttaccctcaggaatgaacaaactggaaaaagtagcatggatatgttgtgtcctttgggatacttctctgatattgctatacaaaaaccctttaaggacgctcagtgaatctgccaaaatatgtttgaaaaatgggtttaatagtgaaatgtgattatttggcagcctgatcctctctgtttcctgttttgtaagaattaataatgtcaccttctctatgtcttgttgaatttgccctgtgtgtgtgttctaggataatagttgttatgttacaaggccaccttgtcatatgaaattttcagtttccttttctttcgatgtgctgttataacaatttttctcttgatggaatattctctcaagttgtttttaaattattgaaccatatatgctagtaagccttgttacaactattggcattggctttggctttggctttatataccatgttataatccaaaagggtttgtgattagtttacaacctgctcttaacccgatgccaacctctatgaattatctcatattccctggttggtgccaagagggtgaatttccatgagtattgggcaagatttgttggcaatatgaagacctacctgatttttattaagtttacaaccagtctacaataaataactgtacataattccctggactagaaaaaggtctatatcaatagagtagaacttgatgtaggtatatatattcatttcctaaattattattattttttaggaaatctaggagatatttttctgctattcaaatatttttattttgtttaaataataaatctgattatataagattctaggagttagttgttgttcttttaaattgttgtttacagtttaaatttaaatcttttatcctgtttttaggttttaggttgttagctgagtttgaataagtctcctagtttctaggcagcagaattgttagctattctctagctatctatttaaatagttgtactctttattattattttgtataagaggaaatgaaaggaaagaaaagaaagataaggaggaaataaaaagtgagaatgagaagaagatagaaggtctttatttttattttttatattttattttccttttatgagaatgagtcatgtgcgagaggagaagattgatatagatcaatggatatgagaatgaacattgtacttagaaacactggaagtgaattgtggtatagtagatagaagaaagaatgaggcaaactagatagcatggatcctcttgttactttattagattggcaaaacaaaactaaaataagaatctaagaaagaatctaagaaacaatcaaagaataatgggtgcctagtatgtcaggagtgttggttaaagaggacttattgaaagtttttcacaaattctttggtaatgagataataggagcactattctccttcattgctttggtgcctaagaagtgtcaaaccactagagttttttattttagacccattagtttggtgactagccttgataagaccattgttaagtgttgttttgtccaagtagttaagaggagttttacatgagactattcatctttctcatcactctagatggaatattagtgaccaatgaagtggtggatgagaaaagaccttcaagagaagaaggacggactttaagattgattttgaaaaagcttataaccatgtgaaatgagatttttcaaatcatgttctagaggaaaaaggttttggagcgagatggagatcttagatttatgtttgcatatcaacaactaattttgttgtgtaaattaatgggtgtgtgagaggatgggttaaggcatataggggcttaaggcagggtgactcactgctatgcccctttcttttcactttagtagctaatgtcttgagtagattgatgttgaaagtatagtagtgtaggtttttaaagtgttttcaattggtagatcttaagtgagggcaacccatttacaatttagaaatgacaccattttttttccacaagctagactactcaacttgtgaaaactttaattgatttacatggtgtttgggtaggtctctaggctcatgatgaatttcaatattaacactttgttgggtatatatgagttaggaccaagttcaggcttcaaacttttttagaatgtggggggtgtttaagtgcctcatatcctatttgagcctccccttgggtaagggaggaacctaagaggtatttccttttgggattcggctagagaaacaatttctaaatgattaaatggttgaaaaagagccatattgatcttttggtggaaaaataactctttgaactcatgtttgtttcctattcccacttatttcctattaattttcaaagttgtaggtaaggtagcataggattgagtgattatagagagattttctttggttaggagtgagggaattaaagagagatcaccttggataacatcaggtatgtaaacctaagaaggaaggggttttatgtataggtaggatttccctaggaagtaaagccctctgagggaagtggttgtggaagtttcctaaggagaacaatgctttatggtacaaggtcattttgagtatctatgggttgcattctaatggttaggatgccaaagcttttgtcatgtgttcgcattgctgtctctggaaggttattgcctaagtcttatttgattttccttgattcaaaataggctaaggagatcataaactaacacccttttgttagagagagagaggagacgatacttcaaaaccttttgaagtgccttttagcatcttcaatccttagcagacaaagttaaagacaaccctgaagcttcatctagagagattgaaagaaaatcttgagaacccttatcgtttcgttagggagagaagatccaaatctaaagaaagagggatcctctcttccaaataaaaaaagggccaaccactttaggcctaactaaagcatgaaagaagccattgggttaagtcttgtcctcactcataacaaccttcttatgcctaaactggtggcccatttcattaggccttgctataactagaccataaaaactgctttgacatttcaaacaagccctcttcaccatgcaacatttttttttttaaatagggagaggcatagaaaaagtatattaataaaaacagggcacccatacactaatccaaaagcatataggaagtatataacaagtgcctataggcaaaaacaaaagaaagagggatacaaaaaactcacttgccctcatctatagcccaatcactcaaaaaagttaattaaagaattaggcccttcagctatacacaacttagaccaagaccacaaattacaaacaaaagattatttcgacctttggataaaaaaatcctcattttcaaaagcaaccctatttctttccttccaaaccgtccaaaaaaggcacaaaagggttgctctccaaacttttacttgcttcttgcccacaaacacaccatgcaacccttatgtttcacgggtctcttgggattcttcataacactttcatagagaggtccatggtcctaaaaaagatacatcatagcactctattgaatttattcaattgtatgtgccaaatatgaacctttattagacccaataggtcctcaatgagagccttcctgccactctggtctgacacatatagcccctcccttccatttgcccctttgctcacttttttaggaacctaccaagagattgatgaatcccatcctccattagaagcttagagaaatttgttatagctgatctaatcttgctacactttttatccaagatagccacatgtggtcctactaagacattcctcttccccacacacatcaaggtgcatgattcaatctcttcttcaaccttgagacttactttctctttttgggttggctttgaagggggtctcgctattgcgacaaactttaatggagaaccacattgaattttctcaccataatggaattgaggacatgaaacccacttccacctctagcttttctgattcctcctaaccaacattttttactaggattctaatctgtgacaaggtctgatgcaattttgtatcttcatccaccactatgaagccatcacaggcatctgctacttcttgaaagaactctcatccctaaaggtgtgccttggaactctcacccaagattcatttctctaaaagcccacccaagagcatctcgatgtgataatctacccacctaaagtgaatggttttccttaggttattgatttaggggctactgatcatatgactagtcattcttccttacttgaatctcagatgccctcatctgttaagtctatttaggttgctaataggattcctatgctgatttcaggagctaagactgtctcacttcctcttaattgttttgtaactttcaattctatttactatgtgtttcatgacgatcttacagagatgacaattggcattggtaaggagagaagaggtctttactagttggagggggcaagggagttaaaatttgaatatgaccgttgtatttttcaagtagcaagagagacatctaatagagaacaaattcttttatgacatactaattaggtcacccatatgtttcttatttagagcttttatttccttagttatttaaaaattttgcagtttctagtttaaggtgtgaacaatgcaattatgctaaaaatcatcgtgtacctttcaaaatatgtctcaataaaagtttaattccttctatcctgatttttacaaatgtttggggtcctttttctactccctttgctttgggtcataaatactttgtcttttattgatgattgtaccagggtgagctgagtatatttgcttaagtctaagaatgatggtctacatgttgttcttcaattttccaaaatgattgccatataatttactactcaggttaaggtcttttactctgacaatgatcatgagtttgtgaatcagtctcttgctaatttgttcaaagaaaatgaaatcctctaccagacaacatgtacatacacgccacaatagaacaacataacatagagtaaaaaccgccacattttagaggtggcttgggctttatgctttaatatgtatgttccaaaacgtttttaggttgaggctatcatgattattgttttttcatcaactgaatgcctactcatgtcattgattatcaaattcctttgcgaatgttatcacaatttcacctcattccttctgctttgaatctttgtcataaagttttctgttgtgcatgttatgctcatgtacactctcatcaaaggaataaacttgatcctcgtgctcttaattgtatctttcttggttattttaattcccaaaaaggctataaatgctttcattctcctgcagacaaatactatgtctccatggatattcaattttgcaaagggaagtcttattcttctggaaatgtgtctctagttcctcttcagggagagattagaagtgagaagagggtacgaattttaggtcaggaggaggattcaaatgatttgggtaaagggaagtctttagatgctcctaaccctatgacacttgagtttgaatttgaggaaagaaaggatgaaaaaccagccagattattccaacaatgttatacaaggaagaacaaatatgctactgtcatatcctccctaggcttcaatactcttaatgatgctaccatgccattggatgacacttccgagactaatcctgaggtacatgttccttcacctttaactttagaaattgctatcttgaatccacaagttggtgatcaaggtaggagatatcctcttcgtgatcgtaaagaatatgataagttgggtttctcaaaattatcttctaatgttgtatatcccatttatgatttcatctctcatcattgtctatctaagactcgccttgtttttgctcttcaattgtcttttgtgtttattactagtcattttcaagaagcccttgaagattttgagtggaagtttgcaatggtagaagaaatgaagtttctaaaagaactttacttgggagatggacaagctccttaaggaaaagaagacaaaggaatgtaaggtgtttcaaataaagtacaagttagatggaataattgactggtacaaagctagactggttgtcaagggatacaagtagacttatggaattgactatcaagagacctttgcttctatagtcaagataaacattatgagagtcagactctctcttacaatcaatctaaactgaccattaagacagtttgatgtaaagaatgtctttcttcatggtgatctactagaggaggtgtacatagatccccttttggtgtttacactaaaaagaggcaaggtatgtaaactaaaaaaggctttgtatggattgaagcagtcaccaagggcatggtttggcaagttgagctacttgatggagtatggttttaaacaagctatagtagatcacactttgttctataagagagatggtgatcacattacttttcttattgtttttgttgatgacatgattgttataggtagtaactcaacaaaaatagagaagctttagaggtatctggccaaggaatttgaaatgaaggacttgggtattgtaaaatacttcttgggtagtgaggtgtctcgatccaaacaaggactttttctttcacaatggaagtatacattagatctcttgattgaaactagtaactctgcttgtgaacttatggatactcccattgagataaatcatggcttgttcatctatcctaattagatttcaatgaacaaggaaagatattagagaccagtggggaaattaatctatttgaccctcattagatctgacttgtcatatgtagttagtgttataagtcaatccatgaataatttgagtgatcaactcatgaaagcagtaaatcgtatcttagcctatttgaagtcctctctaggcaaaggtattatgttttctagacatgaacatttagatattaagggttacacaaactctgactttgccgaattcagattggatagaaagtcgacttcaagatgtgtcatttgtaggaggaaatttagtgaccaagaggagtaaaaaacaaaatgtggtctcattgtctagtgtagaaactaaatatcaagtgcttcatcatgcaagtgcaactatgaaacttacttggctaagaattctcttgaatgaacttgggtttggtcccaagaaatgtatggtactcttttatgataacataacaactattaagattacaaataatttggtacaacataatcggattaagcacattgaacttgagaggaactatatcaaggataacctagattttggtatgataaaggttccttacatcaaaaatgcagatcaactggcggatatgatgactcatattgctactagtagtctattctatacatcattatctaagttaggcatatgtgatatatatgcaccaacttgaaggggagagatagcatatattcacaactgtgatttaggtaagttatagctgtgaattatagttataatttattctatagttgtgatttatacaattataaatattttgtatggttgtctattattttgtatagttggttatcctaaaatgactttatgtactttgtataaatacccttgagatatatgaaaaattcattcagtaatttatcaattggaagactttcttgagaaatcatgctctcatagggaagtgacttgggaggttccctagagaaagcgatggtctttggtattagattatttttagcatttatgggacacatcctaatggatgagatgcaaacatttctgttagatggtcacatggatgtccttggaactgttttttttttttttttttttttttttttttttataggaaacgacaaaaatgatatattgatagaaaaaagaagtacaagagaaggatgaggaatcctcccaccaaagaaaaactaaactacaagaatacaaaaacaagaaaatgcaaagtaaaaacatactatctctctagattagaccaacccattggaattacacactactagctaatcaagttgtaacacattaaggggaatccccttaaaaaccttggaacaaaaagcctaaagagaagcaaggaaatgaatagaatcccaaatattctttgaattccttgctttatcctaaaaaatcctcgcatttctttcccgccacacaacccaaattaaagcaatgcacacaacttgccacaaaactatccctctcttagataaaccaaaaccattgtaattgatggacaacatgttggaaatgctcctcgagggaattgttgcacaagtttttcaggcttttctccatacacctacttttgtggtggtgaattaggaaaggatatgattttaggaagatttatggtggggcatcaatctttatgttcataatttttgggtttttatagagttgtttcagtgagaaatcttaccatctcaatcgtccttggtaattcctatctgttttcttggaattttaactttttagcaatatcaccaatttagaaattgaacttctcaaaagacatgtcttcacttacttcagtgcacttgtctctttctaccacgaattcaagagcttggtccttattttcttttggttcattctcagtaaaatcctttttcacaattttgtccaagttcttaaatccaatctcgttcctttcgactaattttatttgaaaatcaaaagtctcttcaaaggttaagacctttgcttggttggtggtgcactagaaggtaaataccaatgatatgctacaagtgagaagaccttacaaatctctaagtcctcattggtgcattctatgcaaaggaagtggaaaattaattgaccatctttttctacattgcccaataacattggagctttggcataagctcttcattgtagctaatatgaattgagtttctcttagaagtattgaagatatgatgattatcttatttagaggattgtagaatttaattagagacaagattctttggcatatcacttgcctcattgtattgtggatatgtggcaagagcaaaatgctaggacttttgaagaaaaatgcagaatagaagagatgttgtgagatattcttcacttctactccttattttaggtcttttgtacgactgcttttaaaggaaccccactaaatgttattcaacttagttagtcttcggtttataattcgaaaagggtcacaggtggataacatttgaaagagtttggttctggtttttgacatattttatatatgcttctatctgtagttatccttgtatagtggggtgtagtcttactttgattaggttttgtattttgtgggaagtatctctcctccttctcttgaactttacttttatcaatatatattttgtttctaatcaaaaaatgatatcaaggatacttctaaacttgcatccattggacaaggtagaggcggtcctcttatttgaggttaaggccaaggtttaggaggaaatggaggcataagtaaaagagacatgcaatgctcacatgtggtaagactaatcccgtttgataaatcttagaatatgttttgttgtcttatatgggttaatttagttgtcttctcttccaatggtggagttgttgttcctacttttgttcaacttccaagtggtagtaggaagtctattaccttatctttagatgattgcaacaaactagtgcaactgtctttagagatttccttgtgatccaacaaggcttctattgctaccttagcatgctcagatacacatgctttacttatttctagtcagtcttctcacccttaggttatagattctaaagcttcttgttagatgattggagaatcctcccaaatttctcacttaactaagttttctaatacattttcaatctttctagctgatggttccttttcttttgttcttggtcaaggagtgatctatccatttcctttatcttcttttaaacttaattctattctatatgtacttaaatttcctattaatttattatctattagtcaatttactaagcaatttaattgtgttgctatcttttttcctccccattgtgtttttcaagatctctacatgaataggatgattggtggaggacttgagcaagatggactttattaccttgatagtcggtttatattctagtctcatggtaggaagatgttagatgctgctactctttctttgtttgttactcctctttagtggtgttataggttgagtcatgcttcttttgagtagttacattccttgggattgtctccaaagttgtcaaataagatttagtatgagttgtgtgaacttagaaaatgctataggttattttttccatctagagttaataataggagtcctagtccttttgctttaattcatttcaatatttgaggcctgtgtcacatccctaatatttaaaggtttggtactttgttagttctatggatgattgttctcgagtcacttggttatttttgcttaaggaaaggttcaaagcacctcatgtatttaaccttttttattaagaaataaaaaataagtttggtatttaagttggtattcttcactatgataatgcccttgaatccactggaacactaggggtttgggttcaaggaataagcgaagggtggttaaagattcctaaggttagtgaatccggatgttgtgatgattcaggaaacaaaaaatgagaagtgtgacagaaggtttgtgggtagtgtctggatggtcagaaataaggattgggttgctcttccggcgtgcggggcttcagtgggattttgatcatttgggactcaaaaaaactgcgtagtgaggaggtggtaataggatctttctcggtctcagtcaagttcgctttggacagttgtggacctctttggatatctacagtttatagcccaaacagtccctcacttaggaaggatttttgggtggaactttttgacatttatggtctaacttttccgttatggtgtgtgggcggtgattttaatgtcataaggagaagttcaaaaaaattggggggttctagtctaacttcaagcatgagggactttgatagttttataagagaatgtgaattgcttgatccacctcttcagaacgcatcattcacttggtcaaatttgcaagagtctcccgtgtgtaagagattggatcgttttctttactcaaatgagtgggggtagctctttccccaaggccttcaagaagcccttattagaaggacctcggatcattggccaattgttttggataccaacccattcatgtggggcccaacaccttttaggtttgagaatatgtgtctgcaacatcctagtttcaaggagaactttagaaattggtggagaggttttcaaggaaatggttgggaaggccacaaattcatgaggagattacaatctgttaaagccaaattgaaggagtggaataagttttcttttggagagcttaatgaaaagaaaaaaagtatccccgataatttagctaactttgatgccattgagcaggtagggggtttcacttctgaattgttaaatcaaagaaccttaagaaaaagggagctagaggaattaattttgagagaggaaatccattggagacaaaaagctagggtgaaatgggttaaggaaggggattgtaattctaagttttttcataaactggctaatggcaggcgaaataggaaatatatcaaggtgttggaaaatgaaatgggcttagtgttaaataatgccgagagtatcacagaggagatcttactttactttgaaaagcactacgcgagtcctacaggagagtcttggagcgttgaaggattagattggtcccctatttcgaaagagagcgtgttaaggttggattcccctttcactgaagaagagacttctaaggccatttttcagttggatagggacaaggctccggggcctgatggctttaccattgcagtattccaagattgttgggatgtgattaaggaagatttagtgagagtgtttgcaaaatttcatagaaacggaattatcaatcaaagcactaatgcctccttcattgttctattacccaaaaagagtttgacaaaaaaaatatcagattttagacccattagcttggtcactagtctctacaagataatagccaaagtgctttcagggcgtctaagaggggttctacatgaaaccatccactctaatcaaggcgcttttgttcaagggagataaattttggatgcggttctcatagccaatgagatagtggatgagagaagacgattaggggaggaaggtgttgtcttcaaaattgactttgaaaaggcttacaatcatgtgaggtgggattttttggatcaagtgttggagaagaaggggttcagtcttagatggaggaaatggatgagtggatgtttgtcctcggtatcttatgcagtcttggtgaatggaaacactaaatggtgggttaaggcatttagaggattaagacaaggtgaccctttatccccttttttgtttactttagtcgcagatgtactgagtaggatgctattgagagcagaggaaagaaatatgttggagggtttcagggtgggtagaaacagaactagggtgtcccatttgcaatttgctgatgataccattttcttttctaacactagggaggaagatctgcagactctcaagagtcttttgctagtgtttgggcacatttctgggctcaaggtcaatcttgacaagagtaatatttatgacatcaatcttgatcaggttcatctttcaagattggctgagatgcttgattgcaaggcttctggctggcctatactctatctgggtcttcctttgggagagaaccccaaggcgtgtggtttttgggatccagtgattgagagaatctcaaaaagattagatgggtggcaaaaggcttactaatccttcgggggaaggataactcttatccaattttgccttacccatatgccctattacttcctttccttatttaagttacccacttcaatggctgcaaaaatcgagaggttgcaaagggattttttatggttagggattggggaaggcaaaagagatcatttactgagatgagatgttgtgtaaaccgaagacaataagggggtttgggttttgggaatatttctctgaggaattttgctcttttagggaaatggctgtggaggtaccctagagagggttcaactctatggcattaggtcatattaagcatttatggttcacactctaatggttgggatgctaacattttagtcagatggtcacattgctatccttggaaggctattgcacaagtctttcaggagttttccttgtttactcggtttgtggtaggaaatggggaaagaattcggttatgggaagatttgtggtggggggaccaacctttgggaacccaatatccaagactatttagagtagtcttggataaaaatattcttatttctttagttctcggttctactcgtcctttctcttggaatttaaatttccgtcgtaacctttcaaattctgagatagaggacttagaaggcctcatgcggtcacttgatggattgcatctatctccttcagttctagatgccagattttggccattatcttcttcagggtttttttcagtcaaatctttctttctagtattatctcaattttctggatctcctcaggttttctcttctaagttcgtttggaattctcaagtccctttcaaagtgaggtcctttgtctggttagtagcacacaagaaggtgaatactaatgacatgctacaagtgagaagaccctacaaagcccttagtcctgatatttgtattctgtgcatgaagcatggggaatcaattacctttttcttcattgttccttgacgattgggatgtggcacaaattatttcagttagctaagatggattgggtccccccgaggagcatctttgacatgatgtccatcaaatttaatggttttgattcatctaagaggggaatagttttgtggcaagctgcgagcattgctctaattcgggttgtgtggtggaaaagaaacgcaaggattttttaggataaaacaaggaattcagagtatctttgggactctattgttttccttgcttctctttgggctttttgttcgaaggtttttaaggggactccccttaatgtgttacaacttgattggttagcggtgtgtactccataaggaatggtccattatagagagttagcttgttttacaatgtaatttcctagagtttagttttctttggcgggaggatttctcatccttctttttgtactttttttctatcaatatatctctgtgtcgtttccaataaaaaaaaaaaataatgcccttgaatataatgatcattcccttttctcttttggtgctaaaaataaaattgtctagtaattttcatgtgattatacaccttaatggaatggaattgctataaggaaaaatcattacttgttgaatgatgttcattttattatgtttcatatgagggttccaaaatcttattggggaatgctattttaatgaaatgttatttaataaattgattaccttcctctattgcattagaagactccatattttgtgttatttcctcaccgtcccttattttctcttcctcctagagttttcggatgtgtttgcttttactcataatttttctccgaataaagataaacattgatccatcaaatgtgtatttttaggatattctataactaaaaaaaggctacaaatgctttgatcccatgtcttgtaaatactttattaatgttgatggaacattctttgagactacttatttttctaatcatagtttatagttagaaaattacttattctattcctgttcctgttattatcaatacttttctatctaagactgacaaactattacaagtgtatcaatagagaagactggctaaagatagtgaaatagatcaaactcaatctcttccttctttgaactcgtcaatggaggatccgatgccaccacctatttccgtttcctcaattcctaattagtcaacctctctattgcactcaagaaaggtaaacacaattgtacttgctatcctcttactcattatgtatctttagataatctttcccccattttatggtgtttggttcatgccttgtcttctatttccatccttaagtcttatgaggaagctttaaatcatgttgggtgaaagaaagccatggaagaagagatgtatgctcttctagactaaggtacatggaagctcttcaatttgcttggaggaaaggatgttgtaggcttccattaggcttttagtattgaatatcatccagatagggctacaaaactattaaaggcttagttgctaagggatgtactcaaacttatgatgtggactattttgtgacttcctttcctgttatgtattatgatcttcttagctatcaattttgggtggagtttacatcaattagatgttaagaatgcattcttgtatggtgatttgagttaggaagtctatatggagcaactgcttggtttgttacttggggagttaagagttaaagtttgcaaaataaataagggtatttagggattaaagcaatctccttgagcttgttttgataagttaagtatcatttggttttagaagatgtaattctagccactcaagagagatattgacatagtagtaatcattacatatgttgatgatattattgtctttggtactggtgttataggtattgaagaaatgaaaggttccttaaaaaagacttctcagacaaaagatcttaggttattgcattaattcttaggtagaagttgcacatagtagaggtgagattgtttatcccaaagcaagtatgtattagactttcttaatgaaattgatatgttaggcataaagccaactaacagtcctatagagaaaaatgtgaatcttaatggagattattgctctttgtttttagataaaagatggtatcaaagtttagtaggtaaacttatttatttgacaattactagacttgacaatgcttgtcctattagtgcggtaagttagttcatggaagcaaccaacagattcattaggaatcaatgtgtagaatcctaaggtatctcaaaggtactataggtgtaggaatactctatagaagaaggtccaatttgagctttgatgttgtgagttttttggttgtgaactaggcaagatcctcaattgataggaggttcactagcaagtattatacctttgttagtggtaacatggttacttggaagagtaaaaagaagtgtcaaagattagcaagagctagtattggagcaaaatatagggctatgccacatactatgtgtgagttaatatggattcagaaccttttacaagagattggtttttctcttgaacaacccatgattatgtaatatgataattaggttgctattcacattgctagtaacccgatgtttcatgaaagaaccaagcatattgaggtggattgccattttattagagaaattgtaataagcaagaaagtgataactccttacatcaagtctaaggattagttaggtgatgcgtttactaaagctttagggaggatttttatttttatttatttattttgggttatatattccaagttaggtctttgtaatatatgtaccccaacttaagggggagcgtaaagagttattagtaattatttagtaaggatagtttattttttttcttttttataaaagtttatgctttatactcttttcttaatgaataaaacactttttttttttctttctcttaacaaaatacaaggcaaataacttaattgagagctacaaggctagatttgtagttaaggggtccacacaaatgtatggtattgactaccaagaaatgtttgcctcagctaagatgaatacactctgtgtccttttatctcttgtaactaaccttgaatgacccttgtactaactagatgtgaagaatgcattcttgaatggtgaattggaaaagaaagtgtacatagaattaccactgggctttgagagaattcatgtagatgagaaagtgtgcaaatttaagagatatcttcatggattggagcaatttcctagagcttggtttgacaaatttaccaaggcaattcgaaactatggatgcattcaaagtcaagccaaccatactatgattttgaaacaaatagttggcggcaagattgctatcctaatcatgtatgtggatgatataatcctaattgtcaacaatcttgaagagcttccaagacccataaaggttttggcaaaggagtttgaaatcaaggaccttggaccactcgaatattttcttggcatgaagattgctagatctaaagattgtatttgtgtatctcaaagagagtacactattgatctacttaagaaactagtcttttaggatgcaacctaattgacacctccatagatcaaaattgtcagttagtggcaacaagtattgccaactatgaaacccaaatctctcaatttcgctaaacatacccttgtcgacatgacgtgggcatggatatgggatccttgttgagcattcctatcttactttaggtgtggttgtttgatttttccattgatatctttttattctttcaacttttttagtaacagttacaatatagaaaaagagggattagctgaaaaattaaatttttataagaacatttaggtataagagggaaaagattggagcttttaaaaaggatttcttcacttctattttttttaattgattttttttctttttggttatgccatatcctagttcccatgcctaatttttttggatcctttttagctgaatctcaatatccttatatttgagttgtgaaggataaaatacctagatacatacctgcatccgaaacccatactcaaacccatacatcatggaatgcaataacaacagacaagggtagatgctagaggtttgtaaggaggctgatttacttgtcacatacacaactggatatttcctttgttatgagtgtcgttaaccagttcatacattcccttggtgaggagcatttcgaagtagtgtttcaaatcttgaagtaaagggactcttggtaaaggcataaagttgaattttttttcctatggacatccaccacatgtacaaagatgttggagagagggagataaaagggttgttgttcaaggcttcttgaagccttaatccacctctggctcttcattgatcataacggtgaaattctccatgaaaaactattccatcatccatttacacaatctagaagtaaagtctttcctagttagattatggatataaaaattacaattgaaatgattaagtgctttgttgaaattcacctttaggaatatccttctttgagttgcaatttctcatcaagaatttcattaggaatcaaaattatttctagaattagtctatgcttatcaaagataccttaggtaggagatgtggtctcatggaggaccttgtgaatcaactattggacttctatagtgatcttattcgagctcgccatttggttaataggtctagatatctttgattgcaaacattcttgctttggaataaggacgatgaaggtgaagtagagttctcattaatcagcccttggaatgggactccttaaggactttcagggtatcttctttatggtctcttgataatatgaataaaaggcatggtaaaaccatctaggcccaatgctttccacttattcaatccaaaaactgcccatttaatttagtttcttatataggtctttccaactataatgcctttttctttggtttgtaaatagtccagcccttttgacctaaaccatctacatcaatttcttgggaaagatgggagtcatgggagacgtgtgttttctagggtaatattttcatgtttctttgattcatatcatacattttgtgatttttcttaaaatgttgcttgttcattattcctagaacttgagaattggaaaccatgtatctaaaatggttttgcattttgttttctactttttgctccctactgtaggacttataataatttccttgtaagaactctccattaaaaatgtacctgggtcgagctgtaactttgttattcttaagtaggt

SEQ ID NO: 12090 - DNA, 29893 bp, Vitis vinifera
  Intron number 9 from transcript GSVIVT01000823001 (locus G SVIVG01000823001) derived from phytozome v7.0 (chr-ID chr1 2; pos 643966 to 673858 reverse strand)
gtcaggtaattgcattactttctccttccatcacatttctatgaattttttttcctttttttctttttttctttcctacatgttataggtcctgaatttaagtaacattctgcgtcatttttgagataattgtgcagtactctgcatgatacattttggtgtgtgctttctgttgtagggtgaaggttaggcatggtagcatttatgcacactgacattcatggttataatgtgtacactttcatgtttatgctagtcctggtgcaagtacttcaaatgcttacctaaaaccacttatcttttgttctcatttgtccatgtagatgccttgaggtttagctcaaggagcaagtgattggattgggttgggagtaggaaggttttaggttcaattccaatgccaaaaggggtcatctatcaaaagaaatatactgcttttaaattcactgagctgccctggattataggaaagaatgctcctcaaatgtttaataaaccatgatttggagagttggcatttggttgaatccgcaggaattttggggattgataggattgtgataggatgtcaaactctccttaaataggctgtaatctgtgtacatattttcctttataaaagatattcaatgtaataggaaataagatttttgctcatggtattagagctcttgctctttgggaaataatttatacaaaatcctacaacttttcttgctgatttttttttttttttttttttaagaaatttgattctttgagaaatcccttctagctgtccattattcagtcttacccattatttagccctgtttgaaacatctgaaggtaactctattgctgtgattactgaaaaccaatctgaagaggcacaacaaaactctccaaaagaggagttgcagaatactcaatcatcatatcaattaaatggtagaaaatacttatagtggtcacaagtggtgaagacttttctgaaaggaaaagggaaattaagccatttgatggggattggacctgcttagaatgatcctacatttgtcaaatgtggtgaagatgctgctatgttactaaagcttgaattagactattataaaaaatccttaatgctgagtttgaccaagtctgagtgcaagttttagggaaggaaactctacccttattgcaaggtgttttctcaatatctgagccgaagaaagtcgaagaggtgtcatgcttgaatctcaacccacagaagggtttgtcatggtttccacaaaaacaagtgatgaaggaatcaagaggaatgttgagagacaaggaatcacaactgaaaccgataagaatgaatcaacaaggttgttcaacagtgatggagtatggtgcacctattgtaagaagcttcatcacaccaaagaaacttgttggaaactcacttgactcacttgaatggtggttttaagaatggacagcagagaggacagactcacttgactcatgcagaaggttatccttatgagaattccaatttaagtagctcgaagactggggaattcaataaggaggagatagagaggttgaggaatcttcttaattcccttgaaaaacaaatggattgtgttcatttgcacaatcaggtaagtttcctacttcttatgcccatggtgcctcaaacacactccataatgattcttgggtcatagacttgggagtaattgatcatatgacatattcttcttagtcacttatcacctataatccttgtcctagtaataagaaaaataaaaaatgcagatggctctttcactaccgttgtgggtcaaggaattgttactttattcccctgtcttccgctaaaaaatgttttgcaagttcctaaattgtctgtcaatcttttgtctgttcatcaagttactaaagatttggattgtagatctatccaacctactgtgtttttcaggatcgggttatgggaaggatgattggacatgctaaggaaaatgatagactctatttccttgagacaaagggtggaagtagcaaccaaccttcacattcctatttatctaatgatttttccttgaataaagatgacatttggcttcaacactcctgtcttaagacattcaccatttagtttactcaaagatatgtttcctttacaattcaataacgttgatgttaacaatttacattgtgatatttgtgagttttctaaacatcatcatgtttcctttcctctgagtaatacaagatcatcttctccattttctttgattcactctgatatttggggaccatctaaaattcctaatattttgggtgtagagtagtttgtctcatttattgattgcacaagggtaacatgggcttttctcttgaaacaaaaattcgaagcgagtgaagtttttccaaattttttcaaaacgatcaaaaccaatttggggtatgcattaagagtttaaggagtgataatgtaagggactattttaattaaaccctatcaacttttcttcaaaaagaaggtattattcattattcatcttgtgtagatactctgcaagaaattgcggttgctgaacggaaaaacagacacttacttgatgttacatgagcacttttttttttaaaacacgtgctcctaaatcttattagggagaagccatattgagggcaacatacttgataaatcaaaccttttatgttttcaaattgccataaattgtctagtactaactgcatcattctcccttccttagaagaatcttgtcctcgagtttggtgctgctggaaacatcttttacgttttcaccagtgtaagaacatcagaaactaggatgttagggcgtaaatcgacataaacatctatggagttaaactacaagattggacgaaaatgagggatacccgtggataagggtagatatcaaatactaattggtaagcttatctgcctggcacatgctagacattgaaatcacttccgttgtaagtgtggtaagccaacatatacatgcaacatgtgaagaaaatttcgaggcaatgaatagaatattagggtacttgaagatgattctagtaaagggattgttttttgggaagaaagtagagaagaagattgaagttttcactgatgctaattgggttaggccaatagagataagaggtctacctcgagatattgcacatttgttgagggaaatttggtgacatagtgaagtaaaaagtaaagtgtccaagaatggaaaatgtattaggtgcatagagggaagctctatccctttccttgttctggtttaaataacaacaataagaagatgattcaaaatcagtcgtttgtagtggagagaaaggttttccaggtaaagtctgaaggttttaatgggggaacgtggatttcaataacagagagaagtcgaggttttgtggtttctttaggttttggagaggaggagtcgggttggttattggagcatttgaagaaagctgtggatttggaggcttctaggggtttcattcgaaagatgaggggcaagactaggactcatctgatggagatatgttttaatagcagagggagatatatgaaaatcacagaattcgttgcaaagagaaaacctttggttttagttgttcacgaaggtgttaaaggctatgggtgggaaaatcttaggaaggcgattgtttcagtcgaagatttctttgttcaagctgaaagagtctcgaaggagaagcaaaaaaagcctcaagagagcaaaggaatgtacaaaggtgagtggtcctatgttgatgtggttgcagagaaaggaccttggaatggtgcagagatgccagttggaaaatgggcaagagctgtagtttgtgaaagcaaaggaaaaatatgagactggtgtgatgttggaaaagctatagcgagaagggtgggtatgaaaggaatggtgtctgtaacacccatttctgcttacaaagggtgtttttttgtggattctgcaaggagagctcagtggattcaagatcaagggagcttcacagtgagaggagaggttattgctctgaggagatggtcgccaaaagagaactcagtcgttaatggaaaatttagatggggttggttggaactaagaggccttcctttccatctgtgggatgaggcgcaactgagagacattttgcagaagtgggggagggtaacgaaggtggcgaggaattcgctgaagcttgtagatttgacgaaggtaacattgtgggtggggatgcttccaaatgtcgtgcttccagcgctactagaggtagaagatggagattggacatacacggttgcagttacagtcaccggagaagatgacggagaagactctctcaggcctgagtcaaatcgcagcaaggacaagctgaggtcagcggggctacgagctactgctaggaccaatgagtgccatagctggaggcctcgtcatcgttcccattctcgttcttcagattcaaaatcgtctaagggggagaaaggaaagggaaggtggatgttcggcccaacggcgggaagcaacatcgggccaacaaaaccagacgtgtttaaagcccgctctgattgggcccaatttggggcgaaagattttgggcccctagtgggtccagcccacgaaggttactctaatggtggcctagatgcatcttcgtcttcaaagcttctacgaccaaggttctctgcaaagaaaataatgccgaaagctcatcctcaagagttgtcaaagccaaaaggctcctcagtctccgtaaggcgcatagcaagaagttggccgccgagattagaggaggcgtcttctaccccgaagcgtaacctagaaggaggtggctcatcggaggcaaatcgagacacttttcggggcaaatctcgctccagtaagagcgatctttctcctggttcagaaaaatccaaagtttttactggcgagacagagggagaagaggggatttcgcaatgcaaattggtcaataaggtgcgtcctcctttcttagctgtatccgagcgggatcttcctttggttggggcttttgagccaaaatatcttcccgaatcctctgtttctttggttcatccttctcgttgtcagcctttttcttcgtttccgttggagtcaagctttgccgttcaacgtggttccttttttatctctcctgttgtgaatatcagccatcgtggtggtgcgtcctgttttgaaggtgtggtgtttcccctagaaatctctaaccgaaaatttaaagaccggcctttccttagggaaacactcagtaaccctgaggagcgtggtgtctcaggtgaggcttcacccccagagctagaaccttccaccctcccgttggaaggtttttaggttgagggacttacgcttaggaagatggtcaaggttcagtcggttttggagagtttgaggattagaattgtcaaggataaaggaaaaggtgtggaaggagagaacaagagtgctctctctgcagacaaggtttattccagaagaaagaggaaaaatgactctggaactcgaggagaggattagtactgggtgttggttgtgtcgggttgtttttgttttcatgaaaatcttaagttggaatataagaggattaggatctaggaagaaaaggaggactgtgagaaggtttttaagtactcaaaacccagatgtggtgatgctttaggaaacaaagcgagaaatttgggacaggaggtttgtgagcagtgtttggaaaggcagaagtctggagtgggctgctcttcctgcttgtggggcttcgggggggattgtgattttgtgggattcaattaagttcaagtgtacaaagaaggtgttaggatccttctctgtaactgtaaagttgaactctgatgaggaagggtctttttggttaacctcagtgtatggcccgaataagcctttgtggaggaaggacttttggttggagcttcaagacctgtatggtctgactttcccaaggtggtgcgtaggaggggattttaatgttattaggaggatatctgagaagacgggtgactctaggttaacagtcaacatgaggtgttttgacgagtttataagggagagtggtttgttggatccccctctaaggaatgcggcttttacatggtcaaacatgcaagtggatcctatttgcaagagattggataggtttttgttctcttctgagtgagattcttttttctctcaaagtattcaagaagcccttcctagatggacctctgatcatagcccaatttgtttggaaactaatcctttaaaatggggaccgactccttttaggtttgagaatatgtggttgctccatcctgagtttaaagagaagtttagagattggtggcaagagtgtacggttgaaggttgggaaggtcacaagtttatgaggaaactaaagtttattaaatcaaagttgaaagagtggaatatagtggcctttggagatttaagagagaggaaaaagcacattctttcggacttaggcagaattgatctaattgaacaagaagggaatttaaatcttgatctggtttcggaaaggaccttaagaaggaaggagctagaggatttgttattaaaggaagaggttcaatggagacaaaaatctagggttaagtgaattaaagaaggggactgcaactcttaagttttttcacagagtggccactagaagaagaagcaggaagttcattaagtctctgatttctaagaggggggagactttaagtaacattgaggttatttctgaggagattgtaaatttctttgggaatctctattccaaacctgaaggtgactcttggaggattgaagggattgattgggcccctatttctggagagagtgcagtttggttggatagaccgttttctgaagaggaggttcgaatggcaattttccaattgaataaggaaaagacccctggccctgatgactttactatagcagtttatcaagagtgttgggatgtgataaaagaggatcttatgagggtgtttcttgagttccacactaagggggtaataaatcaaagtacaaatgcgatgttcattgctatggtgcctaagaaaagtcaaacttttaaaatctcagattatagacctattagcttggttacaagtttatataagataattgctaaggtcttatcagggtgtttacgcaaagttctacatgaaacaatctttggctctcaaggagcctttgtggaagggagacaaattttggatgctgtattgatagccaatgaagtggtggatgagaaaagaaggtcaggggaggaaggggtagtcttcaaaattgattttgagaaggcctatgatcatgtggattggggctttttagatcatgtgcttcaaaggaaggggttcagccagaaatggagatcttggatgaggggctgtttgtcttcatctagttttgcaatcctagttaatgggaatgcaaagggttgggttaaagcctctagaggtttgagacagggagaccctctttcttctttcctttttactctagtagcagatgttctaagtaggttgatgattagagcagaggaaactgggataactgagggtttttttgtggggagggataggattagagtgtctttgttacagtttgctgatgataccatctttttctttaaagcctgtatagaacatcttcaaaacctcaagattatccttttggtttttgggcaagtatctagtttaaaaatcaacttagaaaaaaacaccatttcaggtattaacactaggcaggagctgttgtctagtttgacttcggttttggattgcagagtgtcaaagtggcctttgtcttatttaggccttcctttgggagggaacccaaagacaataagcttttgggatccagtggttgagagaatttcgaggaggttggatgggtggaaaaatgtctatttgtctttgggaggaaggattattttaattcagtcttgtctgtctcacatccctagctacttcctctccctctttaaaatcccagtatcaatagcttcaaagattgagaagatgcaaagggattttctttggtctggggcgggggaagggaagaaaggtcaccttatcagatgagaggttgttagtagactaaaggagttgggaggtttgggctttgggaagacttctatgagaaatattgctctcttagggaaatggctttggaggttccatagagaaaggagcggtctttggtataaggttattgcgagtatatatgggacacatcctaatggatgggacgccaacacggtggttagatggtcacatagatgtccttggaaggctattgctcaagttttccaagagttctccccttttgtccgcctagtggtgggcaatggggagagaattcagttctgggaagatctttggtgtggtaaccaaactttgtgctcttaatttgctgatctttacagagttatttctgtgaaaaacctcactgtctcaaatgtccttggcaattccttaccactgtcttggaattttaactttcgccgcaatctaacggattcagaaattgatctccttcaaagataaatgtcctcccttaattctgtgcttttttctccttcttcatcagattcaagagcgtggtctttgtcttcgtcaaacttgttttcagtgaaatcttttttcttggccttgtcaaaagtctcaaatcctttaatgttccttccggccaagtttttatggagctcaaaagtcccttcaaaggttaaggccctcgcttggttagtagcacatgggaaggtaaacactaatgacaagttgcaattgagaagaccctacaaagccctctgtcctcaatggtgcattctttgcaaaggaaatggagagtcgattgaccacctttttcttcattgtcccgttaccattggactttggcacaggttgttcaatctagtagggttggttattacttttaaaggcttcttggggaactcattaagaggcaagacactttggcaaattgtttgccttactttgatttggatggtgtggcaagagagaaacaataggatctttgagaataaagggagaacggaagagatggtatgggatttgatccggttttattcttctttgtgggcttcttgtactgaagcttttagaggagttcctctaaacattctacaactcaattggattggggtttgcatttcaaaagtttgaagattgattgggtttctctttgtttttagagttctattgttgggagttttatcctttgttcaatttgtgtaggaaggacctctcatccttcccttggtttttttctctttctattgtctcttttttctctcctgtatttgttcttatattaatataatcttcttcgtttctgataaaaaaaaaaaagaattagtgttaagactaagtttaggtccatggctcaagggatttgtgaaatgattttgttgaagctattgctaaatgagttgagggtgctcccacatggtcctataaaactttattgtgataataaagctaccatgagtatagctcacaattcggtccctcacaaaagaacaaaatatgcagaaattgatcatcattttgtcaaagaggagataaaagaagagctaatgtgcatcatgtacgttccgacaaagcaataaactatagacatcttaacaaaaggcctatcgagacaaaactttgaggatctaacatacaagctaggaatgttgaacaattttttctcaacttgagggggagtgtagaggatattgtttaggattaagtttgttatgttttgattttttttaatactattttttttttctttaaatttaaaatgtagttgttagtgattaggaagctctatctttatgtagtttcggttcctagtttttagggatttagtttaggcgaggttcgatctggatgctatgtttttctttataaatgtattggttgttcatttcaataaattgagagagctattccatttattttctagtctctatttacaacttctatacaaaatctgatgcaagatcagtaagcttccaagacgtttgttctttagttgtaggttgtgaagaatgagttatggattcttgctattatggagtagtggtagaatggcttaggataattgtgtttttgcattttagttgcttcaaaaaggtggaattgttgggatgttatagaagaaaaataatttaggttgaagggaggtcactcaggacaatgtacaacacatgtaactagaaggaggaaataatagaaagtctaatacaactttgctaactccgtaatttgctatgtactaaaaatgcaacagattataataaatcattaaccaacaaggttctatgaatttggatagtccttggtggggtgcctttgttgggaagaaggcctagaaagttgcgcctttgtacctattttggactttatggaaggagagaaactgaagagcctttgaagattctgaactaacagaccatgcgattcatgtacatgtttttggagtgggttagggtacatatatagtctacttctttgccccttttagatatcatagattggttgggctgtaagtaaagtgagggtgttgttttttgtccataccttcttttgttggctttgtatacatcatgtacactttaggcacttttaatacaatttctttacttatcaaaaaatagcccttgggacaatcagatttctttaattctaatacttcctcttaagctgtgcaaagatgttatgcattcctagcttgttgaccatagagtcgagcattgtgtttaagattcttttgcaaaaatatttgtaatttgctacttgattgtcacaaaaaaggtggaaattgtccattctttatttttccttgatgaagtgtctatccacctttacatgtttggtgtgatcatattgaactaggtcatgtgcaatgttgaatgttgccttattattacaataaatcttcatagcctctttaagcttcgatttaaaccccttgagtagaagtttaatctgtgaaacttcacatatttattggcccattgcccataatccaaccttagcactaaattatgctacaatcagggttcttactcctccatgtatcaagattgtcttctacttggaggtggtcattcttagaaaacaaaagtccttttctaggagtagcatttaaatatcttaaaattctttgaacttccttctatgtgtcattcccttctatgtggcattccaatggtgaatgcataaactggtgatttcaaaggtgcacatcatgaggtgcctaaaaatgcactgaggctcaaaatgaaaaatgtgaagccccaaagatgtatgccttagggatcaagtcttggatgaggcacaccttaagtgcatttttccttcttgtttccttgatgtctagtatttatctagctactagggtgattaaaaacaatggttagagcattggacaccacattttgattcgaatcagcaagatttagttgacatggggagtaggacaaatcttctagatcacttgttttctattcttgaagacagttgtaataataataataataataataataataataataatttggtgaaagtaatgtacctttaactaacctattccaatgtttcaagatctcgacctcctataaggtttggagaaagcattaattatatgtaatttggtgaaagtaatgaaaggttcaggttgaatcctcaaggtctgaaagggaatttaaaaggttggagtgttccgttaattttaaaagtttaggaaatggaagagctatttttcgagagagtgggggttcagtctctgtgggtaaatgaagttaagaattctctcctggaatgtgagaggggcaaatgatagcgataaaagaaggctcattaaatctctaatcaaggctcaaaaggtggatttggtttgcctgcaagaaaccaaaatccaaagtatgtcgtgtagtttggttcgatcgttgggggtgggcaggttcttggagtggggcgctcttgattctcggggtatggcaggggggggtgttagttttttgggataatagggttttagagctgattgaaatggaaattggtaatttttcagtttcctgttggtttaagaatgaagaggatgacttctgttaggtctttacaggggtgtatggccctgctgttgggaggtttaaggaagatttttgggaggagttggggacaatcaggggattgtggcaggattcgtggtgcatagggggtgattttaatgttattagattcatgggagagaggaacagtatttcaagactgtctttagcaatgagaagattctcggagatcatggaggatttggaattaagggacctccctttgcagggggggtctttcacgtggaggggtgagttgaataaccaagttcagtcaaggttggatagatttatagtttcagaggaatgagagtgttattttagtggggcagttcaaagtcttttacccagacttgtttctgaccactgcccaattttgttggactgtggaggagcaaagaagggcctttcccccttcaggtttgagaatatgtggctaaaggaagaaggctttaaggatttgttaaggagttggtggatgggcttccaatccagagggacttttagtttcactttgtctgaaaaactgaaagcgcttaaggccagcttgaagatttggaacagagaagtgtttggtaatgtcactgccagaaaagattcagctttaaaggagatgatgttttgggattcaatagaaagggatagggtgttgtatgccgaagagcaaaatctcaaaaagcaggctttagaggagtataagaagttggtgataatggaagagacttcttggaggcaaaagtctagagagttatggctgagggagggtgatagaaatactggttatttccataaaatggccaatgcacataagagggtcaattccctggtgaagattaagataaatgggtcatgggtaacagaagaacgtgacattaaggatggtttggttcaggctttccattctctgttgtcagaaacagatgagtggaggctcaaatgcaatgggctgcaggttgaggttttggaaagggaagttgcagcaatgttaagaggctcctttttctgaggaagaagtgtttggtgctctctcggacctcaacggggataaagcttctggttttgatggtttcacaatggcgttttggcaatttagttggagttttctgaaggaggaagttatggggttctttaaggactttcatgatcagggcaagtttgtcaagagcattaatgcttcttttctggttttaattcctaagaaaggaagagctgaagatctcaaggactttaagcctataagcttggtgggcagtctttataagttgttagcaaaggtgctagctaataggcttaaaaaagtgatgggtaagatggtgtccaagtcccaaaatgcatttgtgaagggaagacaaatcctggatgcctcgctaattgcgaatgaggcgattcattcgatgcagaaaagtaggggaggtggcatcctttgtaagctggatattgagaaggcatacgaccatataaattggagttttcttctttggttgatggaaatgatgggttttggagctaagtggattagctagattcaatggtgtattggtattgttagtttctccgttcttattaatggaactctcttaggattttcccaaagttctcggggattgagacagtgggatcctttatccccctacctgttcgtgattgtcatggaggctctcagttgtttgtttaagagagcgaaggagggggggtttttgctagggggggtttttgctagggtggcagcttagtgatagaggaggtgcaggagtggagatcactcatttgctgtttgcggatgactctttagtattttgtgagccttccattgatcaggtgtcctacttgagttggctccttatgtggttcgaagccatgtcagggttgaaggtgaatttggacaaaagtgagatcatcgcggtgggaagagtggagaatgtagaggagttggcccttgagtttggttgcaaggttagcaagctcccatcttcttatttgggacttcctttgggtgctcattagaagaaggtggcaatttgggacgggttgaggaaaggctaaggaagaggctttccttttggaaaagacagtatatctccaaaggaggcagaatgaccttaatcaagagcactctgtccagtatgcctatctactgtatgtccctgtttcatatgccaaggagcatgagtttgagattggagcagatccaaagggactttctttggggtggtgggaccctagagaggaagccccatttagtggaatggtctattgtttgctcaaataaacgaaagggtggtttgggtgtgaggaacttggcgttgctgaataaggcactcctatgtaagtggagttggcgttttgcgatggaaagcgaagctttgtggaggcaagttatatgtataaagtatggggaagaagagggtggttggaggtcccgtgttgtgagtggtagttttggggttggtttgtggaaagcgattaggagaggttgggatgtgttaggcgacaatttggtttattctatgggaaatggtaggagggttagattttggaaggacaagtggtgtggagatgattctttgtgtacttcttttccctctttatttgctatttcatcggctaaggaggcttgggtggcggatgtgtggagccattttggagggggagtgtaggttctcaaggcggcttaacgattgggaagtgttcgatgtggagcgttttctattaaggttgcaagggaggagggtttgtagtgatgtggaagatcaagtaatttggactaaggcaaaggaaggaagattttctattaagtctttacaaggagttggaactagaaagactaagggattttcctgcaagagttatttggaattcattggtgcttccgagggtgagtttttttgcttggaaggctacgtggaaaaaggccttaaccttggatcgtattcagaaaagagggttctccttggctaacagatgttacttgtgtctggctgaggaagagtctattgatcacatcctcttgcattgtgggctggccagaagtttatggagcttacttttttccctctttggggtttcgtgggtgctcccctcttcggttagagagacgttattgggatggtttgggccttgtgtgggaaaggaaaggaagaaagtgtgatttttagctcccttgtgccttttttggattgtttggaaggaaagaaacagtagggcgtttgaaaacgaggagcattcaattcatgggtgtaaatcgtttttcctttgtaatctgtgggcctagactagggggttatttggctcttgtcccccttccgttgtagattttgtagattggttaggccctggttaagggttctcttctctctcctttgtattctacctttgtatactacctgtatactttggggtgcttctttgatgtgcctcttttcttttaatatatttttctttattcataaaaaaaaaaaaattatatgtaatttggtgaaaagtaatgaacctttaactaacctattccaatgttttaggatctcgacctcttgtaaggttttgagaaaaacattaattatacatgtaacatatagtagcagttttggtgaaagtaatgaacctttaactaacctattccaatgctttaggatatcgacttctaggactttgatttagtccaacgatgacctccactccagggagtggaccccacaaccatagtgaaaaaaatatagtagggtttcaaagaatttgacatccatggttaagtattttttttgctggtaggaaggatccagacatttgaacagttttttagtaagaaacctaggaaatagcacctaagagctctaggatcaagtttagatcattctctacttaggagctgaataaaggctaaacatccaaagactctaaggggaagagatttgaataagttagatattgggagacagtttttaggacttgaattggagttttcagtagggtcttcaaaggcgtatggtttatttaataggctatagttaagacaagataaccctagcaaatctttgggatattgtgagtaaatcttaacgctctaggaacttcttagaaatgcctatttttcctctcaatcactgcatattgttggagtgtatctatgcgtgaagaatgatgtataatcccattttcaagaaactaagacttcaagatattattaaagtattgtcactaattatctgactgaaatgctcgagtgtttgtgtgacagtgatgttgaatcattttgtgaaaagatttaaaaattgaggcaacttcaaacttttctttgaggggataaaaccaagttggtgcaagtagaatcatcaatgaagcttatgaatcatttaaagcaagaataagaggttacttgtgatggaccctgcacatcactgtggaaaatggaaaaaggaatttctaatttttcattactcagattgaaaagagaaaatgacgacttttgggtagctcatcacatagcaattttgaaacagttgaagaatagggtttcacgggaataattttctttcattgagattattcttttatagagtttacagcatatacaaatccttcaaattaggaaactaaatcaccgattaaaaggaaagaataactcctaacaattactttcctaaaaatacaaagattgacaactaataaataatttacagctttacaaagttatttctttccatatcagtttcggttttccaacactccccctcaagctggcttaaagatatcttccatagccagcttgccaactagaaaatcgaattacctcttgtgtagtcctttggtgaagacaccaaccacttgttcctcggtagggatataggtcatacagaccaatccgttgtctatcttctctttaatgaaatgcttgtccacttccacatgtttggtgcggtcacggagaatcggattgtgagctactgaaattgctgccttgttgtcacaatacaacttcataggagatgaacctgtcatctttaactcttccagtaatcttcttatccacataatctcacaaataccatgagctacagctttaaactcagcctcagcactacttctagtaaccacgttctgttttttacttcgccatgtaaccaagttgccacctacaaatgaacagtacccagaggtggaccttcgatccactatgcttccagcccagtctgtatcggtgtaggtttcaatttgtaggtgtcctcgtgacttgaacagaagacctctacctggtgtcccctttagataccttagaatcctgtaaacaacttcaaaatgctctggtccaggcgcatgcataaactaactaaccatactcactgagaatgctatgtcagggcgtgtatgggataggtaaatcaatctcccaacaagtctctgataacgatcccgatccttcacattcttggcttttgtaggctgcagttttacattcggctctataggtgtttcaacaagcttacatcctaacatacctgtctcatcaagaagatcaagaacatacttccgttgatttacaaagataccttctttggacctagcaaactccatcccaagaaagtattttaatgcccccaggtccttaatctcaaattcctcagcaagtttccccttcagcttctctagttcattgcaatcatcctcagttgacacaatatcgtcaacacacaattaagatggctactttacctttatttgaatgtttgtagaacatcgtgtgatcagcttgactttgagtatatccataatgctttattactttgccaaagcgctcaaaccaagctctaggctactgcttaagttcgtataaggacttcttcaatttgcacactttcccaactccaaaactttcttcaaaacctggtggaggactcatgaacacttcctcctctaggtctccattaagaaaggcatttttaacatctaattggtgtaagggccaattggaacttactgcaagggacaacaaaactctaatcgagtttattttagctacgggggtaaaagtctcttggtagtctatcccataggtttgagtaaaaccctttgccacaagtctaactttgtatctctcaacacttccatctgctttactctttattgtaaacacccatttgcaccctacaacttttttttcccttggtaaatctacaacctcccaagtgccattcttttttaaggcattcatttcctcaaacactgccaatttccaactcggttcatctagtgcttcttgaatatttctaagtaccacaagttttgaaatatttgtagtgaatgctctatagttgtcaaaaaggttactataggggatatatttggcaatggaatgtttagtgcaggctcgagttccctttctaagagcaatagggagatcaaggtcaaggtcctgtgcaggaacaattggggctaatcctaaaccgggttcgggtgcaaatatttctggacttggaccaaagtgtgatggtaaacttagatcagtaacaaaagaagaagaagcatgtagagtaagaatagaaggagggttacttgagacatttagagagccattgcccagggctttcggttgaccatgtgctgggatgatcgactggtctttacttcttccagggacttttttccttgaataaaccacaggttcaagattgtttcaatttttttttattcgtaatatttcttcttctgacagaccaatttcaaatttggatttagtaggcttagtttccttattttctttttcaagagagatatcaagaattacactaggctaaggttcaacaatttcccaaaaatttggttctactaatttctccccctgaagtaaatttttggtaaaatatgggacattttccacaaaggaaacatccatagttgtgtaaaaacattttgtaaggggattaaaacatttgtaaccctttttattaggagtatatcctacaaaaacacatttttctgctcttgggtctaacttagatcttgacctttttgaaatgtgtacatatgtagtgcaaccaaatattttcaagggtaattcagaattaattcgagattctggaaatacctttttcaagcattccaaaggagtggtatactgcaaaatttttgtaggcatcctgttgattagatatgaagcagttagtatggcatccccccataagtattttggaatattcatgtaaaaggattgatgtaaaattcctttcttgttttaaaaggtttccaaaactttattaaagtactcagtcctattatcatatctcaaaatattgatttttgtttgaaattggttttcaatcattctgtaaaattctttaaaaatcctttcgacttcagatttttccgtcattaaatatacccaacaaagacgtgtatggtcgtctataaaggtcacaaaccattttttttcctgaaattgtggttacttttaaaggtccccaaacatcactgtgaaaaagataaaatggttttgatgcatagtagggttttggaatgtaagtttttcgttggctctttgccaataaacaactttcacattaaaatgataaaggatcaaccttttgaaataacactgaaaataaatgttttaaataagagaaactaggatgacctaatctgcaatgccaaactattatttgatcacaaacagaaagagaactaatactacttagtccttgagcaattttattactaggtaaattatcctcaaaataatagagaacattgatcatcctagcactgtcaatcgtcttccccgacctctggtcttgaaaaatacaatgggattcatagaagataacacaacaattagaatctctagataatttgctaacagacgagattacaagtaagtttaggaacatggagaacagacttaagatctattccctcagagatttttattagaccttttcctgcaataggtgagaaattaccatcagctatccgaacctttttatttccaggacacggtgaataggattcaaacatgtttgaggaattggtcatgtggtcgaatgctccagaatcgattatccatggagtagatttaaaacgacaagatagagcatataattcattacctgtgtgtgccaaagaaacactagaagtaccggatgtcaagttggatttcaacagtgcaagaagatgctccatttgctcagtggtgaaggggctggtctcagcctcattagcagtaggaataatggctcggcctgatttgtcacctatttttcctttccaatttgcaggtttcccatggattttccaacagttcccacgagtatggcgaggtttgttgcaaaaattacaccaaacccgtggtctttcatctgatttacgctgaaatgcaacaactttattatagcctccacccgtggtaaccaaggctgaaccttcaatagcaactccaggtcccttcttgcccaacatcacattcctccgactctcttctcttctaacttctgaaaaaacttcaccaattgaaggcaggggttgtcttccaatgattctcccccttacctcatcaaactcgacattaaggccagccaagaacttgaagatccgattgtcttccatggtcttcttatgatgaagtccatcctcggtagatttccactcataggtgttgaagaggtcaaggtcttgccagatccgcttcaaggagttgaagtactttgtgacgttgtcctccccttgtcgtatctcaccaagtttgagggttaattcaaagatctgtgattgattccctaaatcagaatagatttgatttacattctcccaaagctcgtgttgttggatagcacatgtaattaaagctaaatgtcttcttccatggaattcacaagccatgtcatcaccatggaattctcagcatcccatatagcatagtttggatcatccactgcaggagccttcttttcacctgtcaggtagcccatctttccacatcctctgatgtacatccgaattgattgagaccatctcagaaagttgtcaccattcaagcgaatcgtggtgatttggacagagtgagattccgaggtggtaggactgatttttgaagaatcggtgatgatgggattgttcagagaaggttgaggaacaggagtggattcgtttgaaatatccgacatggtttcagagaacaaggactgaaagagaggaagaaggaggatttcgacaagcaaattgctagctctgataccaagttgaagaatagggtttcacgggaatcattttctttcattgagattattcttttatagagtttacaacatatacaaatccttcaaattaggaaactaaatcactgattaaaaggaaagaataactcctaacaattactttcctaaaaaatacaaagattgacaactgataaataatttacaactttacaaagttatttctttccatatcagtttcgattttccaacaaaaatagtacatgtgtttgtgtggaatcataggctttccttttattacaagaataagattttttttttttttttataagttagaaagataggagtttagcaaagaagtaaactactgacactaattccaataaaataacagaagtgtatgtaggattatcgcttgcttgtccaactcattccagcaattcagaaattaccgaactacctctctgaaataaacataaggaatctttactaaaagcaaaatagttttctgacttgaacaaaattgtgctaagattcaatttgacttaatttaaccgtgtaatgttccaagtggaacttaaaagatcatcccaaactgctcatcaccatggaattcacaagccatgtcatcaccatggaattctcagcatcccatatagcatagttcggatcatccactgcaggagccttcttttcacctgtcaggtagcccatctttccacgtcctctgatgtacatccgaactgattgagaccatctcagaaagttgtcaccattcaagcgaatcgtggtgatttggacagagtgagattccgaggtggtaggactgatttttgaagaatcggtgatgatgggattgttcagagaaggttgaggaacagtagtggattcgtttgaaatatccgacatggtttcagagaacaaggattgaaagagaggaagaaggaggatttcgacaagcaaattgctagctctgataccaagttgaagaatagggtttcacgggaatcattttctttcattgagattattcttttatagagtttacagcatatacaaatccttcaaattaggaaactaaatcactgattaaaaggaaagaataactcctaacaattactttcctaaaaatacaaagattgacaactaataaatagtttacaactttacaaagttatttctttccatatcagtttcggttttccaacaaaaatagtacatgtgtttgtgtggaatcataggctttccttttattgcaagaataagattttttttttatatatataagttagaaagataggagtttagcaaagaagtaaactactaatactaattccaataaaataacagaagtgtatgtaggattatcgcttgcttgtccaactcattctagcaatttagaaattaccgaactacctctctgaaataaacataaggaatctttactaaaagcaaaatagttttctgacttgaacaaaattgtgctaagattcaatttgacttaatttaaccgtgtaatgttctaagtggaacttaaaagatcatcccaaactgctcaaagcttgggctggcttgacttaagccaacccaagttgaagtcctagcttttatagtagtttatagtgttagaaaaaattgggctaatccaacctatggtaatcaccctagagggagggtgatggtttctttttgcaaatttaaattatgtgaatgaaagagataattatatgcaaatatataataacacaatatgaagacaattgcatataaagtaaaaaagtagggaagagagaatgcaaacacaagatttttatagtggttcggcgaaactcagcctacgtccactctcctctagcttcaatcccaagcttgaggttccactaattcaaggcttccaaaccaagccttcaagtaatacaattggattatggttccaatccaccttcttggacttttggctccaagcgccctttacaaacctaaagaaataccttactcttgaataacccctcaaatgataccccacacttgagaatccctaagtgatgcctcacatttagattcttcctctcaaagatttacaaatgaagatagtaaatgatctcacaaaatcctagtacaaaactttaaggctcaaatgatacaagaaaattatgattgaatggtgtactaatgatatgcaagttttagaacaattgtgcactaaaaaacactctcccaaggctcaaatatattcaagaaaggtttaggaaggttaagctttagaaacaatgaagattaaagcatttttataaaggaaaacgaccaaactacctgttgggggtttgaccggtcgagtttggggtcgaccgattgactagccgttagcatttaatgcttgacaagtgaacgttggacctcaaccgtcccttgatcggatctcgaccgtcccttgattggttgaacaagcgttctggaagaaagagaaagtttttgtacctttagaccgcttgagctgggggtcgaccggttcctcatccagttcaaccggttgagtcgtttttgtctcaacaatcatcattttcaacttaaaacctttttaacaaatttggaaaacatttgacactagattttagttgaaaacatgaaatcatctaattttaaaggatttaaaacaaaattacttgttgaaagagagagagaaaggagaaaaaccttattttcattcatctatttttacttacaattgagagatatatatatatacaaggctaggagtcctaactaccatacatatgacctatattaataaggaaagatagtatactatacatacattatattcaacactccccctcaagctggagcatatacgtcatatgcaccaagcttgttacaaatatatttaatcctaggacctctgagagatttagtgaagatgtctgctagttgatcatttgaattgacaaaacttgtagcaacacatcctgatgcgatcttctctctaatgaaatgacagtcaacttcaatatgcttggtcctttcatgaaagactggattggatgcaatatgtaatgcggcctggttatcacagatgagtttcatctgttcatcctttccaaatcgcaactcctgaagaagatgtctcaaccatatgagttcacatgttgccaaagccatagctcgatactcggcttcagcgctagatctggccactacatcttgtttcttactcttccaagatattagattacctccaataaaaacacagtaccctgaagtggaacgtctatctgtgggtgagccagcccaatctgcatctgtgtaaccaacaacttgagtatgacctctgttctcgtacaatacaccttggcctggtgtacttttgatatatcgaagaatacggattacggcatcccaatggctatcacatggtgactgtaggaattgactaacaacactcacaggaaaagaaatgtctggacgagtaatggtgagatagttcaatttacctacgagtcgtcgatatctcccggggtctcctaaaggctccccctgtcctggtacaagtttgacattcggatccataggtgtgtctaccggtttacagtctaacataccggtttcttccaggatgtctaaagcatacttcctttgggaaaggaccacaccagaactagattgagctatctcaattcccaagaaatacttgagtttccccaagtctttggtctgaaagtgggtaaaaagatgttgctttagtttctgtataccatcctgatcactgcctgtaatgacgatgtcgtccacataaacaaccagataaatacactgccccaaggagttatgatgataaaaaactgaatggtctgctgtactgcgaagcatgccaaactcttgaacaacagaactaaaacggctaaaccatgctcgaggagattgtttcaagccatatagagaacggcgtaacctgcacactaaaccagactccccctgagcaacaaaaccaggaggttgctccatataaacttcctcggcaagatcaccatgaaggaaggcatttttaatatccaactgataaagaggccaagaacacatagcagccatggagagaagcaagcggacagaagcaatcttggcaacaggggagaatgtgtcaccataatcagaaccataaacttgagtatagcctttagcaactaagcgggccttaaggcgatcaacctgaccatcaggaccaaccttaactgcatagacccaacgacaaccaactgtagatttaccagggggtaaaacaacaagatcccaagtgccattagagtgcagagcagccatttcatccaccattgcctgtcgccagcctggatgggaaagagcttcatgggtgctcttgggaagagaaacagaggatatagcagaaacaaaagcagaatagggtgaagataatcgatgataactcaaaaaattgtaaataggatgaggattacgagtagagcgagtacctttccgaacagcaatgggtaagtcattaggagaaggcagagccggggcaggtgaagccgaagggataggaagtgagtcagcaggtgcctcaggaaaagggagaggagcaacgacacgaggacgacgatgataaacctgaagtggtcgagggggcatagcttcaggtggggagacaatgggaatgggcaagacttcagaaacaggaagagactcagaagtggtggaaaagaagggtgagtcctcaaaaaaggtgacatcagcggagataaagtaccgatgagtctcaagggaataacaacgataacccttctgaagtctggaatatcccaagaagaggcacttcatggctttggcggaaagcttgtcctgtccaggagtgagaatatgaacaaagcaagtacaaccaaagacacgaggaggaaggaaataaagtggttggtcagggaaaagaagggagtgaggaatctgatcatgtaagacagaggagggcatacgattaatcaaataacaagcggtaagaacagcgtccccccaaaagcgaaaaggaacgtgactatggaggaggagagtacgagctgtctcaacaagatgtcgattcttgcgttcagctaccccattttgttgaggagtatgagcacaagaagactgatgaagaatcccatgatgagacataaacgaagtaaattgggctgaaaaatattccctggcattgtcactgcgtaacacacgaatagaaatattgaactgggtttggatttcagtataaaatttctggaaaattgagaataactcagctcgatttttcattaaaaataaccaagtacatcgagaatagtcatcaatgaaagtgacaaaatactgaaatcctaaagtagacgcagtccgacaaggaccccaaacatcagtgtgaacaagctcaaaaggagactttgcccgattattcaaacgctttgggaacgagacacgagtatgtttcccaagctgacatgactcacacggaagcgacgacaaagtggaaaaacgaggaaccatcttctggaacttggagagactagggtggcccagacgattgtgaatgaggagaggagcatcagtggaaatgcaaactgcaggagatgaatctgaggtgaggtgatagaggccttgagactcacgtcctatgccaatcgtcttccccgtactccggtccttcaaggtcacaaatttatcagaaaatgtaatagagcaattaagagtacgagtgattttgctgatggaaataagattaaaaggacattcaggagtataaaggacagaagtgagaggtagagaaggcagaggaagggccaaaccaatacctttagccacagtttgagaaccattagctaaggtaacagtaggtaaatcagaggtagtagtaatagaggagaaaagatccttattaccagataggtgatcagatgctccagaatctagaatccagggtccaagagaagatgtgtgggtaaggcaggcagaggcattaccaggctgggcaacagaggcaatagaagcctgagatgtctgagatgcggaggagctcggaggctgaggcaacagagaatcagaggactgggccatatgggcagtgcgaggaggtcttccatgtaactgatagcaacgatcgcgagtgtggccaagtttattgcaataggtgcattgaggacgttggcctctacctcgggtaccactgcgtcctcctcgagaggtagtttgagaaactaacacagaagaatctgaagcgctatcagatgtcaaagtctgagtggacgagatacgcaggaggcgagcaaacacatcatccaaggacggaactgatgaactgccaagaatctgatcacgaataggctcaagatccggacggaggccaataagagtaagaaccatgaagaacttgtcaagttgtgtttgttgagccccaacatcaggagtaagaggcatcacagtcaggaactgctccttaagagaggcaatctgaccaatataagtagataggtccaagtcctgttggctgagatggacaatagcagaagccaccttataaagacgctggatatcattcgtgtataatcctttggcctgagtccaaaacttaaaacaagttttataggcctgaagatgaagaagaatccggggatcaaccgattgccataatacactacataactgtgcatctatcttccgccactgtacgcggtcaacctcagggatatctgcctcctgggtaaccaagtgatcctcatatccttgacccataaaccaaagttcaacagaagcagaccaggagagataattctcactgccaaccaatttctctgaggtaatcataggagatccagagataacagaggtaaagatctgatttttggtggtcatattcacgtatttggatcgaagagagccctaagatgggttcagatttcggcggagagagaaaaaaagtgaaaccacggctgtgagaggtgcaatcaatggagaaaaggttcgtgacgtgcctggagaggaagagaagcagcacccaagcctcggagatggagggggagccctgtcggaggtggccggaatggcaagaaagccaaaaacagggaaaaaaatggagatgcagggctcggggaggactgccggggggctagaaggccaagacggcgccggacgagcctggagaggtgtcggaagtggccggaatatgcctcacgcgcccccacgcgccggcgcgtgagatgcagccgccgaccgaaaatcgcgcgtggacggcgcgtggctcctcttttggtgctggtgtcttcacaaaaggtggagatctcctccaggcgctccttctggtatggtcggtgtcggaaaaatagttcgccggaaagttcgccggaaagttcgccggaaaatttcgccggcggtgagtggtttctagcgacgatccgactgaccggaaagtattgggagatgggaaaggtgaccggaaagaaacacggtgaccggaaagaaacacggtcaccggaaggtttcccggagttgatgacacggaaaaacaggaaagaattaggttttcttccttggctctgataccatgttgaaagagagagagaaaggagaaaaaccttattttcattcatctatttttacttacaattgagagatatatatatatacaaggctaggagtcctaactaccatacatatgacctatattaataaggaaagatagtatactatacatacattatattcaacattacttttgaatgattttggtgcataaattaataatgtaatgcatgaaatacctaatgcaccaacaaccaaccttacaaagagatcctataaagcttaggtcttgaaaagaacttctctttgaggtcttcttcttcttattgatttctctttgtcttgattttgtctttgtgattgctactttggaaatcttcttgcctaatcacacttgaaatataatcattagtttcaaaccttgttttgttatcatcaaaaccgagattaaccgaactttggtttcacatatagtttgttgtaatgaatacacccattagtgaccatgtgtttatgccgtcccattggataaactgttattcattaaaaggataactattctacatattaaatgcaatctactacattgcaagttgcaatcataattgatttatgctttcttgttcttgtaaaagcttgaaagatcagttctcaaattaattttccaatcctgcctgaagattttttgatgcccatttatagctctgccttatattcctggagaggaaatctggatgcttaaaagtgttttgtaatatctttctccatttaagcattatgtctagaatgtgtagtaaatcagtttttttgccttgtattggcacctaggcatcttgcatccactgatttctgatacagtgacatggacgttccatattgtttacttaatttaatctcttttagctctgtctttatgttccaaactatttttattgccttttcttttttctgtttgctattttggaatttggagggacttacacccatcttgatatgcttgcagttct

SEQ ID NO: 12091 - DNA, 6463 bp, Vitis vinifera
  Intron number 1 from transcript GSVIVT01012735001 (locus G SVIVG01012735001) derived from phytozome v7.0 (chr-ID chr1 0; pos 1102381 to 1108843 reverse strand)
aaagaacaagaataaagaagaaagtgtgtacatgaaaattgaaaaaaaaaatgatctaattgtactgtacagatgataattaattaagcccaaaaaatgtaaccacatctttcatccaagagacatatgaacttgatcagttcacctccgggatactctgcagtgccggcctccaagatctctgccgctgcttatcggccgaccgatcattgtcagtaccgttgatcatcagctgagccagtacatgttccaaggtcaccccctgcatgtccactctggccagcaactcctcaagctccttctttgtgatcttgatcttcacctctctaccagacggagaccttggcaaagagccttccatctccgctagcagcctactcttctcctccatgtctgaagcagccccacctccaccaaacacttccttatcatcatcctggttggccagctccattggccccaagtcatcaccggcccacaccatggacgaatctcgcctaaaacagttacccatttctagttttttttattttttttcttgttctgcaaagagagagctgagaaatggggagggttgtgggttatatagtggaagaaggaggtggagtttgacatggttccaggaagccaaggcttattagactgcatgtgggtgtcgggatgtgggatctggcttcatcttagaggttggtttgttgaccaaatcaccgccagcttccgtgtaggaccatcaccatgaacatgaacgtagcttgatgtcaacgcatacggcttgatcagctgtggttggttaatttcagtgggcaatgccattaaacttccacgtttagccccgtccaatgctctaatagttaatttgaaatttgaactctaaaattcctttttcatggatctcatatcatttcacactcactccaacaagaaattgtgaaaattgtggatgaaaacaaaaatcataaactattattttaaaaaacgttttcaaaaaatagtttttcaaaattattttctgaaacttaaaatctataaaaaatttaacatgttttttatgttttcaaaataaattttatctagtactttatttttaatcttttttcatatttatatttttattaaaaaaaatcctaaaaaacacaaataaaaaaaactaaaaataataaaagatgttatctaaaaacatcatattttttgtttaagaacaaaaaaatattttctattttataattatcaaacatatattttatttttttattttaaaaaataaaaaattgtttttgaaaacagttgtcaaacttataatcctctcaacattatggtaactttttaccttgttatatatgttattaagctgaagggcatggaggctaatggcttaattagggtttggagccagctgcatgggcaaggaggctaatggctttagggtttggagccagctgcagcctgcagcaagaggaaaacgtcaaccaattcaaccaaacggcataataatctatttggggagttgggggtgggaaaagggttgatggtggaatctagggatgagacaaggaggtgtgaacatggctcaccaaacgaatcttatgaccttctagggtttttacttgttcctctgatgcctttctcattgaatctttcatactagcttgttttgtttatttcctttgcccaatcaaatttctatctccattaattgtaagggtccaacactcaccaaattttcccatatttcatttacttagattccttttgaatctttctccatcttttagtctcatcataaatggttattttgtggaagcattaagaattaaagaattagtataatatttcataccataattttttcaaatatattgcataatttgtcacccgtgtataaaaaaccaatacacataaccattttttttttcacaataatttttgtatatggcatatagtataggctctctcgagaaggaaccaataatcaataaatgcaatatatacatccgatatacctcctccccctctcagtcccattgttataaatatatctttatattgtatcttgatcttattactttatatcatgatttcattctttatatacctcctcccctctcggtcccattgttataaatatatctttatattgtatcttgatcttattactttatttcatgatttcatttttttcgtactttggtctatatttatattatgatcttgtatatttatacaatcatttaataactcaaatttcatcgctcaaatttaaaattcaatatcatattgaattggtaccatacatttttcctatataataaatactttgttgttaccaactaaattatatttcaatctaaatgaatcttataagattcaaattgcgtaagtagtcaatggagttgagtaaatggcatgaaagcttctcaacctagtcaaagacaagcttgacacataacttcaaattttatcaatatattccatttcatgatttgcttgttgtgaccaagtaatagtttatgatttttcttcaccttacgaacaccttcctaggccatgccactagttttcatgtccaaaatttgtacgggtaaggcttttgaattattctttggagtagaaaaacattagcttatatttttcttaattgaattggctaatgaatattgctactataatatgttttagtcaaagaaattcaaggatatggatcacaaatgattgacaagtgccctggtttaagataagcacccattgaatatttgaagttgtagtttagtatgagttttagtttgaattgtaatttttctttcctcgtgatttttttctcgtcgttgttattatttaagttcatttgaaaaaataaaattaaaagaaaatttgaggatgattttgggtgtagctttcaaatatttttttattgttcttgaaaataaaattttaaaacatttttttctaatttaggtggtgtttgtttttttaactttttgctgaaagcaatttagttttagaatttaggttgtttgtttttttattttttcatgacttattataaactttttactaaatagaaaaagccaaaatatataactttttctaaatagaaaaaataacatgttgattttttttactttttaatacttaatagaaataaaatactataaaaacgaacaacctaatatttaacactattaagcattaaggttctatttagaattaagtaaaaaaacaaacaccaccttcctgatggctttgtacacttttgtatggtataaaactttttgacgtgttatttttctaatttttttttaagaattccctccgaaaaaatacctaaaaacgcatcaaatatgttctaaaaaatcacttgcatcattcattttttaattttaatatttatttttattctaaacacaaaactgtgttttaataaaatgatttttcaaataaaacctaatttttaatgatcatatatataatcaattggactcattggcacgtaaagagggataaatccatgatggttgatggtgggtgagtttcttgctcaatggtgggccgcaagaagcccatggcagcccggtttttcttccagccaatgggcgaagatcttctattcatggactgagcccattctttgggctttaaggaaataaaaatataaaattatatttaaaatagaaaggtttaccatgaatttgccataaattattctagaaaaatttactgtacctaatcactagcatgccaccggtttagtaatgattttagaaagtgttttgaacatttttaatactagtaaaaattttaaagtgttataaataatagaaacgttttcaaaaattactatcaaatatactcttagagcccgtttggtagtaattttaaaaaacgtttttaatatttctaatacttaaaaaaaatttatcatttaagtgttaaaaattttaaaaacactttctaaaattactctcaatcgcactcagtctccaccattaatgctcaaaaatcaatctcgattgttaaatggttgggaacaaaaaacattaaattgtcattttagtaaataccataatttcatttgagaaaaatgacatatttagcatccaaagctcattttagaaaaaaaaaattaaatagttttttaagtatttaaattatttataagaacccaaattttgtgtagaaactcaaatgtgaaatgcaattttttcgacttattcatgtacaataaaaaaaaaagttaattatttctcaaaagaactctgaggaaaaaagaaaaaaacatgttatgagaataaaatttcgaaaatctatcaaatgtattttttctttaaaatataaaattgtttttaagaatagtttctaaatcaattttgaagattaatatttctagagatattaatgtaataagggaagcaaaaaatcattcaatttttcctagaatcttccaatagttaagagtattgaattttatggtccaaaaaagcttataaaatgaaaatccaaatgtagtatctcaccaaaagccccaatgatgaaaacgtgtcgacaaagggggaaccttacgaggtaaacggcaaaaatggtctcatttgaagacaagccatgaataagaatggactagactatatacattggacttgcattccaattaatggtgaataacttatagttgagaattgagattttgttaggtgggtgaaccctaggttcctatgaatctaataaatatggatatggagctttggcttggcttggctccttttctaatcacccttcttctcaccccttgccccttgtcactttcacttcatgccctcttaagtctactaccacatcatcattcttttttttagttcatatggtatcacaaatttgtttttttattttacgggaaaaaactagaaagtaaagtacatgttcaattgaatgacgaggtataacaaaattttataacatctttaagaaaatttaatctacaaatgataaactctaaattataaatatttttcgtaactaaacaatttatgattttatttgcttttctataaattttaaatcatcacataaacaccactttaaaactactaaatttgttatgtaaaagaaaccaattaaccactaaatgtaaaacacgattagtgaattttataattttgtaactttcatgtttctccttttatgaaataattttttttattattattactttctttatataataaaattaaaaactttattttacttgacttatggaaattataatgaatcaaactctactttaattactctaaaattatttttcattgattttcttattaagacaatattacttaatattatattgggcttttgagaattacaaagaaaataaattagaaagggcaaataaaaggaaataaaatcgtgaacaaaacttctcttatttgctcatccattaaaattttgagtaaaaatatataaataaataaatcaataatgtatttttattttaaaacttttctcaaaattttttagcaaaaaagaaaaaagaaaaaagatttctatatagttatttatttatttttctatactttattttccatatcatccaagtaaaatgatattctttagaattttttcctttttttctaacattttccaaaaacaaacatagcataaatgtttttttaccaaaataaatattataatgaagcaaataagacaatccatcatttttttaattattattagctatttatgagatggtttaaaattatttatattatattttaaatattattttcaccgagtattggataaaatacttacattttcaaagaatgttatataataatataaaattaaatttgtaaaagaaatcattttaagacttaggtggtgtttgttttttcgctgaaagcaatttgttttcataatttaagttgtttatttttctactttattcaattaaaaataatatattgatatcaactaacataattagagtgaattttttataaataggttcggtttaattatgttggtcgatattaataaattatttttaactaaatagaaaaaactaaatattttgatttttttatttaaccaaaaaaataaatactaccttaatcttaatatgcctttcatacatgttaactgtttttatgtatcgtgctatgaagcaagtgatattttataataatactaaatatatcatttaatattttacaagtaaaattattgaatattaatattaaatcattttagcttagctcaaaatatttgtcaaactccaaagtttagggtttcatttggaaatgatgataacaaaaaataaagcataacttagggatagaaagtggtgaaaaataaagaaggtggtccaaatcatagagtataattttaattagaaaaacaaaggaatttaattttgttggaaaataaatatagagggacaaaagggctggccaaaacgctgcgttttgag

SEQ ID NO: 12092 - DNA, 2806 bp, Vitis vinifera
  Intron number 11 from transcript GSVIVT01012536001 (locus GSVIVG01012536001) derived from phytozome v7.0 (chr-ID chr 3_random; pos 936815 to 939620)
ctgagggtattgcagtaggcactgacattggggaggtatgcattctaaattttttatgatttgagtgcagacttcattttatgttacaactatttgcttttatttactggaatatataattacataaaattattatctctttgtttcttcagaaattgtattgaaattgttttatatactaaataaattatgtgctatgaatggactatcaacatgtattctgcagagaggcatgttgaccgctatttaggtttgcctgttcaattgagatacacatgaaccctgtgaaaagactctttcattcttgacaatgtaaagattaaatatcatgaaactttggcacagtgaaatttttccttatgctactcagaaagattctttattttttattttcgaaggaatcagtaccaatgccatctcaaatccagacagtatcatgtggtagctataccaacactttccttttagctgcaaatatgattatggcactatctctctgctatatcttaataagcttgtcatcagtatgatacatgcacattcagttatttgcatttatcatgaaactaaataggtgtttgatgcaattggtgctccatttaaggaaaagggggtgttttcaaagtgggtcactattggtactccatatattaactctgccttagaaagggaacatcaaggtacacatgatgtataccaatgtgccaaaaggctaaccaaggaaatagacaccccatcctttagcttagcctcctccaacaaccaagcaccatttacttgaaattttgccaataaatttttcctaccacatgcattggccattttgtggaagagcttgatgtgtttatccttccttctcttaaccatatttctctttatttctgcctccacatagtttcttacattgaagcccacttcctaaactcctccattgccacccttctagcctctgcatcttcaattgaaagggatactctctctttgtaatctcaaaagctgatcgggtttaaggccttcaattttctggttaagacattcatgaaaacctcttggttccacaattttaggtcttggttgagggcctttaacttcactgccagaatataactaaaagaaccactcacattatataatccaaaaaccagcttcttatgaggtctttaagtccattctctttatgccacatattttcaaatctgaagggagacttccccctcctcatcccatcactattaaggacaataggagagtgattagaagttggctttggtaaaacactttaagttaggcctaattgaaacccgacctccacaccatgtgaattaacacccaaccagaggtaggtctctcaaattaaaatcccctttgatctcaaaaaaccgcttcatagctgaagacaaccttgtgcaattcctccatttcccaagaaattcgaccacattaaagtcttctcctaaacaccaagggtcctcctagataccttttttagccctaattctacccaaaaatcccctctccaccctttgaattggcccatacacccctgggaatatccaagcgaggtcatcttcacaatgaaacgacaggaaatagagacccacctgcttccatatcaatcagtttcaacaccctattgtcctagaacagcaaagacctcttacattggaaaattggcttggagattcctacgtgctaattctctttggtgcttcctcatcaaaactaattgtggtctgcaagataattgttgatatgccaatgagggcttttgggtgttgttctaagaaggccatctcacgacatttttgttattttcaaccccttttagagttctttgttggttggtggtgatttgagaatccattctcaccttcatctatggtgggaagcaatcttttgatctcttgttcatttattttgaatgttaagatggcaaaatgcccctatttccacactttttttctttttttggtgtgggggtgggttggtttcaaatgtctcttttgtggcatttcaattttcacaaaatcttaaataacagagaaattctgacatgtattctttctttgtaaagatcttgggctggtcaatcattgttcatatcaaggaaagttatcacactggaacttagttctaatgtgagcataataatctccatctatgagggcactaatctgatgtgacaataagctccattaatttcccctaggacaaaagtttacaaatgagtgttttgtgcttgccaagccacatttcaattggggaaaaacctttttacaactggaattaagcattatccttactttgtgtgaaaattcaatgaaatttcttcttttttataatgcatgtaatctaatagtgttgaagtaggttctttttggaagaaaagttagtgccagctataaggaaaccctttttgtagtctaaggagacctatctagttctcttttgttgaaaaactttgggatattttttgcattttcatgatgtattataattttgttatgttttcttcatgaaacctatgggatgcttcctgatttgtgaaagtgaaatactgctaaattcaccaaggttaaacctggtagctaaacagaaaatatagaagataatggtaaaaggagtttttacttgagtcgttttgtcatatatgattctgaaattgttttttgcggccttaaatgagagatttgaatgccatactttgaattggctcgcacatgttcagtggtttctgatccatttctaggtgctcttgttcattttctcaggtgcatctgttaaaaaaatttgaagcagagagaaa

SEQ ID NO: 12093 - DNA, 9517 bp, Vitis vinifera
  Intron number 14 from transcript GSVIVT01011657001 (locus GSVIVG01011657001) derived from phytozome v7.0 (chr-ID chr 1; pos 5505565 to 5515081 reverse strand)
aatcttgttacactacctgggtaacttccatattttactattactaactggacctttattgtggctatttgataaagctgtgccttggaatgtgaaaatggttgaccttaccaataatggtaaaatgctaaaaatatagggttccaatgcactacctgctaattctctaatgcttaaaaaagatataggtgttcttgtttgaattctcattgttattttatgagatttggttgatattcagacattttcttgaggttacaagagcttgtgagagacttaatggttagggtccttatctgcagtaggaatccttgtcctgtattctgatgtatcttgggccatgttttctatttaagttatagaccttctcacaaactcaatctgtgtccttgctgccttacaacacgttgaactttatctaccctcttttttctttttttttttattactagaaacacacatctttgctattaattaaaaagattgagaaggataaggcatcctacaacaaaattcaaatctgatcaaagctggtcaactgaggaagaccacaaaaatctaagagcaagcataacacaaacaccagttacacctcaaggaggtaaagagtcctcaacaaaagacaccgaacatttcactccttttttggcttataggtttgctacttgattgatggggtgaggaccgtgagcctctttccttcttttttttttgatagtaaaagcaattatattgtgagtgcctaccaaagagcacacaaaagtatacatgatgtatacaaggtgcctaaggccaaaatagaagagagatgcacaagaaaaaactaccttgcctcagttacaactcaaccaaataataaaatcaaataatgacaaggagcttactcctgaatgcatcctaacccaaatgacaacatcagaaatcaaataatgacaaggaagctagctcctaaatgcaccctaacccaaatgacaacatcagaaatcaaataatgacaaggaatctagctcctaaatgcaccctaacccatatgactacatcagaatctcactccattacaagattggaaaggcccaaagcattagcttgcaggaccgtccaacaaagctggaatcttagcctcagtagcaaatctcttacctacgtgcttagggtaagtctttgtcactgtatcctgatgatctctaatgactccaccagtaccaagttgccttaggttacctaaagaacatccatcaaagtttatttacagcacttctgactcgtgcaatattgcatatcttctagtcgagcttttaaatttatgttcttgattgatgtttctctataaatgtgccatttgcagttctattctttccttcttaatcatccatcccaacaactatcattgttctttgcatgtagaatttagttattcttattaccaatatttttagaaccggactagtcattgaaccggaaaagttaccggttcacggttcattggttagaccgacggtcgaaccacggttaaaccggtgacatcataaatatatattttatatattattaaaaaaataaaaataaattctatctaaattttgacagcatctactctatttgttgaggtttttttacaattttttttacccgtagaagtcatcaatcatatctctaacataatataagatgttatactttcataatgtcaatcaacccaatatttatcaaataatcaaaccattgataccctacatccaaatatgagcaataaaccaacaatgaccaaattatcaaagagttgttaacatattatccataataaataatacaattaaaataaaaaaatctataattttaaaaattaatataaaattttaaactcaaataaaaaagtttaaaaatcaatataaaaaaaaaatgaaaataaagtaaaaaatatatataaaatctaaagtctaaaactctaaactaaataaaatatggaaatgattcaaatttcaatagcaataaataaatttacaaaaatttcaataaattagaatttcaataatttcaataaattaaaatttcaatatgtaataaatagacaaaaaattataaaaactaaatattaaacatagcataaattataatcaacaaaaaaattaagacattaaatattaaacataaaatataaagatattaaatattaaagttcaaaaaaggaaaatgaaaaaagtttaagaaactcacaaaaatggtttgctgttgggagggaagataagtcttttatactaagtaaaacggtgttgttttgatggggtgaaagaaaaaaaaataaaatggttgaatcgtcctgttttccggtctgaccgccggttcatttggtttgatcccggttcaacccttggctgactcaattaactggaaccgtgaccgacagacagttggatcagttggtccggtccagtttttaaaaccatgcttattactagccattgtgaccatgtatattttgaacgttgtctctcaaaaaagttatcatatacatacaatatgactatgtatatatatatatttaattagagttggcatatgtaccagaacttaaaaattcttgctatcacttttttattttgtgcgtgtgcgtgtgaatggatttttggcttatcatagaagttgttatgtctcaatatttgaaaatttggtatttaaatgtgtaactgaaattggttgattatggttttgaatagttttcaatccctagtgtgtcttttttatccaatcatacagtttactatatattaattatgattacactcagttttcttgaaattttgggaggttcaaggctcatttttctatccatgatggactcttgccttgaaatattgctccatgttgtagcaccatgaacttacatcagtgtgttgatgggacaaagctatagtgatgtagtgcctaatgatttttatggtagttagttattttacacagaatccttactacaattgattgagaatgtcatatgtgcatgatgaaaggaaagtttgggcttaataattcctttatttgattgataaaatcaattttgtgtatgtgaataggtatatgtacatgtcgacaaatatatactaagcatgtccacatacaatgtgcatgacttggtagtttatatagtttacaaagtgtaattttgtttcaattgtgtgattaatatatgagttcttacttgtatggtatgtactaagatattatagcatgacttgttagtttctaaagtttaaaagtgtaattttgtgtcaattgtgtgattaatctatgatctcttgtatggtatgtactaagatattactaattttgggattaattttggatttatatgtatatatatcatgagatccaacatcttcctgagaggtccaataacataaatttttaaaaatgtataattttatgtcaaatgtacaattacactaaaaattaatttatttctatatagaaaagagttaaaaaatttcatctcataaattatataaaaatcaaacatatttttttttattgaaattgattaataatcatttgaaaaaataagtgaaatccataactttctttatatatatatatataattacaagcatagttgttaacttgtaaaatgttttgtgtgtcatttgtctattattttagtatcgtgtattgtaagttttccatgcagtaagtaattaaatagaaaaaatatgcattcatgtacatatatatatatatatatatatatatatatatagttgaagcattaaatatagaataatatataattaatttcatgaaaaatagttggatttaatgattttaaactatatcatactatatggaaacattgaatactacagttatgaatttaatgtataggtttatcacaaaactcacaaagataaacttttgaaattttagataaaatttttagttctaaattttactaggcatatgtacttacatatgttattgatatatatatatatagtatcatcttcaaagtttcaattttttataattgtaaaactaatatattatgtaattttttttcatcaaccaccatcattttcaatctgaacatttaaatcattcaaatagaaattcttttaaattttttgtaacaataaatttacttaacttccaatatgacatgtgaccacaagaatatagctttttatataggattgttttacctttctttcctttttatgatcaatgtctaaccttatcatgcgttttaaaaaattaatataataattcttttaagaggaaaaaaaattttaatttgatttttttttaaattatgaaaactagttaaatgtgtatgtattgttgtattgttatatcctatattgtatcattatacccccctttgaaccaaacaaagtctccctaacaatgctattttttgatagaaatgagttgcaagtcaagggttaagactaaaaattttagtttaaaaaattattttaatattataaaatctactagagtttggtctgtattttttttttttttttggtgaaattggatccatgcatgttataagtgatattaagaagtaaaagtgaaaagttttgacttaaacatttttcatatccctttctttatctttttaccccttataccccttaaaggctaaaaaaaaataaaacaatataaacaaagcaaaaaataaaatgagagtagaaacttttacttttattaattactattgaatttacacacaatttacaaagggctagagaggaattgggaaagagttggtttttgtttggtttttaattaatatagtaattcttataagaggaaaaaaaattaatttgattgtttaaaaaattgttgaaggtgtatgtatcattgtatcgttatatcccatatagtatcatgtattgttatctattgtaagattcacttaatccataaaaaatgtatcatatcatgtatcataagcttttaacaactatggttacaagttaatagaaagtatatttatttttatttttatttttttatttttgttattctttaacaattcatggttatataaagcataatgattttcttgaccttaaaacacaaagcctaggccaaacaaatataaatttataaaatacaaatataggtatattatactttttgtattatataaaataatctttacaatttgaaataattttagtatattgatttaaaatgttggtatttgtcatattttataaaaaattgttttatgtaagtgctaaactgcataataatattgtcacactggatgcatttagaatttcaaatttaaaataccaatattaaaaatataattaactattattggagttctgttttttttttctttgtaaaactacacactaattttagttgattaaaattattgatttttcaaaatttagaaaagaattaaaaatcagtatcttaaaatttggctctcttgaccattatgagagtgtcaaaactaataaaaattctgaaaattaagaaagggttgtttagccccttattacaaccataatgttctaaaataaaggggtaaattgcaaaaattacaaaatactttcacctttgtttcaattcagcttctaaacttttttttgaaccaatgtagaccctaaattatgcccaaatgttaaatagacccttatattaaaataccttgttaaaatgaatggatgaacccaataaaaagtgcctaaacaaattagatatatccaaacatatcatataaaaatttatgcgattgtctgtgcttgtcacatgggtttctccatttttgttagtggaaaatcttaatagaatgatttatttaacatttgggtataatttagggcctacattgctgaaaaaaaaagtgtaggagctaaattgagacgcatttgaaggtacaagagtgatttttatagtttatccaaaataatatgaccctatgatagtgagttgacattgttgtaaattttcatcaaaggaggggcattattgaaaatatagtgagtgaaattgttgccaatatagtgaggtggcattattataatattttcatcaaagaaagcaaagaacattcataacagaacactgttacaaggatatgattacattctaatacattgataagattaagctaagataaaaaaaaatagttaaacaactacaagcaagaccctccataataatagtgaatttgaggaaaatcaagactgtccaccttagtgattgactagcctaggcattctcaaatctatggtttatccacatttgatcatagcaaactgctcttttccaaaacacgtacattcatgtaataaaaaataaaaaatattttgcaattcaatttggatgaaactatcaagttaagattcttatcatgaaatgctaatagctaagaacatatttcttcctagagtcctttcttgaattaacaagtccattgactcaatgcatcatgcacctaacatcttaggatcatagatatgaatgaattaaagtgtaaattgcaagagccttgaactttctatttaacaaactagtcatgcttccactcgtatgacaatcatggagtgaaaatatctagttagcaatccccttattctacatatcaattgccaacgttgccaagtcaagtcatactactgatatgataattgtgtatttcaaccaactttgcccatttaattcatcaatattttaggcaaaatatctaatatggaatgataacaaaaaggaaaacaaaaaaaaaaaaggatggtaagtcggtcccattgaaatttgacgatatttatccaatatttcctaatatttcttcaaaaaaaattttatttttctttgaaattttaggatatttcatgattttattctaatttgtttcttttctcctgcttttacatgcacacatcagatgtgaagtgacatattttaaaatttttattacttatgaaataggaactgagaatgggtggcttgttgccaccaagccattgtggcctttgattatatgtaaccatatataaatatatatacttatattatattagttttacatccatacagaagatgaattattaaaaattaaactttataagttaattaattttaattcttttattttcaaattctaataaattgatcgtgcaaagtataaaagctatataataatcttcttaataagtcttttttatatcttgtgtataattattagatagaagagaaataaaaacttctaaataaaattataaaaaattttaaacaaaaaataagtataagtatacatatatcgttatttatttatattctcaaatatatccaaattaggtagatcatcattttaacattaaatatattttcaagcaccgcatattattgtttaatgctacaaattttatcattatatgttttatctttttttttaaaaaaaaaaaaaaaaatagcttcaatatgtatattgttgcttgttttatcatttctaagagtcttttacaataattttatgaattttggatcaatttctatttaatctttatttttttctcaatttttgtctatttcgtaaaattcaaatatttctgcattttccaatattttaatccttttgctaaactaccttgcccttagcattaccaccaaaagcgtgataggcaatcactaatatatctgccatttctccaggaaccaaacaactgtaaatggttaatgctataaattaatcacaattggacaagaaaggattttatttatcctggaaggaagagactacaagataaaatatatatacaaactttattaaaagataaaccacaacaatcttcaaacccaagttttataacttctctaaggaaatttgacttctaaattgtagactttgctttatgaatacctttcttaactaaataatttgttgttctatttgtttccttgtaaatattgtcacatttgtaagtgtctaactcctaagttatcttctaaatatctttaattaatatcttaatagatttgggaatgttgcccatcttattataacaatctaccactattttagagtagctttcaatctctagattaaggaatccattgttccttgcagctagtacgtcatctcttaaagctatacgttccgcaatgattattgatgcattaatgcctacttgctgccatttttataaattccattagagtccctaatcacctatcctgaagcacttttattctccatcttcgatccatcaaaatttagactaaatttttctttgagtcaaggaatctatcgaatccatttttcaatcaaccgaaggacactacatccttcattttgaataaaagaattagtcaaataaccttacagatcttggaagttgagggtggctttcctaataaagaggaaggggttcggatggttcttcctaaacatttcgtattctatggattgatacattctataacataagactctattatatatatgagtagcatttgtattaaataccaaaaatatgtataaagaaggattagaggtctttgcaaatagaaagtgtactgcagacaaccagattagagaaaacaagaaaaacagagctccctacatggctctttttgtacatatcagcttcctgatttgttgatctaaacttttaagaaattgaacactccaaaactcttgagggacctgcaattttcactcagaaagaactatctatccctgaatccccctttaccataagattgaaggtactgaactctttggcatcttttagctttctagttcaggactttgattgctcactgaaaatgaggtgccttaaagaaagctcaactataccacttcttttattccatatgaggttgctaatctccatctttcccaggtatttacatgagaggcaaacctatctctgatcaaaccaaataatcctagagggactccagaaagctccttagtgattgaccttcaaagatcctcatgcgctaaaaaatcctggaattcctcttatgagaaaatgtatttctcccactggcatccaaaaagtcatgagaaagcgtatgctctcccataggttaaccatcaatcacctcctgtcctaaaaaatcctggattcctctcaagccaaatgaccatgaagcttgctaggataacaccctctgccccatggcacacacaatgcccctcctcgaggactgttgccaaacccttggaaaggtataacctttttctctgtaatggttaactatagttgtccatttgtaaacttttcttggtgcaacaaatatgttgttttgaataaaccagaagtgattgggagaatcttgacagtgagttgccttttgaggaaatccattctaagtcttatttccatgtttgagatcacatactgtactcttttacctgaaaatattaactactagcatgagtcctgtgtaaacattgtaagcttctaagctatgattttcatttacttcaatctctatttgttcttttgcttttctaggtattgtttggctggaactataggacacaaattga

SEQ ID NO: 12094 - DNA, 6592 bp, Vitis vinifera
  Intron number 2 from transcript GSVIVT01024119001 (locus G SVIVG01024119001) derived from phytozome v7.0 (chr-ID chr3 ; pos 948592 to 955183 reverse strand)
gcgacattttggccttcacttcctctgtctagttttccatcttagttttaggcgtgcattgtgcttgttttccaagttgtctagattttgggtggatggatccgtggtgtttgggtttccatttgaaataataataaatatgaattgaactagtattatgttttgttctttaaaaataaaatattaataattaaaataaaaaaagagacccgcttttctctgctgaaacaaagcatgctaatgaagaaccctaaaaaagggaggtaaccccacaagaacatctcattttgaagatgagaagatgagagtgtgtggccaaatggtttgaggttcatcacaacccttagagattatatggatttcataaacaacattaatgtagtatgagcactcagtgtactgttcacaactaccactctcattctctataatatcaaatgaatataatattattataataaaaatgaatctattactaattatttattataaaagataattaatttatttaccatcaaagttatacaaatataaatatgatttactattaatttatttattatcaacaatacatgacatgaatttattaatttcaagataaaccttttttttcaaattttttctttataaaatattaaaaaaatattttgcatataaatttattattaatttatttattatcaaagatgcacgaatgtaaatttattaatctctattctttcaaacatatgttaatattttataatcaaatgtaaataaacgaaaagtcataagaaaagaacttataggaaattttattttcctttgtgtcaaacaaatattaatattatgtaaataaatgaaagccattgatttaaaatagaacctatattttttaaatacatgaatatgaaattattaataaaatacaagataataaatattaatattttgtaatcaaacgagaaaatacaaagaattacttattatcaaagatacatgcatatatttatatatttatatatttataaaatttctttattcttagaaaaaaaaaaagataatactttgagttttcattctaattaatttatccaataaaaattaatttagatattgtttttccttttaccataaataaaaggaaaggtaaaattatattcacatttctttgagaaaaataagaaatttattgtaaaaaaatgaaaacaaagaggctaaaacttgttattggttaattttaataaatttattttcaaacatgcaaattcaaatagttcatattttttggggggtatggtacctctaagatcctgtggaattatccttctttaatacattggtgttttgggtaattagtgttcaaaacacatgataagatattaaaaataacttatttaccaataacaaataatctatttgcgtatgctatgcatgttattggaatagtcaacaataaatattctatttatactttttaaggctagtggaaagacatctcatcattcttatttcaaaatttccttctttttttctcttccaaaagaagacaacttgcaataatggaggtgtagatgttgtctaccccaatggtagggacgcaagttaaattatgaaccctagtttatgggaagtgtgcggattgtggatagtaggtattgggcacaagttctagcattttgttttaatatcatcggatacatactaaggtgtaatcaactctttataatgggattttgggttaatttcagaattagattttaaggaaaccactatttttctatagttgcaaggggtccttgctcgaacttatattatttggtaatacatttgttaagatataattgaattctttattcatatgtgcacataatgatattttagtaaatatgcaagattacataaaaacttgtgaatgatttttctagattaagttaattaattaattcaaacctaataggtctacttaattaattaggtcctaatggactagattaagtaactcaaacttaagacgaattcaagtcacttaagcttatagacaagcctatataaatcatcttaaggctgagggctttatactctaacccttgttattcactctttcaaatagagaaaccctagcctttattccaatttttcatttgccaaaatttaaggaacaaagccatcgaatggaaaatctactagttttcaagatctgcattgactcttcattggttgaaattgtgaacatttagatcgcatgcataacattattctctaaatttattgttttaatatgtagatgcttccactatgtaaatttagagagcctctatgattgtctttgcatgcaccctattgatccaaggctagtaatgaagtaatccaagtattcttactacacgagctttatattggagatatattaattaacagtatataatttaattagtatataatttcattttttttctattatttcaaaatatttaagcataatgtgcaaaataaatatgaaaataagtccaataacttatttttaaatgatacttttaattccatcttagcacttatcacacatcatatgagcttaaaaaatgtcaacaatcaagaaaaatacaaggatgcttacactttttcttggcgcttttacagggtcaatgttgagcaagagttcaagcaatggggcttgtacaatgatcatttatagaaaatgtcaaggttgatgctagtaaacaatgacacttctagaagcgtcattgttgttaaaaaaacccattaaaaatgacatttttaacaactgtcaataaaacaacccttaaaaggatgaagtttttagcaagcaacaatggttttttcgatgatgattcttagaagtgtggaccccgtattttcgctcgatgcgtttccacttgatggcgaaactcgtttttttttatttatttggtgaaaatttgattttttttaggaaagacttggagtcgccacttatttttgttttatttttaaagggtaaagaaaataagaaagaaaaccctaaatgtgactccttatttggaaaagacaatctgtcgtgaattttggtactatgaacccttttgagggctcatagttaataatgtgagggtcgaacgacttggagagcatgtcatccaatcgctggctgatggaatcgggtggagcccgatctgctggggtcccagcttgccgctattttggccgatgggagggccacttcgacatgattgctgtgtttgatggacccagacagacctctagggtttctattatgcatatttttccctctacgccaggtgtttgaggtcccaaccaggctcgcattgcgtcagatagacgtgacctcctgtcgcgcctcctctttgttgacactcgggtagattcggagctttcgtccaactgcacttggcgggttggtgaaagctcctcctcatcccgcatcgtgtgattgccagaggggaattctatgttcccatggaaagacacctcatcagtatgtcttgaggccattcactggctttggggttgtcggctttgagaggggctcgcagatgacatttgggcacgcaattcttcattttctttcttgagtcaccttgtttggtggattagagactacatctaccaatcattcttgcgctggcgtatttccatgccctctcaccaatcaaagtagccttcgttacctatagctaatgataaacttttagagggtgttgacatcctcagtcgttcccacagatgatgtcaatgttggttctaagccaactagagtcaagttcatccaactttatggaggttagacaactttcctccattttttgtgcttctcaaagaatccacctagaaataatggaactaggtggacttcttcttacacaaaagaatgtccggacaggtggtcagggcacgtccctccgaagcttaagtcatacaagaatatctcaagctgtttagtgagagagggtcaatgcatatatatttttatacctcatttgtgctttttagagggtttttatagtgttgatgagtctaccactatagtattgacttggcaccttgactttcttctataatgatgattgcccagctacttgtaggacaatcattatagttttgggttgttggtaggtgtcatcaattgacgtgccatgctgttggactgtgcaaccgcctatcttctcaacctgttgatggtctggggttatgtgcagcaattaattgacatggacttgagggttagaagacgtctcatcagccgttcacatatcagatgtgaatgatcacgcatgcttgcaagtcttgaagacttgattggatagccctatctgtttcaggggtccgaccccccttgccgtctgaccttgtaaggggaaatggccttcttttgcctggtgtcagatggaattggtcgtagtccggacaaaatgatctgaataggttgcacacttgtactagatggtcaaggtgtccaggtcggaaaagggacatgaggaggggagcccctcacaatcaggccccttttatgtgttcatgaacttaggataagaaatttggagaaactcaaacctgcttttcaaaattttaagttactcgaagtcttggactttaaaggatttgagataacgcaaggccaatttcctacaacaatagggaatcttatccacctgaggtacttgaatttaagtaacagtagaataagagtgttgccatcatctatagccaatttgaggtgcctgaataccttagacctatcccaagatttttcatacattatgaagataagaagcagggaagaaatcccaaatgttctatgaaagatgcaacaattgagacatctatatcttccttggagatacaaaataatccatgctaagaagttgcggctgcacatgttgaccaacttggagattctgaggtacattgatccaaacaaatgttgtgtagaaggtcttatcaaattgaaaaatcttcgcaaattgcatattcatgctataaaaagcattgaacaattggaggtaatcttcaaacccttgtgccccgtcttaagtgtcgtttcatttcttcagtgggaggagatttaaggcaactgctctcgggttgtcatcatgatctttatagactgtatctcgctgcaggcatcaccaggttaccagagcacaatgctttccacacttaacattgaagcatgcccagtctctgccatttgaggatcatgaagtgtcaacaactgaaggcagttcccgatggattgagaggttcattgtcaccctccggaaaatgaaggtaagtgggattctagacacattcctggacagacttagagaaggaggagaggattttcacaaagtccagcacattccttccattgaattcatggagttagaatcatgaatatttgacaatttttaataaaaaattaatgttcattatttgatattatttgttaattttaatattgtgtaaacaaacaagaatcataagtttaagagttaatttcaatgatacttcctaaggtttaagatttaatgtaaatacacctaaccaccgttgatttcaaatttttatggattagtaccctataaatttattcaggttatcaaatttattttagaaagattttaaataaaaatattttagatgagaaaatttaataattctttaaaaactaaattttaattcttaaaaaataaaatttatatatgaaatacacttataagggtaccggttgatgaaatttaaaacttgtggtgactcgatgtatttacactagggtctcaataaaattagccctaaatttaaatacaacttatatttttttaatccttgaaaaaattagttaaagatacattaattatattatttatttaataaatacatgaaatgaatttattatcagtttatttatatatgagtttattattaatttatttattattaacttttcagtaatttattaatataaattcttttcttttttaaattttttaataaaaaatacattaatattaatttatcaatctcctcaatatcaaacaagaattaatgttatgtaaatagagaaaattatttttaaaaccgaatgataatagacttttcataaaatttaacggaaactagctatcacacttaaagatttcccattttccaagaagataacaaaactgagctcacaaatatctcacaacggcgcttcttttccgttaacttacacaaacggagaaaacgttttaaaaaaaattgaaaaaaaggcagcaatgccacgtcagcaagtctggattagcaaaacggacatcatcttcgtttctctcgccacacttcacataaccaccacttcatcttcttcttcgctctatcctcatcacactctctctctctacacttccatggatgtgaacttctccgcaaaatctcaagctctgaccctaatctcatgcactccactctactcttctccttctccttcttcttctttctccactctccgccgtgaatttctcggttgcggccataatttgaggcctccgggtctccgatctcccaagaaatgtaaaaatatacgttttcggatccagtcgccttccaggttctacttcaaggcttccttggg

SEQ ID NO: 12095 - DNA, 3719 bp, Vitis vinifera
  Intron number 1 from transcript GSVIVT01014286001 (locus G SVIVG01014286001) derived from phytozome v7.0 (chr-ID chr1 9; pos 2313487 to 2317205 reverse strand)
ggaaccttcacaactttcttttgggtattttgctagtgagttcttcttcctttgcacttattttccattgttaaattttgattattcgagattctttttaaaattacgactatttttttaagagtctatttcgaatcaattatagaaaatttaaaagtttcgttgttttttttttcttataaaaattagctatatggcaaaatgaagttgaaggcaaattataattcttaaaggacgaagcaatattataaaagatttattaaatattttataaaaatttatacaatggaaaatggagatcatataattcttaaaggaccaatcaaaatctcactttattattatcaaaatatttttatttatttattttatatctaaatattaggataggggtcttaaaagtgtaattttgttctatgtcaaaatgctatcaggtattttaagtaaaagcttcaatatgaaaaaagaaaaaagaaaaatagaaactcatatttataaaaaaaaattaatattttttacaattatatatatatatatatattaaatctatgttttccatttaattattatgattgtataaatgtcaaattcctattgaaatactttatattattgtgaatgagaatttttaatttaattaaattaaataaaacatgtttagtagggttgattaaattttttcttaaaaaaaaatatgaaaaaaaaaataataaattatttttatgtgtttcattaatcttgttttactttatttttaaatatataaattttaataatatatattttataaagtgaaatcggaaaaaataaaatttttttcttatattttttgcaaccaaacatgacgtaatagttcggaacaccttgattggtttaaatttgccctttaacaacttaatgcatttatgagtactattttcatgccaacgtggcgtgatctcattggttacctgacaaaccgtagaggcggcaatagttagaaaccgtagggggtgtttaaagatccaacggtacggaaggagtggaggaaggtgtagtcaccatcggatgacgttgacaagaggacgggagtagattgaaatgatggggtgcgaattatataattaaagctggactcatgtttatggaggggagagtaatcatagggtgtgactgtgctacaaatacctataaacagtagccatttaaaagctgagcctctgatgaccaaatcattgttctactgtttcggggttcctccagttttgggaggtgcaggcaggcatgcctcccccagcctgacacgtggctaaattttccctgattgggtcccacatctttagagttgttatttggtccaatcatcttttggtgtgtcctgtccttgtctcttttaataaatctcttaaaaacttaatcacataatatatatatatatatatatatatatttaatgctaagatatgttttttttctctccacaaattatatatctctctatatatattttaattatttaaactttaaataaaagagaaaatataaaaataagtttaaaatttatttattttggattatttaatttaaaaggttaatgaaaatccaaattttaaaattcaacttttcatatttttttatcttattttaacaaaatattcttattattttattataaaaataatattttgttttaaaatctacccataaatacttaaaataataaatgatatttgtgtaaaaaataaattatttttcgagacaaaatatgaaaagagttagatttataatttttaggattgtttcatcaattttaatcaaatattttatttatttatttttattcattctatcatttttccatggcattttccttcaaattgtcccgagccaaacacaaggttaacattttagaagctctctcaaataggattttcattttcctacattttccaattgggcctgcctgaaattggaccttgttatgactatttctttgccattccacaattgggcctagctcaagcaacatgggcctatggcttgtatgcttcaattgggagattagacccatgtccatggcaccaaaagtaaaccctagcttggggtcaaagtcatgacgggttgttggttggtccaatgagatataatttaacatgtaatctaaaattaaaacttaataatttaagatataatctaaaattaagactgcatttaacaataattatagaaagtgtttctaaactttataatacttgaattattaaaattttaaagtattataaaacccataaatatttttttatatcagtgccaaacattctctaaatcctacttaaacttttctttgacatcgaagatgatttaatttattgtagggccaaatttaaacacacctcttttatagatgcaatattaatgacataagaccaactttatcttaaagttgtaggtgtaatgcatgtgacgaatagactcaaaggttgctatatagtttttattttattttcagtcttatctactaattaaataaaccaaaacctaaatacaactccacccattaagagggtagggtctgtctcgtcacatcccaaaggaagattgatgtagatgtctcaattttgtgggtgtacactaaatttgtgtaaccatttattttccactaatttatttatttattgtattttattttatttttggtggtaatggtttattctttaaaatggttgaatatttgacatttttaatgattttttttttgaaaaattttaaaaagcttttgggtttgacaatgaaaatcatccctttttgttttattcatttttatttgagaaattgtttaccacaattatagtaagagttataaaaaaaagggttcatttatgtgggtcgaaatatgctccttggcccattataattccactaaaaatctttgaaagtgacatccaccaaaattcattctcctttacacattgactaagtcaaaacgacaaaataacattttggaagtagggcatcacccaaaattagtgtcaccaaaaagtctgaaaacctaacccaaataaaaggacttggatctttgtaaagtcatgccttttgaaaaatggatcattctcgatattttaagtggaaaatgaggagttgttctttcattcttgatagtagttataacttatgaccattctcttatttgaatttatcttccaaatatatcgaagacaaaaattatgatataaatatttgattaaaaatgatgaaataatttctaaatcaaaaatctaaatcatcccatattttatttagaaaaacaatcaattttttattttatataaatgtctttttctatttcaagtattaacgttatttttataagaacataatgaaggtatttttgttcaaatgatatcaaaaaagggtgaaagattaaatttcaaaaattgggttttgagaaacccttttaatcaaataattctatagactaataaaatctgaatgagacatatgatatcaattgatttgtggtatttttttagtattataatcggacggttgaaagacataatcgttttgtgtttgacattaattatgttagatgtgacttatactttttttaaaaggttccatttaaagtagtattagtatgatttatgtctatttatggaatctaattggagacttttgtctactttaatgacatgtatgaaagaggttacgtttacgaatttgagatcatttgatccctt

SEQ ID NO: 12096 - DNA, 13161 bp, Vitis vinifera
  Intron number 13 from transcript GSVIVT01025856001 (locus GSVIVG01025856001) derived from phytozome v7.0 (chr-ID chr 8; pos 11165044 to 11178204)
tcacagacagtggattacaccgtctggtatgttgatttgatactagagtttgtttattttggaatttcaaatgcaacatgaagtttgttaattttacagtcttttcagaattttagtataaatttatagttttgctttcatgttcgacttttattttgtcatcataagttttaagtatttgcaaacagctaatgttaattaattatcatataaaaaataagtaaagtatatctgtttttataaattaatctggttgcatggtgtacaaaggttttatatgaataggaaatataattttgcatattttagttgttaggttgtagtgcaagtgaatgcatgagcctaggatcattccaaatgcagcaatttgcaaacttgttctggcggcagaaaatgtaacttaaaagagtcagtgaaagtagttattctttttggttttgcatgtcccaaatgttggatcatacacatgatactcctgaggatgaataccctgagcaggagactgcatgagtttgtggtttgcacattaatttttgttttttatttttcttatgaatactgtatgctctttgaatggacatccttcacagaatacttgttacgttggggcactgtagctcccttttcatgaacaccatttcagattcctaatccattcacaagtagggttcagttcaattccagacacattgagaacagctaaaatgttcacatttattctatccacaaagctaattatcgcatcaaaactgcatccatcctagtttagaccataaaaatgagtctaggctgtttaggcaactctagacaggacacattctggcattcagcttggctgtagcccagacttcaattttgccacccttgtgattaagatttagggtgttaattttaatggtattgtcatgttctaggcaatacagataggtcttgcacatgagttcttgagagaactttcctaataggcatatattagagaaaacctagtggacttggaattaatttggaaatcatattttaccaaaaaaacaatttagaaacataagaattttagaaagaattgaaaagatttcatattttaagtttaaaaagatttgaaaagattttccttttaaaattcttaatctaaattcctttccaaacttcttaaaatttttggaaagattctcttttttaaagtttttttttcaaattaattttattatttggaagaatttttctttttaaattctcaatttaattccaaattaatttaattcctaatttaagtccattctatgccttttatgtcattattctcactcaaccatacgtgtttaatcctgggatcattttgcagcaaccttgaatctttagagagagtgtaactcacaagaactacccagatagcctaatgcactaacaaagatgattggacattctaaactaagggatgagctgtactacataaaccaaaccctcaaggcttggtttctactactacttctaaaataaatcaggtgtagctttgacatagatgcttaggccattcctctttttcaattctaaaaagacactttccctacttgcttgcaaatattgatgtcaaggatttgcattatggaagttgtgaacttgtgacacatcatcgcatacctcttcaaataaatactccaaataattttcctgtatttagtttgatacagtatgatgtttggggtccatcttgtgtctctaatatttccgacttacaatggtttattatatttgtagatgattgtgctcgttctacttaggtatatcttatgaaatctaaatatgacgtatcatttattttttcatcttttcataaagatattcaaaacttattggagttaaaatccatactctcaggacaaataacaggagggagtatttcaaccaagcattgattgatttatcttcaaaatgagagtataattcaccactcattatgtgttaacacaccccaacaaaatggggtttccaaaaggaaaaataaacatttattagaagttgcccacactctaccttttgaaatgaatgttccaaaaacatattagggtccttgatttcaaatccctcatagaaaaactccactcttggtttcctaatttttagggttttactaaattgcctccaaagatattagggtgtttatcctatgtccatgctcagagccatttaagagggaaacttaaccctcgagcaatctgttgcattttttttaggctactcatccacataaaaggcttaaaaatgttaccatccagccacatagaaaaaatatgttacaagggaagtaacttttgtggaaaattgatccttttatggaaacacctatcttcaaggggagaaggataatatggaagacaggtggtgggatcttgaacttgaaccttcctttgactcctctacactaaatcaaatatttttattttttatttttgataggaaacgacaaagggatacactaaatcaaaatgatttgaaaggttccttcctcaaataatttcttcctcttctgatgaattcatttaaaattctaatatcacttttgaaactcccgtggttgttgaaaatgaagcatctcctatggccaaaatgcattctaagagaaagcagccaatagtccctttgcatgacccaattatcaactctaaaacatgtaaatggaaaaggtaattagaatcccaccctaaataatgatctagatttatctattactctcagaaaaggaattagatcctatacaatttaccatatttctcagtttttgtccttacaaaatctcttacctcaacatagggtctttactacataattattcaaccatggaattcctacaacttttgaggaagctctaggcttggaatgattgaaggaggctatgaaagaagaaatgagagcatgggagaaaaatagaacttgagagatagtggatttgccaaaaggatacaagaaccacggggctgtaaatggatttataccatgaagtgtaaagttgatgactcagtggaaaggtacaaggtactcacgataaaagggtacacacaaacttatggtgttgattattaagacacttttacccttgtagttaagatgaacaccattcagattttattatctataacaacaaatctaaactggccattgcaacaatttgatgtaaataacacattcctccatggagacttggaagaggaggtatttatgaatgttttgcctggtttttctcatagaaaaatggggtaacaaagtgtgcatgttgaataaatctctatatcggcttaaacaatccctaagggcctagtttcgaaagtttaccaagtccatggtaagaagaggctgcaaacaaagttaaagtaaccacacgttgaagaaatctctatatcggcttaaacaatccctaagggcctagtttggaaagtttaccaagtcccatagtaagaagaggctgcaaacaaagtcaaagtaaccacacgttatttatcaaacattctactcatggaaaggtatctgccttaattgtgtatgtaaatgatattgtggttactagagatgatttaattgagattgtattttgttacacatgttcttgatgaaattcttaaaatgtttgttttttttttttgcctttctccaaattttctggtgacttatttttggtaaattatgtttgtcctatcaaaatagctataatttctattcggtaatgatcagttattttcgtaaatttttgtgctggtatgaggaggaaatttagttcttactctgaatataggcgggcaacctctatttttgtagtctggactagtttctctgaatttcaggattaggttttaattcttaatttaattcctcatctgtaggcctctttcctaatggtttctttttcaatttcttggtcttttaaatcaccagaaattgacctcagaagccttaacaaattggtgtttgacattgttgcacccaaactaagattgaattgtcggatggcaacaataaaattttgagaatgctgtgtgtattctttggagctcgtgcttctcctatctgaagaattaataacttttgtatgtaatgatccttagcaagccaatagttttcttttgccatgagaagttgcaacatgtctcagttgattcttttataagtagagagagtggcataacctttgtaattctaaggttttagcattatttttgctttagcttatctgtttgattagaaagaggcgatttaacaacatttcagcttgtggtcaatgtgacaaagatagttacataattgtaagtttctgcaaggttatttaggggggaaaatggactattacaaaggtggttccctaaacagttcctggtgcagcaaagaaatgaaaaaaattgaatagctctgcacacagtggtcatctctaagagttcttactgagattatactaaggctttaacaatattttctcttcatttgatccaattgttaccaagaaactacgaagttttagcatcctaatctatgtaacaagatcactgattcgaacaccggtatctgacacactgtagagcagactcactggcacatgattgtaactaaaaaaacaatgaacgtagaagttccttttggtaagaaagaattctgttcagagtctttgcccaacctttctatttgccatctctaagagctcttgatggtattgacttctaagagacttaagttggacatggttgtcttccttcccacctgtgttcatttggtttctatttctggaaaagcttcaacagttgtagaagaaatatttcaatttcttttgtaatcaaggaaaataaattataacccacaaagagatatttttcaattgcttcaacataactgtgttgaagttgattctagaatgatactaggctagttcgatgcataagtgcctccatagtgttgtgtagtattctatctaacaacgtaaagggaaaatttttataagattatgatttatgcctaaaagccaacaagagactacaatttatacttttccatagagtatctaatggaaaatgggaagtaaagaagtttattcattccacccaagttcttaattgttggatcgtgtagaacagagagatttggcttacgttgagaatttcggttgggatgtctccatcagctctgtacttacactgagaaggtgatttggctttaggatgagagtagagaggtggtttttctgttggataggatgcacctcacagtccaaatgtttttaccatgattttttttttttaaccaaaatttactagagattattagggattatcttttgcaagttttggagaaatttcacctttagggaattataaatcatagtgtgaactgaactcttgtcctaaggaggaggatttgtttgtgttaagaactttaaacctatatcattgctaaactcctccctagtgaggcactccttgatatcattattatttttttgattggaaacgccacaaagatatattaatataaaaaagaagtacaagaagaaggatgagaaatcctcctaccaaagacaactaaattacaggaaaatacacataaaacaagtgaactcccactaaggaccaatccctatggagtacacaccgctatccaatccagttgaatcacattaaggggaatccccttaaatgccttggaacagaaagcccaaagggaagcaaggaaaacaatagagtcccaaaggaactctgaattccttgctttatcctcgaaaatccttgcatttctttcccaccacacaacctgaattagagctatgctcgtagcttgccataaaactatccctctcttagaattatcgaagcctttaaatttgatggacatcatgtcatatatgctccttgggggaacccaatccatcttagctaactgaaataacctgtgccacaacccaatcgtcaaggaacaatgaagaaaaagatgatctgctgattccctgtgcttcatgcacatgatacaaatatcaggactaagggctttgtagggtcttctgcactccttgatattattgttgagttgtaaataaaatagaagaattattctcctattttgttagtttcctatttctataaatagatagttttatgatttaggaataagttagtttaggaataaggtagtttcctattatgtctcttgtttcctatttcttctcttgtaatctcctatgtaaattgtgtgtataatcaatctaatagacaaaatttagtatttttcatcccatattttgtgtcatggtatcagagctgtaggtttttaagacctgggcatcattctggccttcatcgccatttttttggctttcatagatgattttttttttattcacttgttcttttatcagccttcattgctgctgatttttttgtttcgcgatttgccttaattccaagagatcaggttttttcgtggaagatgttggaaaattcaggtacaccttcactctctttttgcataaatgcctcacacagagtttatgatgactcttggataatagactccggtgccatagaccatatgacctccaaatcttaacttttcaatacttataccctaagcccaagtaacaagaaaattgtagtgaccaatggctctttagctactattacaggtttcagagacatatacatcacacctacccttaaaaatgtcctccatgtaccaaaattgttggctaaccttgtttccattcaaaagcttacccatgatcttaaatgttatgctatttttttcccttcttattgtgttcttcaagaacaaggctcggggaagaggattggacttgctaaggaaaggagcggtctttatcaccttaaatcatctcagaaaactagtaataatttgtcattgttttttctcagttcctcaaataaagataccatatggttgtatcacttacgtctaggtcatccatcttttagggttttaaaggttatgttttctcatttgttccaaggattagatatttctgagtttcattgcgaaacttgtgaattgacaaaacatactcgtgtatcttttcctattagcaataaaagaagtttccatccttttcatttgattcatagtgacatatggggtccttcggctatacctaatgtttttggggctcgttggtttgtatccttaattgatgactgcactcgggttacatggatctttcttaaacaaaaatctgatgttagcattgttatacctaatttccactcaatggttcaaaaccaatttggggttaaaataaaaagctttaggacagacaatgctagagattactttaaccagactttgtcaccttattttcaatcacagagcattctccatgactcattatgtgttaacacaacctaacaaaatggggtagtcgagaggaaaaatgggcatttactcaacacaacccgagccttactctttcatgtatgggcatttactgccacatacatgataaatagaattccctcacgagtgttagacaacaaaagccccgtagagatacgtaagagtttctatccacacttcagaacctcaaatgagctcactcctagggtatttgggtccattgcatttgttcatgtccacatcctacatagagataagctagaccctcgagccataaaatgtgtcttcctgggttactcatccactcaaaaaggatacaagtgttacaatccctcagctagaaaattttacatttctgtagatgtcaccttcacagaaaataaacattttttccccaaatcctctctttagggggatatttcaatgatggaagatagtccttatgagtcctttgaacctcttgaccttcctcatgtctcaatccatggtgatgaagaacctgagtcatccgaacttgagtcatccgagtcaatcacacctgagtcacccaattttaccactgaacccatgttatcccctgttatcccttgttccagccagtatcactcgcaattttccacaagttcctaaggtgtatttatgggaaaaggccattccagaacaaaagcaggtcctagaatccaactcagaccctggaaatgaaatcacggtaagatcagacccacctttacatacacaacctggtgaaacttccatggacttaatagacaacctagacctagaccttcctattgttgttagaaaaggcaccagagaatgcactaaccgaccactctatccactatcacactatgtgtctcttaagtacctatcaccagcctacaagaattttattgtgagtctaaacaccactatcatccctaacactgtttctgaggcattgacaaaaagggaatagaaggatgctatgagagaggagatgagtgcattagaaaaaaagtaaaacatgggagattgttgagagaccgaaagggaaaaacattgttgattgcaaatggatttttacactgaaatataaggcagatggatctcttgagagacataaagcaagattggtagtcaaagggtacactcaaacttatggagttgattatcaggagacttttgctccagttgcaaaaatgaatactgtaagaatcctgctgtcactggctgcccactacaattggcaactcctacagtatgatgttaagaatgcatttcttcatggtgatttagatgaagagatttacatgaagagatttacatgaacatcccaccgggatttgagggaaacacaggtaacaaggtgtgcaagctgaaaaaggccctttacaggctaaaacaatctcctagggcttggttcgggagatttgcaaaagtcatgaaagagtttgggtacaaacaaagccaagatgaccacactttcttcattaagcactcgacttcagggggagtaactgttcttctagtctatgttgacgatatcatagtgactggaaatgatgagagagaaaagcatgaattgtaacagagattagcaacagagtttgagataaaggaactagggaaactgaagtacttcctcggtattgaggtggcatattccacacaagggatcttcatctctcaacaaaagtatgtgactgatttattggtagaaatagggaagattgagtgtaaaccagtctctaccccaatggatccaaaccacaagttgggagaagataaagaagaactagtggtagataaaagaatgtaccagaggttggttggtaggctcatataccttgctcacactcggctagacatcgcctactcggtaagtgtgatcagtcaattcatgcatgatccaagaaaacctcatcttcaagctgctacagggcgctgcattatttgaaaggcaaccccgggaaaggaattttgttcaagaagaaccaatgttttcagaaccggaccggtgatcgaaccagaaaagttaccggttcacggttcactggtcggaccggcggtcgaaccgctatcaaaccggtgacatcataaatatataatttatatattattaaattaaaaataattataaaaattaaaaatatataaaattacaaattttaataatgtttgatttttatatttggtatattaaattaaatgataaagtttaatattttaaattttattaaataaaaatatgtaatatttaagaaagaagatatatttaagatgaaaaaatttataatatttaattttatccttttgtctttgtattttattgtttttaaattattctattaattaatttatattattttttataattattataaaaataaacaagaatttaaatatttacatttttttaaagattttatatgataaaattttgaaataaaatcaaagttccatgcgtccaaccctttagaggcaatgttttcctctaatagtctcattcccaatcccacatcggaagcacaagaattttatgtgctccatgtgctctataaataccttccaacttgcctttaagccaaacaagccagcaagctgggcctagaagcatggcccaaatgcaagtgttattttaaaataaaaaatgctgcaaattgggcttatagacatggcccaaataatagtgttttaatcttatcattggactagtcctaatggttgggaccaaagatggtttattaggttgagtttgtaagcattgggcttggaatgggcctcttttacatagtaaacaaaaacttgttatctaagttatcaccagtttgcaaaataccggacgggtcgtccggttcgacggttcaattgtcggtttgaacagttcaatgccggtttgatcacaaaacggtttattgagcagaccgaaccggatagttcaccggtcgacggttggaccggtttttaaaaccatgagaagaacaatactcttgctctagaagcatacactgaggctgactaagcagattccctagtggatcgaagatcaactacagggtattgtacttttcttggaggtaatctggtcacatggaaaagtaaaaatcagaatgtggtagtaaggtcgtttgcagaatcaaagtttagggtcattgctcaagggttgtgtgaactactttggttgaagattattctagatgatttgagaatcaagtgggatggtcctatgaagctctattgtgacaacaagtcaactaccaatattgctcataaccctatacaatacgataagacaaaacatattgagattgataggcatttcatcaaagaaaaattggaggaaggagtagtgtgtatgtcctatgttgcatcaaaccatcaattagctgatatcctaacaaaagggctgaatagttcaatgtttcacgatcttgtattcaagctgggaatggaagacatctattcctcagcttgagggggagtgttgagctgtaaataaaataggagaattattttcctattattttagtttcctatttctataaatagatagttttatgatttaagaataagttagtttcctattatgtctcttgtttcctatttcttctcttgtaatctcctatataaattgtgtgtataatcaatctaatagacataatttattatttttcatcccatatttcgtgtcaattatctcctcctcagtgggttttcattgatggtagactagatactcaggtgatttctaatgaaatgcttggaggtttacactttatagaaggctctaaggtttgaaaaaaattcgcaatggtcctttatcttcaattggatggatgataccattatcctttttatgcttttcagtgaaaatcttgaatcttaaaatcctcccatgtatacacggagagtagtttgctgttggatgtggatatcgatctggtccttttagggtgtatctgcttctttaggttataagatcagttacccattagttttggcccttcctcttaagggtaacttgagagctcccaccttataggatccgattaccaagaatgcactgaagcatgtgattggttggaagaacccctatcttttgaggcagtcaaatcacctgattcaatctttgggcttccatgaccaaggcgtttgcaggattaatcttagcattattttgtttttgttttcatcagaatcttagcattgactcaagggttgcttgtttgtccccttaagtgactatgcttttattccaggtcattgctttcttcttttgttggtttgtactcagcgagagggatttaatcagttcgtttgagaagtatagctcatcttgtccatattaaactttccttgttatttcaatcatatttcttcaattaatatgagtaaaaaaaatctacataaacacttatttactcatccaaaaaaaatgattaaagagaagctacatttttgagaaatgggtgcattgttgaatgaaggatgttaagatgaatgactaacaatagaatagaaaataaatatttctttgaggtggcagctatgaggcaagatgagaacaatcatctaagttgattttgccgtgcatcacggaaccaatgaatacaccactatgcatgagatatatagtgcaagttaaagctgcagaaggtcaagaggaaggccaaaaagaatgtgggctaaggcattgaagaaagatgtgattgacaaggatttcccaaagaatgtgaccctaaacaaagacaaatgctagaaaaggatccatgtcaccaatcccagtagttgagattagggcagttagaaagtgtatcagattcctatttggttcaactcccagttgcatgagaattccttttgttagagaatattgtataaaatatttcctcgatatttcattgtagaaaatgtattcttatgaacaaggtgttaggaatgtttataaatattacagttcatgtaggcttgtagaagctgtatagggatgtagtgatatgagggagagatgggaaacacccagtggaatagggcttggttcaaggtattgataataggagtaagaaacatgggatgcttctgccatggttttcattcctatgtcatcttccatctgtaatttctctatagtacagtggattagttttctttgtatgtagactaggcataattagcaaaatcatagtaaaacatcttatttctatgtgtgtgaatttaccttatttttattttattgcaaaaatcatgaattcaaaacctacgatgccacaacaaaggctttgttgagttccagtcttttgaactcttaagatttaattgtttctctccataagaagagctggatttatttccttttcattgatcacatgcttgttaatctggcgatcatgtagtctaattgttgatcttcctcaaaactagatttgctttgatatgctagcaaggaagcagatcatttaactaagaggggagccacctctcatttggagattgtttgggactgatttcctccctgagattttggttttgctttatttggatggtgttaaaattgtcacacttccttgaaagatctcccgtcctcttgtgtgcatatttttatcctttacctaaaagatccatgtttcttataaaaaaaatggaatctctctcctgaaattcttgttgtaaatgtagagtagatattcatttattcatttgggttgaagcaactcctgccttctagtcccaaacaaacttctgtaatattttttcccagtgcttttgcatattattgttctgattgtcttggcattttatagagat

SEQ ID NO: 12097 - DNA, 2183 bp, Vitis vinifera
  Intron number 2 from transcript GSVIVT01001187001 (locus G SVIVG01001187001) derived from phytozome v7.0 (chr-ID chr7 ; pos 1005027 to 1007209 reverse strand)
ggtatggttcttttttttttttggtcttttttattgcctagaaaatgaaggaaaagaaaagcaatgtgaagaaaatgttaagattctaaaggcaacttgctttttagggctagtttgagcggaatttcttgttttcttgagttctacatgatggaaattctgagattcagaattttgatttctttctttttctttccttttttttttttattattatcctttttaatctattttctcagaaaccaaacagaaactcatcactgatcttttgtctctgttgtctgtttcgtctttctgttgagctttaaccatgtgaagtacctaatgcgtttttcaagattggtttcaatgattcttggtccttatctaagctctgacgtctagctttcttttgtcgttttctattatgctatgtttggttgctatgaaactggaggaaaagaaggacaatctggctaataccattgctaggcactactaagtgattatcttttggcctgtaaataatgagaattcatagatttaaaattttactttgttttctttccaataagctctcatttctttgatgcatgcacacctacacccctttttccttttacttttgaaactggcatcatatttgggtttttttgaaagctaattagcatctaatgcaaaatttcctatatataattctttttccttttcctttttttttttttaaaaaaaaattatgtctctgatatgaaacaacaaatctaatctgttattgctttttattattttccatatagatttgatttatttttcattgttctaattttcttttccttcctctgtttagttgatgaaaaatcagagaatatagaagaaaatgaaattctgaataacatgctatctgttgttgaggtttccaaaagatggaaagacaggtcaatcaagtcaatcaatcatacttgattggggggatttgagagagggtttgtgctaaaaagatgtctttttaaggcattcaagatcctatttggataagttgtatttgtaggatgacatttattttgatctgaacctttttttgatcgccttatttctaaaaataccaaattaagggagctttgtgggggaaaaagagggggacagcttggagaactgcagctatatgcctttttgggagtatttggtaggaacttaaattgcataacttttgaaggtgtggagcatttggttcaaccacttaaagactttctttttctatcatgctgtgaatctatagatgtcggcccccttgtccttgtttgactcatagactgcttggggactccttagtatattggggtccttggatattgtttttcccatctgttggtgccctttgtatacccccatgcacatgggttgcgccccccttttttttttctcattagatgcctttcttataaaaaagatcaaatcactgcctagaaattcctctatgatgcattaaattgcattcataagtttgatttttggagtatattggaagatttttcatagtagattttatttgtggaaacccttcatgtaacttgatcaacatctaaagtatacctttgtgcacctatatattttcttagaaaccaattggattgctgcttttctttttttatttgttatttattcttcttttttcctttttctcccaatgtttgttaatttttcattagccctcagtttgatcactaagaaaaaggtgagggaatggaaagaacacaaaatggaagaccgaattcaacaaaatggaaaaccgaattcaaaccaaattttttcgcaatgtttgtcatttctatattcattaactgtgacatgcttctgcagttcctgatgcagaaaactatcaggttatattccttttcattctcattttatattttggtttgagcactggcatctgtagattccctatttgtttttcttctctgtgagatgggagatgtccactttctaatggaggttaaatatgtattattctattaacatgattttacatggttcagtttgttgatatacatgattatgtatcaaatggaagttttattttattgttcagattttgttttctgtgtgtgtgtttttaagtccccctcccccctctctttctgggtatttaagctgtagtttttcaaaactttactgagattgggtgatgcaatgcagttacctgc

SEQ ID NO: 12098 - DNA, 15806 bp, Vitis vinifera
  Intron number 2 from transcript GSVIVT01026719001 (locus G SVIVG01026719001) derived from phytozome v7.0 (chr-ID chr1 5; pos 5432410 to 5448215 reverse strand)
ttattggtggtccatcaacagaaggggcgggagctgtaagttttgctagtttcctagtaatcgcatgaaaattaagtttccttttgctttatttggtgttaaaatttcagaacctttgggtcctgtcaaattgtccttactgaatttgcatttctgtgcaatccctgtcagtggctgtttaacatttctttcatgatggaaatgttcattaagaaaagaagttgtgcaaggaggatttcatatatcaaagtgaataattggtcttcccaaaaagaaaaaaagaggaggaaaaacacgtccaggtggataagaggagcaagcttgttggtaaattcacattctgcccaatggaattgaagaacacgatgtttattaaccaaagaagggacatttttacaatacctctgcaatccaaaaagctgttccacactgaacagcggtaggtgaaggttgtggacagtccaagagatggagatcacatcactctctggtactatcagccaattattttcttcaattccagatcctgaattacaatatgagaggaataaagagttgcactgttcagggatttgggatactactaaaagatgaaaggttggtagtaaaactggggtcgtgcagttcaaatgagagagacaaggaaggtgacacaatggtggacactttccagatatagaggataaaggtcctgtatcaaccctgatcttatctctttaagaacatgtgttatatgttgtgaaaagggaagatatgctggtgatatgatctgttgctccagaaacaacaatccaagaggatttagatagtaaactagggtcattcctagcaaacctcgggttatgcttgtggatcaatgtaaaggaaacagtggctggcgaaggctattcgacttttgcaccctgggatgccaatgtatagtacaaaagaatccaagaggatttagatagtaaactagaggcattcatagcacagactggattacacatgtggactagtgtagaagaaacagtgtctagctgatggagaccatgccatctaggttgtgaagtgatggagcattgaaaaaccagatggaggttgacagagtatctgctgatgaagtgtgatgagcatgggatctagaagaactccctaattgtcctctttccccaatgttagaacaagattcttgtgtgtgctgaatcttttgctgtaattgtaacaacttatccttctcatctgaaatttcactgacttttgcagtctcatgaaatggttcagacacttttgcatcttgttgtttactaaagggtggtcctatctcacatagaagaaaagtttcaatgtagcatttcatatattttcctccttcaaccacaagtgtgcagagtatctctccagaatctggatagaaatcaattgatattccttgttcaagttggcaagaatgtcaaaaggtcatttttcttcaatcatcttgaacttatgagcttcctttgtgcaacctgcctcaacgagctgggggcttggcttatgcttattaaaagtattctgtccaaaaaaattagagaagattcaaagagatttttttagggaaggaaatttagagaagaaattgcacctagcaaattggatatgttggatcttgacaaggctttgctaggtaattggctttagaggtttgttataagtaaaatataagcagtggaagatgttcattgtggtgaagttcaatgaggaagagtgtggttggtgtttggaccagggtctgtaagttctagtttataaaaagagccctttcgaggccttgagatgatttctgtctttaagagtattagaactaattttttgtttgtcatttagtgtggggaaaccactttcaaggattgatttccagatcttctctttgttgtagtcatggtggcagaaattggaatgggaatgtggttagggtcattggaatctaaggttctttagaagttccacctttgggagtttgaattggtagaattgttcttatctttgtattcaggaaatggttctgtttgtagaaaaggaggataagatactgcagaagttatctatcgattgattcttttagtgaatctactatataaggttttgtcttcaaatcatggtattagtttcccatataaaagggtttgagaatcacttgcttcatctacagttggtttctccatttcagtgtttgagcgaaaattctcactttggatgaacttgagcaaaggtttaggaagatagcaaattggtatttgtttacttatttttgtgtaaggtggataaggaatcaaccaaacatgcgctttggctactgtgtggtggcttaaagttaggttgccttttgttttcaacttttcaacttttcaacatattggtagtatgaaatatggatgaatcctttgtttgggcatttagggatatgattggaaggtcaagtttgtagctttggctgtctttgagatgagaagagtttttttctcttttatttttgccttttgagtgtttcatgtatacatcttgtttacttgagttttgtatttttattgttttttaattcaatttttatttatttattagaaacaaaaaaattatttagctctttgaaaagaatcctgaaggttgtatagatggaagcccaacttaagttttgtgttgtttcatgtattttgctgcttgatgctcatatcccaaatctcttcttcattgtttaaacacatataccttacctatcacaaaaagaaaaaaaaaaaaagaaaaaaaaaaaaggaaaggaagaaagaacaaacaaatattcccaatgcttgtggtaggatgcaaaatgtgaggtagccaagatatgattgtgtaattctttggttcccattaagcataggataaatgtataaaactatgtttcattatttttttagaataaaattttgccattcaagttacttggtttcctttactctcatagaccaaggccaaaggagaccaaaatggataattgctaccattaagattaacagttgtgatttggagtgtggagttatttttgggcactaacttgacccattaggccataccataactaagtgcactgtcctatgttacatgggtttgagtatgggtgtcaggtgtgggtacgtgtctaggtgtcaaattctttttatcctaaaatcttaggacataaggattcaattgaaaagaatttcaataatgggtgtggaacttggatacaacattaatgaaaaataaattgacactaaatatgctgggttctctatagggcgcagtttttggtttttgtgtcttcccgccttttttggtcttttgtttattttgtatacgttgtgtataccttgtttcttattaatataatccttatttacctttcaaaaaaaaaaaaaagacattgaatataagcattgtaagttatttataatgttacttggttaatgtgggaaaaataaactttttcaatgtttttagaatcaaataagttattaaactaaaaaagttattaggtcacaatttactggttgaattgattgttcgattgtggtcgatccaagatcttagcatgacttcataaatatatactttatatataattaaaattaaacataattatcatgaaatttccgacgaatgataagaaagggaaggctgtcgcgtcggaagtggaggtagggggtgatgcgagtgcacgcgcaagggagcgcgtgatggtggcggtggagggctcgaggcttgaggacttcctgctgactgcagacgggacgcagcgtcagtcatgcgggtcgggccaaccctcgtatccatctcggagcgaagacgggccttcaggcgggccccatgcctcgggcgggttgggattgttgggccaagcaatgctctctcgctggtctaaggcatctaaatcccctgggttaactccgtctgggccggtgctttctgggagtgggaagcccacggaaaaggccttgccttcgagtctgcttcaaggggttgggcctgactttcaaagcccatcttcttctgtttcttttagggcccaggcggagaagggcctttctgttgcggagcgcaaccgaaactcgttgaggggcccagacgcggctatctccactttttgggtgaaggatgggcagtgggggctctgtggagatgagactcagtgtgggtgggggggggggggggatctccaggaccgactgcgccctgctggaggaagacgcaaggtatgataatgctctgtccccctctggaatggtggctcttgaccctccttctcatctcttttcttcttttggtcggactccatcgaaggagtctttcgaccgttctggggatcttgtggattcaaccaagggggatagtctatgcaatggaattgggtcttcagagcagtttgtagggaagtgctgggatttggtagagatcaacaacgatagcatggaggttaatagaaaggctttgtgcctagcccggcctatatctcaagaagagagcggatgggtggaagagagatgggaagaaagtgatttggctaggttcagtcaattcctgggattttcgacggagggcttagaggaagatatcttggagttcatggttaaaattaggaagaagagagaaagaattcacagtaaagttatgttggagaaatcgaaatttgaaagagagttgagaagacttgaatgttcagtcaactatgagggggggaagaagaaaaagggtactgtgcaaggaagagggtgccaaattatggaagtccaatgaaaataaggctcttgagttggaatgtgcgcggggtcaatgatagctccaagaggaaagtgattaaagctatgattagaaactagaaagttgatttgttttgtatccaggaaacgaaaattcagtccatgaatgagggtctggtgaggagtttgggttccgggaggttccttgattggggtgctttggatgctcagggagccgcaagagggattctgatttgctgggataaaagaaccctggaaatccttgagatggagatgggccaattctcaatttcttgcagctttaggaatgtagaggatgggaagacttggatatttacaggtgtgtatggcccgttttccaaagaagacaaggagaccctctggggggagcttggggcgattaggggaatctgggatgatccctggtgcttagggggtgatttcaatgtcaccctaaaccttggggaaaggagtaatcaggggaggctgactggcgccatgagaagatttgctcaggtggtggatgatttagagctcctggacattccattgcagggggggggggggggtggcttcttggagtgggggaaggaataaccaagcttgggctagactggatcggtttctagtgacccaagattggctggactgttttagtggggtctttcagtgcaggctgcccagacccacctctgaccattttcccgttttactgaaaggtggaggggttagaaagggcccctccccttttaggtttgagaatatgtggctcaaagttgatgggtttaaggatcttcttcggggatggtggcaggaggcgggggggaggggaagggctagtttcagattggctacaaaattgaagagtctgaaggataaaatcaaaacttggaacagggatgtgtttggtaggttggaagttaacaaaaacctagctttgcaacaagtagaattttgggatagggtggagagtgacaggagtttaacagaaagagagacaaagttgaaaacagaggccaaggaggtctttaaaaaatgggttcttttggaagaaacgcattggagacaatcttctagggagttgtggctgagggaaggtgacaagaatacgggtttctttcaccggatgactaatgctcatagaagaaataattccatggaaaagatcaaaatcaatgggaggtggctggaggaggagagggaggtgagagagggggttgtgaatgcctttcagcagttgttgtcagaggaccaatcatggaaaactgatatagaagggctgcagctccaaaggttaagccatgctgaagctgaaggtttggaacaaccatttactgaggtagagattcattcggctctgatggggatgaatggtgataaggccccaggcccggatgggttcacagtggccttttggcaattctgttgggagttcgtgaaagaggaaattgtggacgtgttcaaggaattttttgaagaaaagtcgttttccaagagccttaactctactttccttgtcctcattcctaagaaagggggggttgaggacttgggggatttcagacccatcagtttgcttgggggtgtgtataagctcttggccaaagtgctagccaatagaattaagggggtgttagacaaggtggtctcgccggaccaaaatgcctttgtgaagggaagacagattctagatgcctcgctcatagccaatgaggtgattgactattggtttaaacgcaaagagaaagggctgatatataaactggatattgaaaaagcctatgatagtatcaattggaaattcctcatgaaggtcatgcgaaagatgggctttggggaccggtggatgaaatggatttggtggtgcatttcaacggcaagtttctctattctggtcaatggggtgccagctggttattatcccaattctagggggttacgccaaggagatccactctccccctacctctttgtgttgggaatgaaagtactaagcgctatgttaagaagggctgttgatgggggcttcatttcaggttgtaacattcaagggagggggggaatggagataaatgtctcccatttactatttgctgatgacacgatcattttatgtgaagcaaggcaagatcacattacctacctaagctggattttggtgtggtttgaggcagcctctggtcttagaataaatcttgctaaaagtgaagtaatcccggttggagaggtggaagacattgagatgttggcggtggagttagggtgtaaagtggggaccctcccttcggtttacttggggctgcccttgggagccaaacacaaggccatggctatgtgggatggggttgaagcaagaatgagaagaaggcttgcactgtggaaaagacaatatttgtcaaagggtgggaggattaccctcatcaaaagcactttggccaacatgccgatttaccaactgtctctttttcgcatgcctaagctagttgtaaaaagacttgaaaaactacaaaggtattttctttggggagggggaagtatggaaagaaaaatccatctaatcaattgggaggtggtgtgtacccaaaaggagagtgggggtctaggtattcggaaaattgatcttttgaataaggccttgttggggaaatggatttggcggttcgcctttgaggaagattttttctggaggagggtggttggggtgaagtatggccagttgggttttggttagagaacaaaggaggctcgcggaacgtttggggtgggggtttggagggatatcttgaaggagtcgtcttggtgttgggataacatagagttcaaggtgggaaaggggactaaggtgagtttctggactgaccattggtgtggaaatgaggtgctgtcccaagcttttccccagttgtttgcgttggcggtccaaaggaacgcctcggtaaatgagatgtgggattctagcctcggtcaaagaggttggaatataagactttctagaaactctaatgattggtagctggacgcattaggagagttgctgcatttgttgagggatttgaggatttctcttgaagaggacgcagtgatttggaaaggagagggtcaaggccgctttcggattagagatgcttacaagctgctgtcagggtctaatgtcattaccttcccgaaaaagagcatttgggtggacaaggtcccaaccaaagttgctttttttgcttgggaggcttcttgggagaaggtcctaactttggacaagcttcaaagacagggctgacagtttccaaaccggtgttttttgtgtggttgtgaagaggaaaatgtaaatcatattcttttacactgtacagttgtaaggcctctctgggagattgtcttggccttgtttagggctaattgggtgtttccagagaaagtcaaagagatgttagtcagttggaggggcccttttgtggggagaaagaggaaaaggatttggacttccattccgttgtgtattttttggacggtctggaaggagagaaatagattagctttcagggggggctctctagttattcagaagttaaagaattcttttgtttgtaacttgtggagttgggctagggtgtatatgggagaggagtcctctttgcttttaggttttttggaatggcttgccgttccctaaggggtggtgagtgatggcttttgttttggctactatgtatacttcctgtatgctttgtggctttttgcctcgtttaatatatttgcgcttataaaaaaaaaaaaaatttaaaaactaaaaaatatttcattttttatctttggtattatcaaattaaatctgataagtataaatatattaatatttttaatttgattaaataaaacatgtataatatttgagcgtggagatatattcaagatgaaaagaaaaatttaatagttaattttatctaaatgagccttttaagtatttcctttctctccttatttgccatagctagttcaaaagaggcgtgggtggtggatttgtggcttctcctagcttctctaggtgtttaaatgattgggagattgagatcatggagtgtttcttggcgaggttacaagatatggtggtagttaggggaggagaggataaggtgatttggttggagacagagtgaaactttctttgttaagtgcctttactctagccttaagtcaaggagatcagtgccattcctagtaggttttgtgtggaatgcgtgagttctacctaaggtgagttttctttcttgggaggcgacttggggaaaaactctttaactcttgatcaactacaaaggagaggttggttgctaactaatagatgtttcccatgtcacatttaggagtcaattgaccacatcttgctacattgtggcaatgtgagagagttgtgatagcttttgttctctcttttttgtgtttcttgggtggtaccttctgctgtaagagagactttggtaggttggtatgattcctttgttggaaggaaacaaaaaaaagattgggaagcgactccttgatgccttttttggaaaatttggagggagagaaatagaagattgtttgagaatgaaaaagtctttgatcaaagattgaaaatcttgtttctttgtaacttgtaatcttggaccaagttgcatatatgcgaaggtctgatgtccttagttgacttcattgattggttgggttcactttaagggggagtgtagttttttgttttccctttccttctcttggcgccttttggcggtcgttgtatacaacgtgtgtactttggtgtgcccttttctggtgttttttaattccatttttatttacctatcatttaaaaaaaaaatttattatattgtttaatttatattatttttgtaattatcattataaaactaaacgcgtagttaagtatatatgtttattggtggtaactaatagaaatttgaaaagaaaaaacaaaccaacattaacttattattattatttagttatttatttttattttttgcactacaatttagcaaatggctaaatgatctagtggccatcctttggatcaaattccctcttaaccaaggtttgagtatctcattgtagtggccatcttttccttctcttgtatcttttcttatattaatacatttctcttcgtttctgataaaaaaaaaaagggtttgagtcctcccacgaccattgattttttatttcttgccacttctctatcccatgttggacaagattttattttatttttggtaggtaaagagaagtggtatatatagaaaagaggagacacaaggaacaacgacctcaaagtatacagtaaaagcctaaaggctcatcccagagggaaagggaaagaaggaaaaaacatcacctacccttactttgagcctaaccaatcaatgaaggtaacaagtaaggctcatatctacagacaccttagaccaagaacacaaattacatacaaaagaattcttcaatctttggatcgataactcctcattgtcaaacgctaacaagttcctttccttccacattgtccaaaatatacataaaggggccgcttaccaggcctttttacgaactttacctatgaaggacccatgccactcaagaagagtttctttcattcagtaggagagaatccaagacaccccaaagagagaaaaaagtagatgccaaagaacccgtgactttgtatagtgaagaagaatgtgatcgactgtttctactttagagaggcaaaagaaacatctatttgccaaataaaacccctcctttggattttatccagagttaaagacttttccctaagttgcctcccaagtgaagaaagccaccttaggtggtgcacacgatcttcggatgttgctactagagaacaaaagagattcttcgggctccaaaatagaataaagagatttgactgaaaagttcccacacctcgaagctatcgaaatcaccctgtcatccacatccctttgcaccctagttgtttgaatcttcagcaaaaattgctccatagaatccaactcctaatcattaaaggccatagagaaatgaggggcccaaccacccctttcaccttcgctgttccaaacattggccacccaagcttccttggactaagtgggtgtttggtaaaccaatttaataactgaaagtaacttaataacttaatttaagtcattaagtaaattaagtatgtttggtaaaataatttaatgttataacttaaagtaaaaacaactttaagtaataaataaaaacaattaacttaggtggcgtttgtttttttggctttttgctgaaagcaatttgttttcagaatttaggttgtttgtttttctagtttttggcgacttattactgaatttttaaaatttttaactttttctaaatagaaaaaacaagatttttaaacctccccaaatcacgattgcaacccgacaaagcagtgaaagccaaacgaggtgtgattagcaagccagtcgtagatgaccggaacaacgttcttccaccgttgtagctgtcgtcgacaggctgctggtggtcggactttgccctctctctcattctgcctctgtctccttcttcggcttcgacgccacgctttcctcccgtggatccttcgtagtagtccctgaccttaggcttccttcctctcttctttttcaccatttgagactccattgaagctcttcacagctttaactacacttcatgatcggaaccagaactgtagcgatccgactgtggacaaaaatggtgcttcacgctctctttaagacggtgcccaccacatgtcattgagatctttgcctttgctgaacagatgggcttcactgcgtgtgggtttgtgtttgtcacttctggagaccctaccagagacatctagagggttttgggttttggcgaatttgcgattttatgctaggtttgtttttttttttcttttttctcactttcaccatttgacaggtcctttttgtttggttggatggaaaaaatggcagaaaatttttactctttgagtttttctgggttagcgttgggagagagaaggaaaatttactgggctttagtcattaagcagataaatggtagtattaattattttttggaaggatgataatgataaattatttattataacaattttattattttgaacttttcaaaaatatgttaaattatattatttttaatacattaaaatattaaaatattgatttttagtatataaaaaaacaatcagcttaatacttaatagaaataaaatattaaaaaaacaaacaacttaatacttaatactattaagcattatttagtattaagttaaatataagttctatttagaattaagccaaaaaaacaaatgccacgttattcttaagtttacgttttgattttacctttttacatttgccccatttacctctacgatttcttttgctactccacgacttacattgttacttcacctactttgcccttactataatttatgaggataaatatgtcaatttaatgatttagaataaatttaaagttaattttattaaataaccttaatacttaaagtaagaattaaacagtaagttttaagttaacaacttaagtatatttaacttaaagttaactgaagtcattaagtaataagtattatgttttactaaacacccccaaagaaagggcaaataaggaagaggactcacaaagtgactcatcttcacaccacttgtccctccagaatctcactcgttgaccattacccacctggatgtcctatgtactattcaaaaaatcccattccttatagcttcccacagccccacactaaacctctcactcaccttgtaagaatgccacctccaatcatcttttccgtatcttttactaatgatttgcttctaaagggcctctctttcattggcataccactaactccacttgcacatgagggctttattcatcacaaagagattcctcacacctaatcctcttttctttttctcaaaacaaaccgttttccaccttattagatgtggtttttgcacatcccaaggagcctaattcggctttgatatcatgtggagaaaaattgtatttcaggttcatatgttaaatttatacaacccttgaaatatatacagtagcagaaaagaaaaaataaagaaagaaatattaaagatccctacaaatcaggaattatgtgcacacacagctgtatatgtcacagctgtatcttccacatgcattctcagctatccttggaagaagcaaggttggcctgtctgctttggtgtccaacgttttggttcccattatttttatcaatagactggttttccatggagtttccagcatcgccttcttagtattcctcagttccttgcagtagacacactagagattatcctttttgcttattggtcttggttgaccaatatttccaggttcagctgaggctccacttctcaaatcaatgcttggttatgtagtgactagagcagaacagtaggaacattaagcatcatgattctccttccttcctcagcccttataattgaaaagactttgttcaatgaaggtagcaattccctagaagaacctggaccctcacttgatcatattctatgtccaaaccagcaagaaactgaaaaatcctctctttccacaaactgtgtattattacagtatcttcactgcacttcatcttaaaaattttggtaaggatctaagttaagctataagcctttcattgtattgtaattactcaataacagatgaattaccttgcttattggctgtaattctagttattatttcatagatttgagtagcatcttgaattctagaataagtttgtttaggagcctctgatatctcctttgctgttgtgagaagcatgcatgtcccactgatcagaatatgactcaacttcccttttcctttcaagaacatcttcacatgctatgaccagtctagataattgcaaccattgagcctaagcaaaagttgcaagatctggtattctccagatggttgttatgtggcagtgacgttaggattaggatgggcaacaatgttggtggttctggttgcagaggaatttctggaggttctggacattttagaataggatgggtagctagattaatcaacaaaagctcaattgaagggaaactttggcaataaggcgaagagcaatccgcaaaaagaaaaagtttctgctggcaacaaaggctgtgcaaccctttggtttttttggcgattaaggccaaaatgaagtggcagagaaaggaaaaggcgaggagaagaacttggtgctttgatacaatgtgggaaaaatggtttaaaaggtgtgcttaaggtgcgcctgggctcaaggcacaaccactccccagctatagcgccttaattaccaagacatgcgccttgttgaagaggcacacctcgtctagtttacttttcatttttaaatatttatattcttaaaatttctaattatatattgaaatttatataatttcattattttttttgttgaatgtttcttttaaatgtttaaaattgtaacttttttattgattagattggattttgaatcatattttataaaattgatatgtatactagagcaggtttcacttcactcaagagtgtgccttgcacctaaaaatagaatacttttgcgccttttaaaactattgctgcaacttggctagtctcaagcatcatcctaaataagttagattgactgacaacttaacaaacaatctgagtcttacaataaaagagagtagattaaccaagcaacaactaggcaacccccaaagagatgaaaacagtaaacaactcatcaaagaagtctcacacaaagcaaatcataggaaataagggcagaatacaggaaatgaaaaagctcaagccaaaacccagtatgtgcttaacattaacaagcttaaaagatggagaaaaatgaaatcttctaactccaaagggccttagactcctactgacatccaaactgactaagatagtggctgaaaaggggaaaaaagatccaatcaagcaaatatagtgggaatatcaggtcttggccaaacagctcttgagaataatactagaaaaggatagaaattaacccaaggtgaatgatagctgtgagtttggatgatcaaatttcccttgagaatgcagagtttgttggtgaaagcaagagagaagttttttatttaatgttttctttatcattttttatgcatcagtatcttgctgatgcagtatccatatctgaaatcaagaccagtatggacaggtttgcctgtcagatattctgtggtttggtttggttcaaagttgtgtttctcctcaattattggtacaagaagaaggaatggggggatgggaaaaagagaggaggctggaaaaagtttagggtttcatttaaaatggtaaaaatagtgaagtatacctggagacaaactttcttttgttttcgatcagaaacaaagatagattgtatattagtaaatagatcaaaaggaggatgcgagatcctccccacaaaatacaatatctgatcagaatatgacttgaactccaccactatatgtggaaacctctacaaaaattagtccaattatgactataaatcaagacagaacaaagctcatctaattgttgtcaacccccttttgaattacaaaccaaatgccagttaagttgaataacattgagaggagcctttaatgcaggagtacaagaagtccataaggagtgcctttaattttctgcagttacaaacttataaatatgagacacgaattaataaaaatgaccatgctgtccaagagctagaactttgctcctttttcttaatagaatatagccttgttctttctgaacgtgatttaatattttcagttaatttattgttttaggaattcaaatagttgtttatgttcttatacgttatctgtatgtatgctaaattttgcagattgtgtcaaaaattttgtctgaaccaattcgttc

SEQ ID NO: 12099 - DNA, 1655 bp, Vitis vinifera
  Intron number 2 from transcript GSVIVT01016901001 (locus G SVIVG01016901001) derived from phytozome v7.0 (chr-ID chr9 ; pos 2391846 to 2393500 reverse strand)
caaaaattcttcaagagcatcgtgaagagttacaagtatgtctcttgatacttgctcaataatttgctttccttttacccaaatttatctgttctaccatcctttatgtgagtgggtttctaggctccatttctctttatcgcttctccacaggttcatttatgtgtttaagttctaaagtgaaattagggttcccaaaacaagggaacatgagtgcttgggggagaagtttagctgaaaatgatatatgtttcctgtcccttcagagcaaattttcacaacattcagataaatcattgggctggtgctcgtttaaaatcattataaatttgtaggatttactgacaatgaacactatctggtgtaaaatgcctagtagatgaaccaccaaaaggtttaagaactaaaagtatttcatgaggcatttgttcaataaccaattaaactattatcaaattgttatcaaccaagagagataagcaggaatcatcatgaaatcatgggttaattgtaatcaatgcacgtctgtgtagattttatatgtacattgcaccttgtttttgtagggaatttgatgtttaaaagagaagtttaaaacttccctcatattgaaaacgggataaaccttaataagtattgatttggtagtccgattttccttaagattacaaaatcataatttaataggtaatttataactttagatatttccaaggcatgggattattgttatgcatttttgtgtacaaaatgattcctacccatgtttggccacaaaaggtcacgtcttcctaaccttttgtagacgtcaacaaatgaaaaggaacgatatgtactcctctcaaagtcagaaaacagattttttttgcttctcttatttcttactcgggcaacgagatttgcatggttcaaataatcttcctatgaacatgtgctcgtggagatactatttcaagccattggggttgtatcttagggttgttgtcaactgttgtacatgcatgtaaggaggcgatagctgctttagtacgtgtctacacatgtctcaccaaaactgaccaacttttcgtaaactttatcttaaacatatacactatagctttgttctaaataatagtgtttattacatatttagatttgaagtgtttaaaattgaaaaatgttggattttgttagattagaaaaggagataattttctataataatttatttgaaaataagaggaaaattttactaaatgttgtggaaaacaataaatctactaccgtgttctaacaggttttactacaataagaacttgcttcaaacgatttgttgtcttgtatcttgttttctttatgctactctatttattagttgtagatatttaataaattgatttcaaagctaactgaagacagacaaaaactactgcggcctcaagcattctttaatttcaaagctcctgccaataccattactaaaaataaaatactaaaatgtatgggaaatttttcatgactattattgttttgaatacattcaagcttcctatttcttccttcttttgtggataaatgattttattccttttttcttttccttttttttttttttttcttcttttatattattatcagggaacagtcattcttgtttttcaaccagctgaaga

SEQ ID NO: 12100 - DNA, 2174 bp, Vitis vinifera
  Intron number 2 from transcript GSVIVT01028725001 (locus G SVIVG01028725001) derived from phytozome v7.0 (chr-ID chr1 6; pos 19389600 to 19391773)
ttgtgatcaaaccagaatttcggatctctcctccggtatgttttgagtttaatactccctaggtcttatttgtgaatgatgattacgtggttttcaagtatgaaaatgttgtcttaaattgatatcaatgattgacttggtatgtcttgatatttttttgtactcataaaccctatgtttgtgatattgattctgtgataatgatcttgattttttatgttatctattttggtctcttagtttttccaatcaaagatcaactcctcttatgatggcatgtttacaaggtgcctcctattattattattttattaggattttggtcttgtactatggtgcatcttttttcaggcacttttaatatatcttctccttttttcctttcaaaaaaattatgatttttgtttttcttgggcttgtccctaggattcattgcttattggggaatattaagcaaaatccaatagattgttgaggctgcatgtacaacctaatttcacatctgtagttttattcatttgtttaattattatttattttggttagttttcatttatttgtttaattgttgttttttttttgttaaaaacaataaattctgtaaatttaaatagtaaaataaaaagtggatgagaaaaccttccaaaaaatacaaaagttgataaaaaaaaatggtgttattcatatgccataatgaataacacatacatgcatacatgcaggtgcctctgaaatgcttcctagtacctccattggagccgagactcactattggtgctctcttccttcccaattacacatacatatattaattatatatatagacacatatatatccaaaatatgaatgacaaaaatgaaataaaattttgagccaattggtgaaagaacaagaagtaactagtaaggtttcattggaagccctaggaagcttgcttttagtggaggcaccccattccatgagcaaattggcttctgaatcagcaaatccaaaatattctccaaaccaaacaattgaagtgtggagagtgtcgtactattgtagtttccatactctccaacccccaagcacacacaatctttgcaatgattgtctcctcctctcctcctctttgcattcatttttggtttatattcatatgaagtttcctgtgcaccttcttccattcatgatatggcagtcaatgctactttcaatgcatttttgctctggcccttgcaagtcccatctcattagtattttaactatgatttgtagcttaagtatatggtttacattgattcatgtaactgatgtggcagttgatttggaattgttattggttgatcaagtatttctttttttggatagataaaacaattgcattaaaaataaaaaaaaacgccacaaggttgcaccaaagtacattgaacatattcaaatagtgcctaataacacagaaacaagaaaagaaccccagctacaaccccctcccttaacccaaactcagccactcaataaaatcaattaaagacatagaatctatctctatgtacttctttacccaagaaaacaaatttctaagaaagaacatcttcaaaaactgagctaaatgctcctcattatcaaacaacctagctttctttccttccaaaccatccaaatgatacataatggagctggtctctaaaccttttttcattttttgcccacaaacgagctgtgccaccctaatagagcttccttaaccatagcagcttgcccctaatggatatcaaagagatcaaacagcaactaccaaaggatcctaaacaatgaaaaatgaaggaggatgtggtctatggattcttcttctttgcaaagaaaacacctattgaccaaagactaccttcatttttgaagctaatctaaaatcaaaaggttgatgaaataatacttatcaatctaaagcaattcctttttaaaaaatgcatgagaaagtgttcatgattgtttgtttgtttaagtttataccttactatgtgatttatacttcttgactcctgtgtataggggtcgcacccttattgcggggcattctttaagaaatcttttcattgcctatcaataataatgtattttctgattttattgggtttgtatttaacgctcatttttagcctcaattatcaccacaagtgggagagattccccg

SEQ ID NO: 12101 - DNA, 2728 bp, Vitis vinifera
  Intron number 8 from transcript GSVIVT01007980001 (locus G SVIVG01007980001) derived from phytozome v7.0 (chr-ID chr1 7; pos 7006644 to 7009371)
gaagaaacctacaggacaacctttctttcggagtaggtcttatatatatttacattatcaacttaattatacatacacttatccacacatgcatgtgcatgcatattttagaaggttttatatgggttatgctaccaatctgacccaaaagcttagactgttagttaatggtcaataatgtatgtgaacatcaagttgacttggttaaagccctaacaacctgcctcatggtcagccttctttttgggcttgcacatggactcgatcaatgggggaaataatatcggagaagttcaaactcataatctcccataagtcaaagttctaatatcatattagttttcaagtttaacctaaaagcttaaattaagtaatggacaaataatgtatatcaagtttacttgggttaaagccctaaccctatgtggattaaattgggagccacatgactgtcaaatgaaagcgttttttttttatttaatttttattttagttttgttaattttatttctttatttattttatgaaggtcagttgtttaagtagaggctaatggacaaaataagtaaaggagatagtactgtgactcagaaattccttgtcttttttgttttttattttcattttcagtaagaggatccccttagtctagcctatggtggaactacatggttaaaactgaggtgaaaagctagcttcctttctataacttagatcagaccagctgctctagtcagttccctctttcataggcagagatattcaatctctggagcaaaaatatatgacagaagataacagctacgtgaattaagttatagggatcttcttggagctgttggaaagggcatatcagctcataggaatattgaaaactgttttttcttatgaatatctgaatctatttggtgacactgtttttttatattttatacatattcttgttttattcctacactttatagctatcttgttgcctaatcctatgtattttcggaagaatttctcatccttcacttgtatttaaatattaatactaatgacttatttgttttcaatcaaaaagaaaaataaagtaattagtgaaattgtacaaaggaattggatactacattaacaggacttggaggaacttgtattcacaaagcctttccatctctgaagtgtcttggggtgcgcctttgtgatacactttatatagattactaggtgattttcttatgattgatttttcttgttatttcccttctcttcttcttttttgtttttatttttctaattgttttattgttttattgttttttgtttttgtttctttttgcttcctagttcaggttctgaattctctgagtctaacatgcaattcaaatgatttgaggccattacaaaattttgtgaaggttcctcatttatatatggatggggcaacaattcatcttctaatcaatgttaatgtcaggcatcacttgctgttctctgtcttcccttggattaaaccgtcctaccaattctagtagagtagttaaattataagatggaaggtgaaaagtaatggataaattatctgaatcatttggtagattggatcaacttggaacactgatctcttgttctcttcatctcctcttcctcttctccttctgtcaaatatgggaaatccagcatccttactgggtttgcaattcccatgttttgcatattggcaacatgtcagtaacatccactttgtcaaatcatatcaaaaacattggagatggatgaaagagaaatgaatacccattctgggtcagtcattcttgtgagccaaacacccttagtgtttttctccatgattgtccaccttggggttcttttttgtattttttttgtttcactaggtagtattgaatccctggtatgtgctccataatggtcgcatgctagctctaagctaagacacctgtggttgatttaactgaagtttcacttaaaatttcaatgcttgcaagtttttccaattaaactgagagacaattattccatccgtagctgcctgttatattacttattttcaaatatgcaatatcttctgtggaaatgtcagttggacactttgatttttgacgctttcttatcgctttctgtattatttcttatctactatcattcttttgatgcttccagtactgtcatgctatttcttatttccgttagttgcatcttcttgttctagatatcaattctaagcaaattctaaattcttaggacagcctgtttactaacatttgttcaatgttgatcatggatacttgtaaattttttcttgacaataggcctggagacacccttgcaaactcttctgattgctattcttgcatatttgtgttgattatgaggattcttagcataaattcaaatacctgaatgcagaatctttaggagttgtgcctttctgttgatgtgctctcacaaagatctgtgagcattataacagttacacctatattataacggtcatcccacgtgttcgatctgttagcttccaggctggaatttattgtgccacttcacctttttatttttatttttcacattgcatttattttgtgcatgttccagttattttatcatgtaagtttatgagctagatactaattttaactatgactgagaactcttacctgttatttctttgtttttaactgtgcatgcaggcctcccttcacttgttgcatttccctcaggttgt

SEQ ID NO: 12102 - DNA, 1242 bp, Vitis vinifera
  Intron number 3 from transcript GSVIVT01000316001 (locus G SVIVG01000316001) derived from phytozome v7.0 (chr-ID chr3 ; pos 11313880 to 11315121 reverse strand)
cggccttgacaatcctgcagatattgatcttgtcagtttctgaacctttcttttctttttgcatgtggttgatgctgctcatactgaagctacaaaagggaacttatgaggctgtgatatttttcttgtcttcttattgtgtctctgtttggtgacaatgctggtatttgaattttagctctcaattaaagcatctcctttttctatgtaatcctcttgttagcataccatgttcaattgaaagaggtatatatagacacacactaatacgataagtgcataaatgcttgcaataaatccgaaaagaaggaaaaaaaaccaaagtcagtccacaaccaacagtcagaaattaatctatgatgtcatataaacaacaattgtataattctaagaacctattctgtttatctcaaacgtctaagatcttggtggacaaataaaaggctaagaaacaacctcaagataagcattcctcctgaacatgcaaatcaagtttcacactaaattaaatgccagcatggttgatctacatgcaaaaataacaaaactgtcttttgttatttatgggttaataactagtgcacaaaaggcaggcaatctaaccatgtaaatgatcctccaaagatcccaatggcataaagtcatagacaagcagacgttggtccccatcagcgcaataaccaatcaagttaacaaggtttgggtgatgtaagaggctaagcatgagaacctccaccaagaattctctatttccttgaaggccatttcggtcaagttgtttcacatcaactacctgcaaatacaataattcattggaccaaaaatcattaatgaccagataagacacaatgaccagtgtctaccggtcgagtccacaggacaaccggttgaaggtaaccggtcgaccggttgctctataataaattatggtgagataagcatagcattggttatggttttgcaactaatcaagatatatatacaaacagatgtataaagtatctcgtcgtagtttattatttattaactagcaataactctagttatataatttatcagcatcttgtttacattttttcaaggcagtagctcaagtaaaatgcacataacaaaaaatatcatgagtagttgggtattagtttttgtttaagatatttggattccagaaaggaaaaaaaaatctatatatggagtcaaagcaatagtacaacaaatccacatataataatttcatagaagaaa

SEQ ID NO: 12103 - DNA, 2507 bp, Vitis vinifera
  Intron number 2 from transcript GSVIVT01018810001 (locus G SVIVG01018810001) derived from phytozome v7.0 (chr-ID chr4 ; pos 19669214 to 19671720 reverse strand)
cacattttcggctatctaactggccttttgtgagtttctcaaaatctttgattcttgttgttattgctagtgattttcttctaccatcattcattgttgacggttgtggatgaaagtttctggatcccataagttaattgtttggtaaatcccatgctagaatgaatcttcaattgatcataatttcaattatcgtattataagtgattcaaccaggtgtcttcattagagtatattaatgtatttggtgctttctgatttatggctaatttggatattgttactactcctgctttttggtatattagtctccccatagtttagattccagggtttggatatgtggtagttttacatcctttgcttattaagttattgttgtaactagtttagctgagacatccagatgacatctaggtgattgatgctccctaggcaaaatatgacctatttcattaagagaacatgggttttatttcaactttcaagagaactttttatccttgtacatattatggtttgcatattgtgggaaatttgcattttatgtcctgctcttgcactggtgaagtctttattctgcttggcaatgtgcaagtaagcttctttaaccccttcattgccaaagcagctaatttttccagagatatcctcataagcgtgtactgtcttctttttatattgcggaaccatcaagaagattcttgtgtcataatatttaaatgttgtaatgtttggttccatgaaagtactaagaaaaagaaaaaaatgttaaggaaaatgattttttcacatttggtttaccatgaaaaacataaaagaaaaccaaataaaattaaaattaattagaaacttatttaattttaaattatttaatctttatataaaaggggaaaaataaatgaaatgagtttgaaaaaacatgtaaaaataatgaattttttattttcttttattttttcttttcttcaatttttcatctctaaattctttccttgcattttccttcaaattttccaagaaccaaacataaggtagaagatcccttatttttcactatcatcttatggggttctaattattggaacattttctattcagttggagcttgctgattttgacattatccattcaagatgatatcaaatttcaggaacttaagttttcaactctgattgacattaatgagtcagtgctcttgcaaattaaaatacctactccaatgtctcatggctttcattgatatctgatttttgcaaactgcattgcttctatcaggacctctgcttgtagaatattgtgaacagaaatgaacaagttatccatttattctgtttggtcatgcacaccctcttgaattattaaaaacttaatatgtgaggcatataaatgttttgatactatatggtatgattactttgttgatctaggatttaatctattagttgtgaacaaactgaaaaatttttaactgatgacttccattttgatttcgcaagaggttgtccccatcttggatgggtgttgctacctagaagtgttggatgatgagccaccaatttgacagcagtattgctcatccgtgataaacttaacatgattataaatcacccccggacttacttcctatttatataaggaaaacaaagagacctgatagtaaaactcttgctcatttacccctttattatttcctctttctcccaacaaccaaacaaaagaaaatgctttcctctgagtattcttttcttttttccaattatggtaagaaattaaggacctgtttggtagtttttttttaaaacaattctaaaaaatagtttttgagaacaatttttaaaaactgttatctaatttttgtagaacaaaagtctatttggaaacctaaaatgtttttaacctatttttaaagatattttaaaaataatttttatatctagttttttatttttaattattctacatatttgtataattattttttaaatcaaccctcagaaaacaagtgaaaataacataaaacaactaaaaaatgttctctgaaaatactctgttttctattcttataaaataattttttattgtcaaacgtgttttctatgttttttattttggagaacaaaaagctgttttttagaacagttcccaaactggccttaaagttttggcatggaacttaaacccaaaaaaactgggttttgaatttgttgaacatgttcatatcccacttcatattcatttcatccccatcaaactttcaatgagtctgctctagtcatgtctttcaaatattacactacatgaattgattttagaacattaatgactgaccctgttatcaatctgtaatgttggaataaatagcaatatttgtataattcttcctgctgtctattaattgtgttaaccttattgctttgacctatatgcagaactatgatttttatgtattttttttccttatttttttagtttctatatagcagcacccctttctctttgcacct

SEQ ID NO: 12104 - DNA, 5581 bp, Vitis vinifera
  Intron number 3 from transcript GSVIVT01005224001 (locus G SVIVG01005224001) derived from phytozome v7.0 (chr-ID chrU n; pos 19463892 to 19469472)
cctaagtgttgtgccatctccagttgaggccataggtatatgtaaaccactgcagaatactaatgtatgagatagttcccattatttttgagagattaacttgttaataattacacggtatttgcaaatacttcatcatatatattcccactgacagtatgtgattatcaacttcctttatttggatgttttatgcatgggtcgtattctcattcaacagattatatcatagtttattgttctatctgaaacaaatatatgagcttcaaataaatttaaccatagtatttattagttaaatttgttatattcttgtattcatatcgtaggtatgattattgaatcatgttagataagattttttgatgcttgagttacatattattgggaacatgtaaatggtatcggacatttacagggagatgaatttttaaattccttgttatctaaaatacatccatagtctctgattgtggaatatagatgatagatttcttaagcgccagattagaatgctcttacttggaagatgacgaatcaccgtaaggcacttttggaggttttccagtaaagaaagaggttctgttcatagttccttaagggttatataatcttatgcgtggtttacaattttgatattgtaaataggattatgtgcaatgttgattgctgatttgttgtcgcagtagagtctcataggtgcctcccattgaatcttcaggttttctagaattatttttaaccatagtagttcacaaattccaggtgtcatcaatctaaacttagccttagcgcttgatctcacaacaacattttgttttttgctcctccaggttattaggtttctaccaaggaatgtgcaacaacttgacgttgagcgtctatctatggtcaaacctgcataattggcatctgtataagcttcaagtgtcaaacttgtccccttcttgaataaaatccctttccctagtgttcctttgagataatgtagtattcaatgcattgcttgaaggtgagtctccttcaaattctgcataaactggctgaccacactggcagcgatgctatatcgaatcttgtgtgagataagtagatcaattggcccactaatctctaatagtttctctaattcacactagcatcttcattattgtcttagagcttatgattaggctcaataggctgtctgttggtttacacgctaacttcccggtttcctttaacaaataaagcacatccttctgttgagatacaaaaattccttcttgtgactgtgtcacttcaatacctaagaagtacttcaacttgctaggtcctttaatctcaaattctcttgccaaacacttcctcaaaccatctctttcctccttatcattttcaatcacaattatatcatccacataaactaacaatgaagtaactccccctgaagtccagtgtttgatgaacaaagtgtgatcaccttgactttgcttgtatccgttagtaatcatcactttagaaaatcttccaaaccatgcacgaggagattgttttaagccatacaaggccttcttgagcttacacacttttttgccttctaggtttttgtcaaatctaagaggaactttcatataaatctcatcttcaagatcaccatgtaagaagcattcttaacaccaaattgttgcaaactccattcaaagttgacaaccaaggataatagcacccttactgtattcatcttggctacaggtgcaaagatctctaaataatccactccataagtctgggtatatcccttggcaataagcctcgctttgtacctttcgattgaccccgtctaccttatatttcacaataaagacctacttactccccatcggcttctttccttttggcaactccactatctcccacgttctattcttttctagtgcttccatttcaatattcatggcacgcctccgctcttcactatttaatgctttagacaaggtgttaggaatgacgatagtgtttagttggataaggaagactcaatgggaaggtgacaatctcttaaaggtcatgaaataagaaagtgggtataacaggtgtttgaggcattctcttgtgcctttcctaagagcaatgggcaaatcatgatcaccatcatcaatggtggtagaaacattatcatgagaagattcaggtagagaaattacctcatttccaggggttggttccaactgttggatttgcacaagttcaatgatgggtgcttgcctctttaggtatacctatagtggtctagtaggattgtaagttgattttttgttagccaaagacatgggatcaggagaggatagttcgacaataggcaacgtagctagagtggggctaggcatggtacaaaaagtatggttggatgaagaagattgggaagtagagggcaaatcaagtagaatttttttttgtccttatcttccttgaatgatgtctctccctaaagataaggattcgtaaaataaccctatttttcaacaaaagccacattagcaaagacaaaatctcctagaaggtggatgataacatttgtaacccttttgtgtcaaagaatacttaacaaaaatgcatttaagtgtctgtggatctaatttccactattacgagcatgaatgtgaacaaaggagacacaaccaaagattctaagtgtgacattattcgaagtatgaaagttgaggaaaaaatgagaaaactcttgcgtaggactttgaaccccaatacccaagaaggtaatctgttgataagatgggctgctgtaagaactacctcccccctaatggtgttttggaatagaaaggcatggataattacaagaagatgaccatatttctttttgctgaccccgttttgttgaggagtactaatacaagatgacttgacgactcatgaataatttcttctttttgaaaataaggaaacaaaatctgattaaaataatctttggcattgtcagatctaaacttttttattctcacatcaaactgggttttgattcatattatggaagtttggaaagacattacttacatcagatttttgcttgagaagaaagatccaagacacatgagtacaatcgtcaataaatgaaatgaaccatctggctcctaaaatattaggaaccgtagagggacctcaaatatcactatggataagagaaaaacgaatagaagcttgtttattgctatttgggaatgaagcacaatgatgctttgcaaattcatagatttcacaatgaaaattttctatatccaattctttgaatattgaaggaaacaagactttgagaatactaaatgagtactaattgaagatgatgaagcaaaatcttgtctttatttgagatggagattttggtgaagtatgacaaaggaaatttattctcaatcctattttgatcacctagcatgtcaaggtagtagagccctatctttttccttagcaagtccaattattttccctgaaccttggtcctgaaaaacaagatgagaaggatgaaaaatcacattgcaattcatgtctttagtgagttgatgtatggaaacgagattagttgaaagctttgctacatgaaggacattttttaggataggcaatgggtttatatggatttctccttgaccggctacagttgtcagagaaccacctgttgtggaaattttcttgttgcttggacatggtgtgtatgaaacaaatttatgagaagaattagtcatatggtctgtggctttcgagacattaaacacatgagaagttgaatacttacctgagaatgctaaggagcaagcactgggaggtttttctaaagactcaaacaaactttttagcctctcaatatcttctttcttgaacttgaacttgaactatccatgctcctgaatctcattctcattgttcgtttgattactgctggtaaaatttgcgtgtccttgacctttttgttgttgtccattgttaggcttccaactcctatgactgttgttggattttgatggtctgtcgtgcagtttccagtacatatccttggtgtgtcactgttttttgcagtaagtgcaccatataggatttttatttgtgatttgggaaaaatataatcgctagttattagcaccaggctgatgttccatgcctgaattcttcaagtttctagcagttgagagtaaaactgaactttctgcaataggggtttcattcatcatcacccctcttctttcttcctccacacgaatcatagaaatagtctcatttaatgagggtagatcctcttttcccaaaatctgaactctgacctgatcgaattccaaatttaaaccagtaagaaattaaaaaattctctctttttccacaaacctcttcaacatagctgcatccttgctacatttcatctgaatacattgataatgatccatctcttgccaccaattcttcaaaatattggaatattcaatcatagattgctcaccttgtttggttgctgaaatcttggtcttgatttcaaatatttgtgcagcatcacgtaccttttgagtaagtctgtctcactgcatcccaaacttctttagccatggaaaaaaatatacaagtgctactgatctcaggtagcatcaaattccacagccatgacataatcatgaaattgtcctcgtcccaattctggaattttcggatcactctgctttggtctggtgctgaacaagtggctgagctttcctttccccttcaagaacatcttcacaacttgggaccactgcaaattattttttttttcattcaatcggtatgctacttgaatgttttggagttcccatgtggactgatccgacagggcttcaatcggctgcactgtaagagtggtaatggctttagatatctcagacatggttgattctgttagattaaatgaggatcagaggaccagcaatggccataaaggagaacgaatgccaaaaaagaatacgaataagattaaaggaaagattgggtaggcagaaaatcgagaaggcccaagcaaaacaaagcttgaatcttgaatctcagagggcagagaatgccaaaaactgcagatccctgagagcctagggctctgataccatgtggaaaaattgaagaaaatctcattcacttttctccattgaatacaagaaccatctttttatattaaaagctagtataggcatattataagaagatgaaactatcctaaatcagatccctataaatcagggatttaaccaccaatattctattttacagaatatacaaagtcaaaaatcctaaaataggaagaccttattttatcacaactggtatataaaatctcgagtcatcaagaggtggcacactaggcacaataaattgagcagctgatattgatatgcttgaaccatttggtacttgcctccccataagagatcaatcctcttcttgtttgtgtattcagtaaaaatttggtgtccctgcacatcacttaactagatacattttcttgttggatggttgtatccatattagattatggtgcaggaactgatctatttgatctgttgaagcagggtca

SEQ ID NO: 12105 - DNA, 4551 bp, Vitis vinifera
  Intron number 8 from transcript GSVIVT01037449001 (locus G SVIVG01037449001) derived from phytozome v7.0 (chr-ID chr6 ; pos 13557742 to 13562292)
gagcttgagccacagctagaggagttaatttcagggtacgtgtttatacacttctcattatcatttaatatataataatggaaattcatttggatctacaagatttggatactcacaatttagacctaactgcaccctgtagaattcagactcactagtcccaagaaattccatatatttgtatgtgcataaatttgattttatatcataatattattataaaattaaaataagttggttcagaccttttgacctatgtcaggaaaaaatctactcgaattgatggttcaacttctaatgatgtctaatgtagaattcatttaatggaatgataaaaagtaaatgaaaatatttcctgctatttgtggcaggagcttattgctgttaggtaatgtgtcatgcaatcagtgagcacacatttttattttcattcacaaatgatggacatctcctctttcatcttgattaagtattgctattttgtttgtactattttttatgatatcagcaggaaacctaccaactaaatatctagaaaatagggtagttaatttacacatagaaggatgtctgtcgatatgtttatgcccaggcacatcttgctaacctagccacaatttgggcaggttatctttattcccttttaagtaaacaaaaattaggctggttgtgcaattagtttgattttgaagggaaatattgtagtttgatcaaaatctctctcccttgtaacaaactccatctacaatttgaaccttctgtctctctttccaatataagataccatgttgctcataattctctaactttgaattatgaaatttctattgttagttcttcaatcttcactctctgatttcctctgtaagctggtcccaacacattgctcacccctacagtacctcctgcaactgtttttcccatctctagcaaaggcatgctaacaaactttgcctcagaagtctcatctgtctatcagatatattgaaatcaagatttcacaaactataacaattgaactaaaaagatttgcaaggaaaagcacacagtcacagaagcttaatcctgtaaatagaaataaagagcttttctttctcccagttactgtaaacttcaaagggggaacaatagaaaaaaaaaaaaaaaaaaaaacatatacatggaccaatagaactccatttgagacaccttaatgtggaaaatgaagaagctgatactaacagtgtgttttatatggggatttgcaggtaaaaggaaagaatttgaatgtagtaaagacaaaatgttttttctctgtttttcattattaatttgttacttgcacaaccatacaagtcaaccatacaagagtaattatcgaaagaaatgtatgtaattagaccatattaaatcacaaatcttccaacacccttccttagtgggtgcaaagaaattttgcattccaagcttatctaagatttgatgaaatgtcaaactagggagacccttggtcactatgatcacaccttggattttagacgtacaaattaatactcaaatacaaaattagtgctgctaaaacttgggagacaaaaaataaatgctaagttttaggtagaattttgtccgaagaaatgatgtggaaacctattataaagaaaaatgtaccttatgataaacctttgggatcatgaattaacaaaatataatctgtttcacatgaagaaaacttgtacaataatgctttgtacataccaaaaccccatgattcactaaaggtagcccatactacaagtgttaaaaaacaaagataaattacattatttcttcaaaatgatttaatctttcttgtaatgcaaaggcaaaagcctcaaaacactctcaacatgagtaaaacaatatccaatgaatagcacatgcacagctcaagccttaacccccaacaagtgttttctgacctgcatctaggaatgagaaggatagggtgagttcacaattcagtaggaaagtttataatcatcctatacatatccttaaaaaccttgaattaaacatattgcaacatgcataataaacattttataaccattaacaaatgtgcaataacgtcaaatatgcatgtatgttgttgatggtttcatctctgctttgcctcatccattctctcacacatgataaactactaatccccactaatgtacatatcaaccatcaatgctccaaaagatgttgggtcataaataatgactattctaggactaccacccaaggacaagtcatatctcatgtcttttgggacttttactcaagggcaagaccaacctcatgtcttttgggactcatactcaagggcaggaccaacctcatgtcttttgggactacaactcaagggtaagaccaactccatgtctttaggggctaaaacccagaggcaggactaatcccatacacccacattgaagtgtcttccttgagggttttagggattttcacccaaggacccatggttccacataaatctctattatgcctctaggaggaatccacttgtgattggttgtgctaaacaatctatgccaaagttgtagtgcagtgggacaatggagaaaaaagatggttagctgattcgctactcttaaaacacataacacattgattcactcttcaattgaaacaagtcattggtattaaccttattattagctataagtcaagcaaaagctttaaccataggtggagcttttgagttctagattaatttagcgggagaaaaagagggcaagataggagaggcaaataaggttaagagagctttataaaaagatctcgtagaggaaagacctaaaggagacaagttcattggcaaaggagggtgatatgtatatattagcaaagaggaaaggagattagataaatttactaaggtagcctttagatatttgacaattctgtatacaacttctaagtgggatgagtggtgcatgcataaattgattgattatacttacaacataagcaatatttggaattgtttgtaataggtaggtcaactttcccaccattcgtggataattgctttggtcttatgaaccttcttcagttttcttccctggtttgtgatttaccttaataatagtctcaactggtttagattctagcatatttgttgttgagtggtgagatgagatgagagggggaaagtgttgggttgcgatagagtcaaagtcgtttgaagtttcgatagaggaagtctgagggaagctaaaaggtaccattgtggagaggagtagaggtctctcctcttggatccagtttggagatttaagtttaagaaaccttttggaaggatttgaagaatgttgcaaggagaagaaggaaggaaggatagtaaaagtctggaaggaagagaggagaaagttcaggctggataggtgtgtaaacggggcggggagatgcatcttatgttctgtcgtcgatttagagactaagagattttgcttagttttccttgaaggaaagggattactagggggatgggccattttcgctgagaaactacgggctttaggggtagttactcaagctgaagcaaagtctaaagcaacggcttcccaagctgaatcaaagacgaaagtggtgacaaaataaggtaaggccgagaagtgccttggaaaaatggtggagggtgagaagaaggctttcgttgatgttgctagggagccggctagaaggataggagatgcgttatggctacaatttggaggtagagagttgaggggtagggaggacgtgttgggtcggtgcttagtcggtaggtggggttttgggtcggtggtggagtcggagatggcctcgttcaggaaaaggggggagcgcttttggaattttaagaaaggcgtgaaagttttgaagctgggaggagctttctttctattggagattgaagatgaggaggcagagagagtgttaaagagggggatgtgccgctataaggataaattgctgcacttagagagatggagtgaggaggctggttgcttgtgcttaggaagttcagcaaaagaagtgtgggtgagggtggtgggtctcccacttcactgttggagtggagaagtgtttaaaaaaattggtgactgttgtggaggttttgttgaggtgaatgaagaaacaaaaaagttttctcaactccaatgggccagaattttggtgaagacaggggagagattttacggggacattgcatttagtggtgaaatcttattgttatgcagtccagttgtggtgggaggtgtcgttgtggattctacagtggtgccaaggaataaattgaaagggagagagggggaaaaggttagggaagagtgggatgtgggctcacgtgcggggaacaacggtggtatggggaaggatatttggtgtgcaacagaggttgatggggcaggttcagtcagaaagaataggggggaagagaaaggtgatggagacgagacgacagtttttgttgatagtttttcaagttttgggaaggggactagagagaagggaagtggaggggtggggtgggcttaagtg

SEQ ID NO: 12106 - DNA, 4256 bp, Vitis vinifera
  Intron number 4 from transcript GSVIVT01019887001 (locus G SVIVG01019887001) derived from phytozome v7.0 (chr-ID chr2 ; pos 4238731 to 4242986 reverse strand)
gaaaactccaggttggaaattattagttgatcaaaatctcgtatttgttgcaagttctagatttgagcaaggcatgtggtcgttcagttatttgggtgttgtgccatttgtttacatcaacataggctttgtaaattcaattaatgaaatatgataatacaggatgccaatcatccctgatgaatttagatgctgatagtgatatgttggatgttcactcaactcagacaagccttaactcaatttgcatcaatcacatgaattttatttcaccattttgtgctatatgttgctatagctcctgttaaaccatacttctcaggttctttccactatagaagataaacttcaaaagcaaatacttaagttgatgggttttttagaagtttctgaagtagtcttacaattggaaacaagcattattattcaggacaagattttggaaacttcttgattcagtttgcagttttattttgttttgtttttgtattttttaaataagggaatgtgctattaatacaaaaggaccacaaagttttcaatttaagtgggggacttttgaaattaaaagcaaaggacagaaaacttattgttcgggataggcttcctcagtggcccctatttgaactccattaattgtaggttatgtcttagaaacatttttctccttaatttcaaaatgtgatcactaatagtgatatgagacagtgtggttgatgataaatgtttaagattatggccaatctaataaattagcggactagaatgaatggaatatgtgaagggttttccattgaactagtagttgttcactgcaagattttttctcaaattcccttggttgctaaatcccaaggacatgaaggattagttaagggtaacgttatgaaagagtactttgtctaggggagggaaattaatttcgttgaagagtactttgtctagctttcttatttactgcctgtccctcctttttatccctagaatgatgttgttgaggcatgagaagattaagcttaacattgtacatgttggaatggttgctcttctttgtatttaccattcaatgaaatgaatttgttttgtttccaaaaaaaaaaaaaagaaaacagaaaagattaggcttaactttctgtgtgttaagagtggtggttgtgagttgctggtgaaatggtataatcttttatttgattagggaaagcgagatctagatcttagaaacttgttcctcctttgtaaggccatgctcgagtaatggtgttagcggtggttgtgaggtgctggtgaaatggtacaatcttttatttgataagggaaagcaagaactaggtcaaagaaactcattcctccttagtaaggtcatgcttgagtaatggtgttggatgtataatccttgcaaggggtgagtatttggtgctctagagagtttttgggagtgggattgtggaaagtgacaaggataggatgggcaaagcttctttcataaacagttttttttttttttttttaatgtaagttttaacatagcgtttggtgtcatgagttgttattgagtacctcctttttttatttttttatttattcccaattgtttttatttagaatgcttgggtggttgttttttatggggagattggaggctgtgggcactgaagtctatgttttctaagacattttcataattgggagttgttgaatgtagaatcactcaagtaaatttagaagggcaacaatgcttagggataggaagaatggtatcatagtttgcccccaattttatgtggatctttttccgttctcctaaattcaaatagcttcaaaaccttatagaaccctgagctgcttggagcaacattgaggttcttatggtagcttagaggtgcttggatgtaattgacatgcatgttgaccttgactaacttatctatatcccacatcatactcatgggagaaaggtactttccctagataacccattctaaccacctcaagaagtcgagaattgtcttgtattgtaactctttcttcaaagattcccttcttattggttcttagttttgcttttgtagccacttgagttgggctaacttgggtacttagagttttgaggtgcctaatagctgcatggttatcttaggagagatcttagtctataacaagtgacatcaacgttgaggttacaaaagaagtttgtaactaaggaagagaggatgctaacaagtatgtttgactttgagatagatgaagcagctcttagcaaacaatcttgtagtagtaaacgtagcatgaccatggttgagaagtggaaaaacttggagcagcttttaaggtacttggtaattgatgtgcttgatgagcttatttgaataccacatcgaaaacatactagaagggtacactcccctagtacctataaataaggaaccttgtaacctattctaacaacttcaaagagttgagaagtgtcttgactcttgtataataaagtttcctagtgctattatacttgatttctgcaagcattctcttccttttggctgttaggtttgcttccttgcatgaatcaagccgaattagatgctcaaagtgttgaggtgtttaattgctgcatggatttttaggggagatccgagcccatgacaatatgctagtataaagatgcattaagaatggaaaattttcaatcaaatatttttattgaactttggagcccaattcaagaggtcccttccttgaaaagtccttggaccctacaaaagtgagtttcttcatttaggagacttgtctggggagaaaatggaccagctaaggaatggagggtggcatttagctaactggttgtgtttgtgcatatgcaataaggaatcgaccaatcatatttgccaactggtaaagttgtgagtttgtagcatttgttattcttttgttttgacccttcttaggtgcgtactaagacagtgaaagaagttttattgggagtggcatgagaaatttgttggcaaaaagcgaaagaatttgtggaaaaaaatccatagtgtttgtactggaccacttgatatagcaaggtagcagaacttttgaaggctcgggggacttggatcaatcattgaaggagtctttttttgttctctttgcctttggtgttgaaagtgtttgagcaatgattgctgggccatgttagatttctttaattgtatggatgtgcaagaaaggtgttgtttgcgtcttttttcatttgcctttttgtaatgagactcttgggctatgcctcctgtttgttagcacttttttaataaaatcttttgcctataaacagggtaacagaattttaaaaaaaaatggagaaagaaaaaaaagtttgaagtaaatactttcgtagttgaactccattaattgcccatggtaacttgtacctttaagatcatttatcttggcttcagattttgtgtttccctttggttatattggaactggctttgcttttgagcatatgggatgcgtatgtttgttgaacaccttggcattcttgagcatatcatgttccagttgtaagtgagacacaacaaagggtggaaagattgccccttaagaatttgaattgtttgtgtaaaaaaaacttgcatttggctttggaaggggactcccttggcctttgtcctttctttttttggttgcctggagaaccatcatttgcatgcggtcaaaatgcaagcttgttttcaatgtttacttcttatcttactatatgtataactgctcttgtaacgttcataaggcttcatttttcatttcatatggtaaagcttgaagcttctatgcagaaatgattggatgaattggatccattcaactgttttctgagattttttctttgcttatgtgtttgtttgggaaacgatgaaacctggcctgatgtttatccctggttggaaaacttggaatatgtttggttttgtttcttcaaaatgatgtgtacagtggcaaaatatgaacatgcttattacataatttacacctaaaggaccggctgctccaaatttatatttggaaaatccttttttgagattctcaaatatccaatatgaaaataaaagatgatcggctgctaatcaaaaaataaaataaaataaaataaaacaaaagatgattgtctatctttcttcaggagctataatctaatattgacatatgacatgcggtattcactagttttacctttaactgatgcctctcaccgccttctatgtagatttggg

SEQ ID NO: 12107 - DNA, 12054 bp, Vitis vinifera
  Intron number 18 from transcript GSVIVT01021280001 (locus GSVIVG01021280001) derived from phytozome v7.0 (chr-ID chr 10; pos 3368350 to 3380403)
tggccctctcatatcagctatttctgtgtatcccagtaagtgattaaggtgttttttattctttgttttgtagttatatccacattatcagaatgtaggtggcatgtggatgacccaaagacacagttgcccatttttgggaatatatctgatcctgtgtttttggaacaaggcagcaccatactcccacacaaaagatcaaggctcaaggtgcattggaacctctgttaagggtgtttagttctcacatcattgtcactcatttcacatttgcttacctagttcaaatattaatgaagtctagatgcttggattaaagatgaggatactccaacagacctgcgttccataatccatacccatactacaaatgctactcttgctgttgcttgaagtagcttgtttcactatcattatgatgagaacaaagtgacttaacttttttcctttctctaatgtaaccagcatggtgatgagaagattcctaatttttactgcctaggaaaggaaagggataaagaccaatgcatccaaattaaaactatacaaaataacttttaattgctaagtagaacatagcttgatcctgaaatcagacttagtgtatgcatctatgtctttgcgtgcgtttaaatttcataatttggttttgtcttataaatatgctttgtttatctatttatttatttttatcaaaaacaatatgaatttgtaattaccacagaggatgagagatctttctggaatgcaaaagctgatcaagaagaaaaagaaagagaagttcttgaaaaagaggaccaaaagagctaatacaattcaaagagtataacaagaacatgtataagagaacctttatacaactcaaatgaagaaaaaatcccctttgaaagaaacccactccttggctcatagcttgctagttgacttgcaacatggttagctaaaccatttaacggttttggttcttctaagagggggatagttttgtggcaagctgcgagcattgctctaattcgggttgtgtggtgggaaagaaacgcgaggattttttaggataaagcaaggaattcagagtatctttgggactctattgttttccttgcttctctttgggctttctgttccaaggtttttaaggggactccccctaatgtgctacaacttgattggttagcggtgtgtactccataagaaatggtcctttatagagtgttcgcttgttttacagtgtaatttcctgtagtttagttttccttggcgggaggatttctcatccttctatttgtacttctttttatctatcaatatatctctgtgtcgtttccaataaaataaaaaaaaaaaatggttagctaaaccataatctaatagaaagagattaacctatgtttctagtaacatctaaaatttggaaaaaccacctattatacttctaagtccctcattctaatttagacacacaagaaagacttatatctccttcaatcataggctcatgaccctagcctacaacaagagatttgaaagtgccaaaatctctttcttgatggtcctaccatgttaaacaatgctctcaacattatatcataataatattagattatacctccatccttagctaatatcaatccatttaggtggagtccttttgggtttgaaaatatgtgggtgaggcattcaaagttcaaacagagtataagtctatggtgaagtgtcaggatgagaaactcattagttcgtgcaaaagttgcaaggcattaaaagattgaaaatatattataagtctacttttggggatataaaagagaggaaggataatgagagatctttccatggtagtcttggtagattcttttgaggtagagagacctctaactaatgattagcatccataatggctaccaggaaaatgtagttggaataattgttgttagggtaagtggttcattggagtgggctaaggagggtactgcaattctaagttcttccacaaaatagctaatgataggatgaagaagttcattaaatctctacaagatgagaatacaacattgtgtggtgatcaagctaggattttagagatcttaagattttttagcaaatgtagatcaagtgaggactaatgaataatagaaggtttagagtggacccttatctgagaggagagtgctagtggtttggattgccctttttcaaaagaggaaatttgagaagtagtttttcttatggacaaggaaaaagccttagactcgaatggattcacattagctttgtattaggagtgttagatagaataaaggacttgttgaaagtatttgcttgaatttcatgagagtggagtcataaataagagtactaatgccacttttattgctctagtgcgtaaaagtaatcaagtatttgattatttgattttggatctattggtttggtgactagcttttacaagatcatagttaaagtctagtctcggcaattgtgtgggtgttgcatgaattcatccatctttcacaaggtatcttgactgagggtaaacaaattttggatgttgtattagtagctaataaagtttgagatgagaaaagatgtgtgggagaaatgaggttggtttaaaaaaagcttatactcgcatagatgggagtctttaagtcatgttttagaaagaacatgcttcagatagagatggagatctttgaatttggctgtttgttacttgtaagttttgtaatgttaataaatgggtgtactaaaggatatgttaagactttaaggggtttaaggtagagagatatgctttctccattgccctttactattatgacatacatgttaagtaaattgatgttgaaagcaaagtagtgtggtatctttgagggattcttagtgggtagaagtagaatgagggtgactcattgcagtttggtgatgataccatattcttcttaaaagcttgttcaaatgagttacaaagtcttaagatcattttgttagtgtctcgatacattttaggattgaagataaatctagatcaaaattaggcattgatataagtcaaggcctaattcttgatttatctaccactttagaatgcaaggcttttgattagcctctatcttatctaggtcttccttaggatgagggtcttagaatttgtctttttccgggatttagttatgaaaagaatttctcggtggttagatgattagaagaaggctcatttgtccttaggtagtagaataaatctagtccaatcattcttgtcccatattccctcttatttttttgtctcttttaagcctcttaccaacatgacttatagaataaagagattacaaaaaaaaatttgtggttagattatcttgtgggttggaatcaagtgtgtaagccaaagagtaaaaggggtttgggtagaaggaagataactttaaggaatagagctatcttatgtaagcgatcgtggaggttccctagggaaagcaatgctttacggcacaagattattttgagtatctaattatctattttctatactctaatggatgaagtgacaatgttgttgttagatagtcaagttggtgtccttagaaggccatttcacaagttttccttgtcttctcttatttcactcgttattttatggatgatggttactaaaattcagtcctaggaagatatttggtggatggccgactttttatgtttaatttccaaatatttctaaagcaatgagatcgagagatttttgtgtttcttcagttttgatctcatcccttctatttttgtctcggattttcaatttcttgtgcaatttttccaccatgaaattgaggaacttactctcctttatatcgacttgagctcatatgtatttatcatccactttctcggttatgaagttttagtctttgacaccctctagtttattttcaatcaattcattccttaaaatcatctttgtttcttataattaatctactaggaaatctaaagctctactcaaagtcaacacctttgcatggctggtgacaaatatggaggttaatactaataacttgctatagaaaaggagaccttaccaaggccatcagccaaaatggtgtgtcatgtcttaaactagaggtttaagacaaagaaattctcttttcctattccttttcattatagcatctaatgtattaggtaggatgatgttaggagtagaggaaaacgtcttttagagggattcctagtaagtaaggataggattagagtgtctcatttacaatttgtagatgataccatctttttatttgaagcttccatagaagatctacaaaaccttaaactgatcctattggtttttgggaatatgttagggttatagatcaatttagataagagcactctatttggaactaacacaagtcgggatttggttatcaggttagcattgatgcttgaatgcaagtcttaggttggcctttaacttacttgggtcttccattaggagggaatccaatggtagttgcattttgggatccaatgattagcagggtcttaaggagactagatggataggaaaaagcctttttgtctctaaggagtagaataactttaatttagtcatgcttgccccacttcccgaactatgtcttatcttttttcaagattccagtgtcattagtgtctaagattaagaaattacaaagagattttttctagttaggagttagggagggttaaaaaagatgatctcattaaagcccaaggagtctgtaggtctaggatttgggttgatttctttgaagaatcgtgctctcttagggaaatgactttagaggttccctaaaaaaagttttggcctttggcatcatgttattttgagcatttatgggacacatcctgatggatgggatgccaagattatagttagatgttcacattgatgtccctagaaggccattgcacaagtgtttcgggttttttcaagttacattggtttgtggttttgtggtgggtgatggggtgagaattcgtttttgagaggatttgtggtggagggatcgacctttgtgttcacaattttcaagtttttataaagttgtcaaaattaaaaatctaatcatttcaattatttatttattttttgataagactaatcatttcaattattcttggttactcatcttatttttcttgaaattttaatttccatcgcaaccttacagatttggagattgaggaccttcaaagactcatattctcttacttgtgggcacttgtctccatttgccttaaatacgatagcatgccattgacgtctttaggattattcttagttaaatcatttttcatgactttgtctaatacgacaaatattgttctttcttcccatgccaaatttatatggaaatctaaagtctcatctatggtcaggcctttacttggttaatgacacacaagaaggtaaataccaacatgttacaattgagaagaccttttcaaaccccttaagcacgattagtgcattttatgaaaagggagtggagaatctattgaccatctctttctacattatccgataactttggggttttggcactatctatttagacaagttagggtgattgggtttcacctaggactataagcgatatgatgatcttttcatatagggttttggggagctccacagaggtaaaaccttttagaaaattgcttgtctcactttgctttagattgtatggtgcgataaaaatgcgagaattttttcaggatgagtggaggatagcaaatgggttgtgggatttcctttatttctattcctctttcgaggcctcatgcaccaaggctttcttttagtattattcgactcaattgacattttgtgtgtaaattaaatgggtttaggcatcattgagaggagcttagttagaacttgaggagatgacatatttgtatattgtgttgtagtctgaaccttttgtatagaattcttgtatggtggaggagttcaatcatattatgatttttttgtaattgtggggaggactccttatttttctcatgttttgtttaatattaaaatatacatctcttgtttctcatcaaaaaaaaaaaaaaaaattgcctagtagcactgacattatggcataagttgtatggagttgtgaggattaactaggttctagctagaagaatggtggaaatgttggcaattgcttatccaaggttttggaggtcttcttagagggaaatctctatgggatattgttgcttttacattaatttggactatatggagggagacaaatgtaaggatttttttaaaaataaaaataaataaatggcgtattttagaggcaatatgaaattttatttattgctcttcctctccaagcagcaactagtgcaccatttgtgggcacccttttaagtattgtactactagattagaatctagtgagcaaatctataaggtaagttaaggagatactcccaacattgaagtctcctcaaatgggcaatgtcaagttgaattttaatgggtgctttttagtaacataagatagttgagaattagaggaacgtttttggatcatcatggaacattaatgagagcattttctaagaatgttggaacgagtctagccatcaaagcaaagatattagtcttgttggaagtcttacaaattgtaaaagttgagtgtttattgaaccttctagtatacaatggttttgtaatgggtttaacttgagtgaatgaggagagaagctcatggaagtttgatagatggtcacatcagattttttgtattactctagagttgaggtatacatcttgtgggattccttgggcaactaagcttttaaggtcatagtgcatttccattgatatctctagagtggatagttttttctcaattttgatataattttttttaataggaaatgataaagagatatattgatagaaaaaagtataagagaaggatgaggaatcctcccaccaaagaaaatctaaactacaagaatacaaaatccagaaaatacaatgtaaaaacaaacaaactctctaggttagaccaacccattgaagctacacattgctagccaatcaagttataacacattaaggggaatccccttaaaaaccttggaacaaaaagcccaaagagaagcaaggaaatgaatagaatcccaaagattctttgaattccttgctttatcctaaaaaatcctcacatttctttcccgccacacaacccaaattaaagcaatgcacgcattttgccacaaaactatccctctcttagataaaccaaaacccttataattgatggacatcatgtcggagatgctcctctgggaaacccaatccattttggttaattgaaataatctatgctacaaccccattgtcaaagagcaatgtaaaaaaagatgatctgctgattctccatgcttcatgcacaacttacaaatgttaggactaagagctttgtaagatcttctcaattgtagcaaatcattagtatttaccttcttgtgtgctactaatcaaacaaaggacttgactttgaaagggacttgagaattccaaacaaacttagtagggaaaattagagaagaaccagaaaattgggacaaggctagaaagaaagatttgactataaaaagccctgaagaagataaataccaggatctcgcatctgaaaccgatggtgataaacgccaactatcaagtgactgcatgagacattctaaatcttctatctcagaatcggaaaggttacgacggaaattaaagttccaagaaaagggatgagtagaaccgagaattgaagatatattaggaatatttttatccgtgactactctaaattgtcttagatattgggatcccaaaggttggtccccccaccaacagtcttttcagaaccgaattctttccccttttctaccacaaaccgagtaaacttggaaaaatcctgaaagacttgtgcaatagccttccaaggacaacgatgtgaccatctgactatagtgttgacatcccaaacattggaatgtgtcccataaatgcttaaaataatctgatgccacagagctgaaccctccctaggatacctctccaaccatttccctaagagagcgagattccttaaagaaatcttcccaaatcccaatcccccttttgcctttggattacacactacatcccaactaacaagatgatctcttttacctttccccaacccctgaacataaaaaatctctttgcaatctctcaatttttgcagccactgatgtgggaatcttaaataaggaaagaaagtagctagacatgtgggtaaggcaagaatggataagagttatcctacctccaaaagataagtaagccttttgccacctatctaatctcctcgaaattctcttaatcactagatcccaaaagccacaagcctttgggttctcccaaaggaagaccctggtagagtataggccaatcagaagccttgcaatcaagcaactcggccaacctagaaagatgattttgctcaagattgatgccaaaaagattactcttgttaaggttaaccttaaacccagaaatatgcccaaatactagcaataaactcttgagagtctgcaattcttcctcacaagtgttagaaaagaaaatggtatcatctgtaaattgcatatgggtcactcctgttctgttcctaccaaccctaaaacccttcaacgaatttctttcctctgctctcaacatcatcctgcttagtacatctgtgaataaagtaaacaaaaaaggggataaagggtcgtcctgtcttaatcctctagatgccttaaaccaccttttagcatttccattcactaagactacaaaagatactgtggacaaacatcctctcatcgatttcctccatctatggctaaactccttcttctccaacacatgatccaaaaaatcccaaatcacatggtcgtaagcctttttaaagtcaattttgaagacaattccttccttccttgattgtcttttctcatctactatctcattagctataagaactgcatccaatatttgtctccattgaacaaaagcgccttgagtggaatggatagtttcatgtagtacccctcttagacgccctgatagcactttgactattatcttgtaaagactagtgatcaagctaataggtctaaagtctgagatttcctttgtcaggctttttttgggcgacaaaactatgaaagaggcattagttctttgattgataatcttgtttctgtgaaactctgcaaacaccctcactaacttctccttgatcatttcccaacaatcttgaaacactgcaatggtaaagccattaggccttggcgccttatccctatccaattgaaatatggccttataaatctcttcttcagtaaaaggggagtccaacctagacacactcttttcagatataggggatcaatctaagccttcaactctccaagactctccagggggactcgagtagagcttttcaaagtaaagtaaaatctcctctgtgatgctctcgggattatttaacactatacctctttcattctccaacaccttgataaatttcctatttatcctaccattagccactttatgaaaaaactttgaattgcaatccctttctttaacccatttcaccctagctttttgtatccaatgaatttcttccctcaaaattaattcctctagctccccttttcttaaagctctttgaactgaaagttcagaagtgagaaccccatcttgcttaacaacatcaaagttagctatttcatttaggatacttcttttcctttcgtttagttctccaaaagaaaccttattccactatttcaatttggccttaaaaaattgtaactttctcatgaacttgtgaccttcccacccatttccttgaaaacctctccaccaactactaaagcactctttgaaactaggatgttgcaaccatatattctcaaacctaaaaggtgttgggcctcacttgaaaagattggtatccaaaactatcggccaatgattcaatgtccatctaggaagaacttcttgaaggctttgagggaaaaaatgctcccacttatttgagtaaagaaactgatcctgatccaatctcttacatacgggagacttttacatgtttgaccatgtgaatggtgtgttccgtaaaggtgggtcaagcaattcacaacctcttataaaaccatcaaagtccttcatgcttgaagttaaactaaagcctcccaatttttctgatttttctgaacttctctttatgacattaaaatcaccgcccacacaccataaaggataagagaggccaaaaatgtttaaaagctccacccaaaaatcattcctaagtaagggactgtttaggccataaactgcggacagccatagaggttcacatccattcaacacaaacttgactgagacagtaaaagagcctattaccaccttcttattgcatagttttttagagtaccaaataatcaaaatcccacctgaagccctgcacgtcggaagagcagcccattccttatttttgaccgtccaaacactactaataaaccttctgtcacacaccaccttttttgtttcctgaatcatcacaacatcctaattctctagcctcaaaaaatctttaaccacccttcgcttttttcttgaccccaaacccctagtatttcaaccaataattttcatggaaaaacctcacagaccctaaacctccaaaccagtttcaccaggtctcaaatacctgtggagcatctgctctttcgcctggaatacaccttaatatctagagagcttaaaaccccatgcactttatccatcttcctgggggacatgccttttatttggaactcgcccattggggagaccacagcaacaccctggctaattgtaaccaaattggaaacctcattaggcaaaatgggtttagatttaatggggttcaaaccctcgggcatctggtttagataagcaaactaggactccacaacatcaaggttagaattgccaacagacttttgacatgaagtgtttgtttctaattaaagaaaaaaaagttaggtaaagcacacctataattgtctaagtaaactgaacccattaaaggtagtagaatacacattggattcaactccttatctacctttatttttcttataaaaccacgttcaaatcaagttatagagcattaagaggagtacatattagatctacaaagatggaagtgcaaagagaggagtagaaataaatcaagtcctaaatagtctttaaaaacctccatttatcctcaagtcttgacactactctcaccaaatcatttggatcaaagttaagcaaaccacacaccacaatatcatgcctctaagataaccctcaaaaaccctaatggagattatcaatgtattagtcacacttttaggtggaatttaatctattttaggaagtttgaataatctatatcaaagcatcaaagccaccaagcaaaaggttaatcaatcaatccccccatccccatgcgcatgatacaactttttggactaagagctacctcaattgtagcaaatcattagtattggccacaagccatctattgtgtcaacaaaagcttttgtgtcacctattaatgcactaacatatagataaggtatatgagatctttatgtggtttggatgatccttttatataaaaaaagaactagtatgctatataatacaaaacccgcaaagggggaaaaaaacacaaatacaactcttgagcctctatttcccaactcctagtatctacaccctaacttaagccctatttcatgagcatagtaaatcctctatataatgtgccttatcaataggaacatttactaaacaggaatttgaaacactttctaccaactttctaatcatgttcatgctcttatagtttgctaatgagcttcacctttttatattttctttatgcagatttcaaatcttgttcaagtagtaggaaagaggaa

SEQ ID NO: 12108 - DNA, 16125 bp, Vitis vinifera
  Intron number 3 from transcript GSVIVT01030528001 (locus G SVIVG01030528001) derived from phytozome v7.0 (chr-ID chr1 2; pos 6493749 to 6509873 reverse strand)
ctgggattctttccatccaacggagaagactagtataatctctgatcatgtggtgaagactgttttaaaggtttttctttgatttttgttgtagcagaacgtgtgctattggtcgccttcctatatgtctaacggtgtaccgctcatgttcatatgtaaaatttagggtatcgataatttttggattataaaataataagattgggttactaagttatacaaatgtgagatgtgtatttttatttaataaatatataaatatgtatggacagaggtgctcatagggggccaatgttcggccccttgcttcttattcctaggcatagggcctcgtggaggggagggaggtatgattgagcctcgacgtttgccttacaccaatgtgattttagccctactatggaaacctgtcttcatcagggtttcttaaaatcatagagcggattgcagaatagaataataatcagaactttggagaagattttgatttcaactaaaattctaaatttctaatggcataaatttggtattgggaaaataaaactttttctgacacatggtatgaaatgagagagacaaatttaagaaccggatcaggctttggaataatgttacagtcaccatccgacacatggcatgcttgaggcggtggacttgactttgctctccggtcttccaccagctgggcttttattaaatccacaacgaagttcgttgacaacctattttattgctttccatgtcctttcttatttagtaatggaaagcaatttattatgaaagccggatattatcatcgttttttttttttaatatatccgataactttttttttttattttaaaaatatatatttttaaacttatttaatatttaaattatattatatttgcatatataatatttaagtctcttgagattaagagcttgtttcacaataattttagaatgtgtttcttatttttataatacttgaaatatataatgttcatttgataataattttttattttttatttttaaaaaaaggattgataaccagaaatcattgtattagggttttttcaaataatatctttaattattttctattatttttacttttttttaagggttgttttagaaaataattatacaaacatgtaaaataattaaaaataaaacataagatataaaaattatttttttgttataaaacaaagtgagagaagaagaaaacaaaaaagagataatagaatgtaatgagagaaaattgaattaattttcattaaggtcctgtttttatagggagttacaaagagatatacatcattatggataatcatccataagtttccacaatgctataaattctcatattttataatactccccttggatgatcataaggatatcgtaactaccttattaaaaaccttgccaatgaaacccaatgagacaaaacctagatgaaggaaaaaaaaaaagtgtagtatatccatattagtattctccccctcatgtagacatgattatgatttttttcaacatttcaattggtagatctttcaattttcgcattccaatgtcataccttaactttttcaatgtggttgaaagtaacgcctttgtgaatagatctactaaattattgcatgaccgaatctattaaacatcaatctcacatttcttttggagttcgtgagtatacaagaatttagagaagatatcttagttctgtcatcttttataaatcattctttaatttgtacaatacaagcaacattatcttcatgtaacttgcattgcctctaatggaaggtagtccacatgtttcttgaacatgttgaatcattgacctcaaccatacatattcacaacttgctttatgaattgcaagaatttcttaatgatttgaagatgtggctaccattgtttacttgactgatctccaagatattgtcgtagcaccataagtaaagacatatcccgtttgagatcgagctttataaggatctgaaagacatccaacatccgcataccctattaattgtgattttgattcttttgaataatataaacccatgtcgcttgttccatgaaggtatcataatatatgtttaatctcattccaatgtcttttagttgaagcagaattatatcttgctagcaagttgacagagaatgttatgtctggttttatacaatttgtaagatacattagtgcaccaattgcactaaaatatggtacttttggaccaaacaatttttcattctcttttttaggatgaaatgtgtctttgttcacttcaagtgaatgaaaaaccatgggggatgtagaccctcaattttgtccctcgacactggcatttatcctttgggcgtcacctgcacccatcgttctcatatggcaccactagggccccttttgggcttagtcggtgtctgagcctcgtgtgggcttgtctgtggtccattgtggtgcgtatgtagttcattttggagggtcatcgtggccattttcctagtcgttcacatcaccctataggaaggaagtgaggtcatcccgatgttttagcttagttggagtttataggggcatgttgaggttcggagcactcgagcttgttttgatcatagctccctcattcaaactcggaattgcacactgttttttttcatggattccttactcttccagaaacattctatcaaattttcaagattttttgcaaccggttcgaccggttggcatccggttcagccgcttcagccggttcatcgagtcagccagtgtggaacactgatttttggtaattattttgatcatatctcccttttccaaactcggaattgcataccgctttttttcatggattcctcactcttccaggaacattctatcaaattttcaagattttttgcaaccggttcgaccggttggcatccggttcagccgcttcaaccggttcatcgagtcaaccggtgtagaacactgatttttgataattattttgatcatatctcccttttccgaactcggaattgcgtaccgctttttttcatggattcctcactcttccaagaacattctatcaaattttccagattttttgcaactagttcaaccggttgacatccggttcagccggtttatcgagtcagctggtgtaaaacactgattttggtaattttgggagccaaatcctacatggcttaggcccataagctccagatcggttttgggcaatgttgtgggcccattttgggccttggtttgggtttctgcagcccaccacggatccatatggattcttggtggtgaagtaagctgaaaactgaagggagtgagctggcctcgtaagtgcaagagaaataatggggggtgtggttcccatgctaatggaggggatttcggtgctgaaggggaaggaaaccaggaggctcaaatgctgagagaggtatgagtataaaaggtgagaggataggagagcaaaagaccttttggcatttttgagagaggggatattttgttggtgagaaaaacagagggtgaggagcatcttctaagttgagagcgtggaggaaagcttcagcactgtgattttttgaagaggaaagctacagcatctcggtttctggaagtcatcatcagcgtacatggatcatatttggcggagattctgaggtaagtatgctgaatttttttttttacctacaggtcatcttcatcgtcttcgtatgctttttcttctttctcatcctcttttatttcctttgatgtgaagattgtattgcttgggtgtggataataaaggccacacatgtttgttgttgattggttatgaatggttgaggattacagttgaggatgattgttttcttgatgtgttagaatcacgtttaggctcaagtttaattcattcatcgttttcaattttgcaccatggctggttgactctgtcagtcatgaggaacacttgaccttgatttgtttggttttcactcatccgggctcggaattgagaaccgtttcttttgtttgctttcttattcatttaggaactttctgaccaaatttgggattttttatcaaccggatggaccagttggaaaccggttcaaccggttcagcaccatagttggttgactctgtcagtcacgaggaacacctgaccttgctttgtttggttctcactcatccgggctcggaattgagaaccgtttcttttgtttgcttccttattcatttaggaactttctaaccaaatttgagattttttatcaatcggatggaccagttggaaaccggttcaaccggttcagcaccatagttggctgactctgtcagtcacgaggaacacctgaccttgctttgtttggttctcactcatccgggcttagaattgagaaccgtttcttttgtttgcttccttattcatttagaaactttcttaccaaatttgggattttttatcaaccggctgaactggttgggaatcggttcaactggttcagcaccatagttgactgactctatcagtcatgaggaatacctgaccttgttttgtttggttctcactcatccaggcttggaattgagaaccgtttcttttgtttgcttcctcattcatttaggaactttctaaccaaatcttggattttttatcaaccgtttgaaccggttcaaccagttcagcatcatggctggctgactctatcagtcatgaggagcacctgatcgggctttgtttggttctcactcgtctgggctcgggattgattgtcgttgcttttgtttgattccttatttatttaggagtcttctaaaaaatttgggaactttttctcaacaggttgtaccagttgagaactggttcaacctattctgcaagagaactttgggcaaccctcaattttggcatttttcaagcccgtatccattggggctcaaacccatttgctatagggcacttgtgagccatattgaaggtttaagtcagtgtttgatttcaattagtgtgggcccattttgaggttatgggcggtgtggtctaggtaagtctagtttgatttgtatgacatttggggagtccattacctgatttcaaccagctttcttcctttttggcacaaaatttgatgcttgattctgaatacatgttgcatggctgactcaccctctgttgtagcacatggctagggaccacaggtatgcatcgttggttttgattgttgaatcatatgcatgcatggtgcttaatcctgaatgtttgttatgtgtttatctgtgtttggctgaccttttatgcagcgcttggctggggaccacaggtacgcacccgttgttttggttggttgaattcatatgcatgccaaataccaattaggattgtgtgattcatgacatctatttagcctagggtttcatttttgacccatatgctcccacatacccaattcattagtagagaccgagttccgggcctagaggggtgctacctcgcatgaggtaccttcccaatgggtaacctgatccccggacccagaatctagttttcgcagatcgctttttccatactatggtcattaggggtttttgttcttacttaattttccccattttaaaaataaaaataaaaaaagtaagtggtgactccatacaacaccattcctcaccgagggcgggtttttcaaaattggaaaacacaaactttttatttctttcttttcttttaaaagcgagtcgtgccggtccggtggatcgggtgagggtccacaggggaattaactggatgtgatttgtctatataaaatcattttaatactttatatatgtcgattgatggactaatatgtcatttgaacaatgctcgatttgtaggccgagacaatattttgttttccctaagtctttcatttcaaatttcttctttaaataattggtttttttggttagctcttcgagagccctataaggttcaaatcatccacatatactgcaattattgtaagcccaattttcaatttattgataaaaacacatgggcaaattgaattattcacatatcattcttttaataaatactcactcaaactattataccacatgcgtccaaattaatttaatctatatggagatctttgtagtttgattgagtacattgtagaccctccattttgtcctcctagcacatgttcttttacgtgtttgttcagtactttacaacaattccctggtggcccattactattcatatagcttaccttttctgagccacttttgagactttggttgaggggtttattcggttccacattatgaccttgactgtccttcaagtttagattaggcttcacttaggtgcactctaggttagacttagttaggcctatctagtctcaccctaggcccatataggtatacccaatccattaggcactaccttaagcccatttacacaccttaggcccatctaggttcacttaggcccatttggacaccttaggctcacttggcccattagacgtttttaacgtgacttgtatggttgcatgacccatttatctcatttacttatttatttattttcatttttattattattattattatcaatcacttttatttaatcatttattatatttttatttatttatttatttatatttatttttattgttatcaatcacttttatttatttatagttattttattatcttttatttatttgtttattatcttgttatttatccatttatctattattattattttatcattctctgatttatttatttagttattcattcatttatttaatttaataatttgaagttttataggaaaatctaccaatggagaagtttttggaaaatgtaggactcttttggtggtttttggaaaatgtagaactctttacgtgatatgcatgaatttattttttgaaattcaaaagggatttttttggtggataagatagaatttagagagagggaaggagtcctaagtttggacgactccaattgatattaaaacacaggctggtggttttaggagggtttcggagattgttttcatagagagagggttttcataggcaaaagggagatagcaaggggatattttggatatcgttttcagagggaaaaaggaaggaagcacaacaaagcagagcaagagatttgagacgatataccagcgaggattttcttaccaggggaagcatctccaggtacgttttctgcaaatcttcccttcatacccattattttcctgttatgtattgatctttgtgggattttgggttttgtctagatgtttgggtgtagaatgacagaggttatatgtttgtttgcattggtacttgattgcttctatagattttgttgacttctcccttcagatttctctagttttgatttagggctgaaaggttctaacttttttttaatttaccatgctttacatgagaatcgtggttgtctttgtttgcttgaatatgctattcttgttcatggtgtatttatggtgttttatgtgttgagagtttctgggttcatctgggttgtgctgcattactgaggtttttctagtggaaacgattggtttgggaagctgctaatattcatggatgaggtctcttgaggcttgccaagattttgttgttgcagtcctttaaccccaacaagttttctttttcatggatgacctttacctttatttttattttcttgtcttgggccccacctatgcatggtcatcttggagcacgtcaatttcattcttttcagcatcctaggcccattatctttggattggaagctcttcaaatcttaaaatccaaatggatttccatgattcatagtcaagttacagacgccacccctttctcacacaatctcttcatccaaaaccctgcgtggctgcatttcctactcatcatgggccaccagcagtactagtgaagatgatgccaggtcaaagacaccaattgatgtatctctgtttccaaaatattttaattctgatagtcctgtgagggcatccaacagctctaatgaatactatttatctctttttggattatccttctcgaaaacatatccccattggatcagatcatcaagttgatgttctagcatggagccagggtatcatggattcattagattacttagaaacatctgaacaagtaattttctctccacaagattcaggtttggaactcagtgttggtaacattgatgagaaaagacacacaacgccggtttgatgcacgagaaagtgattggggtttcatttcttttatgcctcttagtgaactatacgatccaggtaggggttttcttgtgagcgatacatgtatagttgaagttgaggttgttgtccgcagagttgtggattactggacatatgactaaaaaaaaaagaaaaaatgaaactggttatgttggacttaagaaccaaagagcaacttattacatgaactctctcctccaaactctctatcatgttccctactttagaaaggttgtgtaccatatgcccacaattgagaatgatattccatctggaagcattcctttggctttgcaaagtttatcttataagcttcaatacagtgacagcagcattgcaacgaaagagttgacaaaatcatttttttcaaaactcttctttgctaccagttttcacttaaccactgaccctttagtttcaaaattcgtttaagcaactttaaaatgtttttaaaaatttccaaaacttgtatgattttcatcacttcttgaaattgaatttaaagtttcgtttgagttagaaagtcattctagaatagaagatataaataaatctttaagggggctccgttttcacctagttctgaacacctgagatcttttttcaaaaataaaatactagacgaatttttaaatttgattcaatatttttcctcaattttaggcttcttgaaattgatattagatacatcaaatattaaaaaatgtctttttgagggatgatttttcaaagtcgtacctactgtacacgctggattctagaaatatgattagcttgagtgttttaaaaatatttttgaggactattcggccttggattcttttttatgtgatatatagacactttgaaatatgtgtgtgattttttttttttatgattttatgtgatcatttattatttttaaaaaaaatcgtttatgcatgtcacttttttctaatctaatatggattttgtagaacctttaggtgtctttgctgcaatatgtcctttgaatgagtgtttggctttcggtatgttgatctagatgtgtaggagttatttcttgaaatttttcgtaatcaaattccactctaagcctttttttagaaattgttttatgatgcttccttttctaactacatgttgatggttttatactttacttgaaattgttattatttttggagtcatttgatttatcttagctcaattttggctttgacactgtatattagacataatggatattttatataatttatgcttgccttaaccactctaacattttttgaggaatcttataaaatatacttgctatccaggtacgttatctatcatctaattccaaaattctatgaaaatgcatgttattatgagttatgtccatgtttgaacgctatccttgattgccttgatactttcttgattatctctaataaaatgcatgctgagtggtatactattcaaattaactttgattgtcttatgatagtaagtaagaagcagttcaggtacataccctaactctcctttatgattgtaatttgatttcttatttgacatgctagtattgatagaatctcgaaatcaccttagcctacctaggtatctataatcaaccaattaattgcttcatttccctcaactaggttagtagagacctctttagggcttagaggggtgctactttttaaaggtaccttcccaataggtaacctaatcccgggacctagactcgggtttttcgaagacacgttttcccaaaaaactatggagtcacttctttagggttttctttcttgttttattttccctttaaaataaaaataaaataagtggcgacttcaactttttcaaaactaaattttcactcaaataaaagcgagtctcgccgattgaatgggaacacacatgaaaaatgcgggtccacattcatgtttcgaggttttggattagttgttttaagcaatttgaatcattcaaggattttcatatatatgttagttaggttgtaacaacatttatgagacacatatctagtcctttaaagactgttaaacttatcaagtatcgaaatgtgattgcatccattacaggtgaataagtttcctcatagtctataccaggtctttgagagaaacctagagcaacaagtcatgctttatatctgaagatttcatcattctcatttcgtttttttcacaaagacccatctatatccaacaggctttatgtttctaggtgtttgaactacaagtccaaatacctctcgttttgctaacgagtttagctctatttagattacttctttccattttgaccaattattcctttttcgacattcatccacagtttatggttcttaatcttcatcatttctcatgatgtccatagtcacttggaatgcaaatatattatctatgataatgtcactacaatcctttgtttttcctgtgtgactcattgagatttctttagttctagatactgatatttgatcaatttgtgccttttcaggggctaactatttatcaactcgggtttcatcaattaaccatttcatatttatgaactcttcaagagtactaagttttttcatatgttgtttttttttttttctaggaactgaatcctttgagtcaataggtctaccatgcttcaagtgtgtcttagactcacttgctatgacattctccaattgtcatttaggaacatcaatatgtgtttggggcattcacagttagcacgtgtgactttgttactttctttatatctatgaaagcattaggtaactgatttgcaagtccttgcagttgaacaattctctgaacttttagttcacattgtcttgtatatggatcaaaatgacacaatgaggatacataccatgtaatgtctcaccattcttttagaattgacttacctccccttaatggcgagaaaacatttcatcaaaatgacaatctgcaaagcggacaataaatacatcacctatacaatgttcaagataacagataatggagagagaattaaaatcaacatatataccaagtcgacgttgaggacctaacttggaacgttgaggtggcattatgggaatatatacagtacaaacaaaattatgtaaatgagaaacatttggttgggagcctaaagcaagttgtaaaggtgaacattcatgattaactgtaggacgaattcaaattaaagtggcagcatgaataaatagcatgcccctaagcagataaagataattttgttctcaagagtaatagtcttgtaataagttgtaaacgttgaataagagattcaactaatccattttaagtgtgggtatgagcaataggatattcaatatcaataccaaccgacatataataatcaagaaatgtcttaaaggagaattcaccagtgttatcaagacgaattgtcttaatatgatgattagggaattaccccttaagtcaaattatttgagtaagtaacttgatgaagacaacatttctaattaaaagaagaaaaacacgagaccgacgagttgatgcatcaattaaaaccataaaataatgaaaaggtccactaatatcaccttgaatacattctagaaagactggtgattcatattcaaccttggtaaatgatggtctaataattaatttgtcttgtgagcaagcaacataattataataattggtcatcagaatcttttggtttttcaagggatgcctaaaagaattgttgatgatacgatgcatcatggataattctggatgaccaagatgttcatgccaaatcatacaaaattttaagtcacaaaacttctggttcatgacaacatatgactcaatgggtttaatgattgtttgatataacccaaaagaataagaatgaagtttttctaagatgtgttttttcctataaataactaagtaatgagaaagtattcattactaccatcattcatagtttcaatgtgatatccattttggcaaatatccttgaaactaagaagatttcgcttgaatttagcataataaaaagcatcgttaatgtggattttagttccactaggtaaaataatagttgcttttccggagccttgaattacgtctacatacttgatactgtattaacattacacttaaccaacaataagttggaaaaatatttttttatcacgaaggattgtgtgttatggcacaacctgcaaggcatgcatctacattggatgtcgtatgatgtatcaaggtatgagagagatccatgtatcttcaaatataaataaagaaaaaaatttaaataagaaaaaataaaatgtgaaataaactataaaagatgaataataaacaatgtgttcagaagatgataacaaaataaatctatcttcaaagaactaaataaaaacacaacatttaatcataacaaacatttccatcaccaattaaatgatcaaatttctcgttaggattctcaaagaaatttgaaacatttcccatcaccaattaaatgatcaaataatagttgctcttccggagccttgaattaagtctataggacttgatactgtattaacattagacttaaccaacaataagttggaaaaatattttttatcacgaaggattgtgtgttatgacacaacttgcaaggcatgcatctacattagatgtcgtatgatgtatcaaggtatgagagagatccatgtatcttcaaatataaataaagaaaaaaatttaaataagaaataataaaatgtgaaatgaactataaaagatgaataataaacaatgtgttcagaagataataacaaaataaatctatctgcaaagaactaaataaaaacataacatttaatcataacatttccatcaccaattaaatgatcaaatttctcattaggattctcaaagaaattggaaacatctaaatgggttagatccattaggccatcactattaatgaagttcatttcaacttccttttcttttgtttttattgagacttgataaaggtcagtcaaatgttttgaagtatggcaggtacgtgaccaatggcctttcatactatatttatgacacttattctcacaagcatgtttactttgtggttttatcccattttcaagttgcgtctctgaattatttcacttctagtagtttgaattgttctttttactttgagaactactacgatgagaagaattgtgtctaccataacctcgaccgtgaccacgtcctttacctcagcctcatccatatccacgtctttgtccatgtctaagagtttggacaaatgtgacattgacttcaggtaatgacataaacttagtaggacgagattaatggtattttcgtaaaagctcattattttgtttagccacaagaagacatgagatcaattcttaatatttaattgtgaaaagccgtaaattttaattgtgagctaattttgaataagactgagtcatagtcactaacagacttgaaatcttgtaatctcaagtgcatctaatcatagtgtgtctttggaagaattacggtcttttggtggtcatatcgttcctttagattattccaaatgatgaaagaatctttgaccgtaaggtattcaccttttaatccttcatcaatgtgatgacaaatgaatattaaaactctggtgcgatcctgcagggatgcgtcatttttttctttaatggtatttttaagattcatcgcatttagatgaatttcagcatctagaacccaaaataagtagttcttgcccgaaatatcaagggcaacaaattcaagctttgcaaggtttgacattatttgaaaactatatatatatatatatatatatattataatattaatcagaaaaatatttcaatttgtgcataacttcaggctatgaactttcattatgtagatttgtacataacttcaagttatgaacatttatttttatatcttctagttatataattttgtttggtataactttcagttatactgtataattaaaaataaataattagggatcatatacataacttttggtcatgtatttgtaattttccttctaacttttatagggcttgcatatattttttataacttctagttatgaatttatcccataatttataatttacctcataacttctggttaaagggattatacatatttatgtattcaaataaaataagtgaaatagaaaatcaaatggtaattttatcacacatgtaaataaaatagaaaatcatgatataagtttatgacatacctttttatgataaagaaaatagaaaagtcttttactttttcttgtagagactattcgtatcaataatatgttgtaaaacaaaatgagagaagaagaagaaaacaaaaaaatagacaatagaatgcacggaaggaaaattgaattaattttcattaggagcccatctttttacagggagtcacaaagagataagtatcattatggatgatcattcataaattcccacaatgttacaaattctcatattttataatatttttaaattctcaatcatatttttattttacaaaatatcataaaattgtttttaaaaactgtgttttagaattatttttgaaaataattatcaaatttgataaaaaaatttgaagtgttaaaaaaatttaaaaacacttcctaaaattactatcaaatccactctaaatatattttattccctcaaacttgcacatattttatttatacttgctctttcatgttaaaaatacaacattttatacgtatctttgggagatccaaaaaggaaaatgtttcgtgaaagcaaaatgtgtttcgtggagacagcctcacgagaaatgcccgagaagggaggaaaatgaacctaggaaatacacgtgccccacaaaattcttagggaacattaattgggaaaaaggtagtaaaccagcacctccatttctgttgggatactttaatgcttttgagggagatggttgcagccactccatcccagtcccacaagcccctttcgtctccatctttcggtgaggtggttgaaattttgaaatatgcttccatctttgatccgatgcctcagacaactgtttagattttaatagaatcaaggaccattgaatcctaaccattcatccgcagatgacttgactttccttgtttttatttgtggatgccaatttttggtttttaaaaaaattgtgatcagatcataaaaaatattatgacataagaaaatatgacgagggtataatgaaaaagatacaattgtcttgagcccaaaaattaagatttgacctataaaaattgcataattgatggaaataatataaaatatgaatagattaatataccctttaaaactattatcccaataaaaactcaatcacctatcaaaacacttatatggatggttgaacggtttttttagtatgtaaacgaggtagattcgggttttgcaaaatcattgtggtgtcaaattaggcctcatccccaattcgggttttctgaatttttcttgccctcaacccgacccggctcataactctgatcactacccattatgtccgagcttcgctgggcccaacagacgtatttttagtacacttgttgctggtactataacaattaaagcctttcacgttccacctaactttttcaactagaacttgcagcaaatcttcatttcgccaaccaatattaaatcatcacagtcccccttgtcatgcacctcaatctcccagctccaaaatggcatacatgcacctttctctcctcttcttagccaacttccttctacaagttgcagtggcccgagccaaagttcctgccatcatcgtgttcggagactcctcggtt

SEQ ID NO: 12109 - DNA, 11615 bp, Vitis vinifera
  Intron number 2 from transcript GSVIVT01033752001 (locus G SVIVG01033752001) derived from phytozome v7.0 (chr-ID chr8 ; pos 18108597 to 18120211 reverse strand)
ccagtaccatacaaggggatccaaactcaggtatttgcatagatatgcacttgacattgatctacctcctctgtaagtcgtaactagcgatcaactgtaaatggtgctgtaaaataaagaaagggggtgtacgtaactaatcaacagtactgtgtgagtagactggagttgtaaaataaaggagggatgcctcaaaatgtgtgcaaccatggaaattaaaataagtaagatgtgatttcttttgggagaaaaaacaacaattaaaggcttggacatcttttagaaataaaaagacaaaattatgggaggctctaaatcttaatcacacaaaataacatttactaaatctagggatgggagtcatgggactgataaacttatcaccaaattttgttcaaaaaatagatcacccttcttgttcataagagttaaggtaaatcaataataattttacaattttcaatttatttgtttttaatgaaatgtcaatcttaaattatgtgtaaatacgaaataaccccatgtattaaaaaatttcatcaaattaaataaacctatgtgataatcatacttataccgattcgagtttttatataatatatttgaatttttattatcttttgatgaaaaattctaatgagagaacctattttaaagattggacatgatttgtgaattaattacattattagaaaaggtttaaaaaaggcgatagaaatatatgattgtttttaataattaatgtagatttaatcaaattttatctcgatataatttcatggggagctgaatatgaaagtgcaagattcaataacaatgtttcatattgttattgttaagttttgcttcttatttggggccttttattaacaatgtgaataactaaaggaaaaggggttgtaattttttccattcaagctctggactcttttttatttttaaaataaaagaagaaggggagcagacattgcaccagatatagcattgttctccaccgaacgtacatagacatatgtcgcattccatccgtggacacaacttgaaaggggttatcaaaaagtcacattctcctcgaaaataattatggctcatcaaatttttttatttatgggtctgttccaagaagaggagatatggtcccggcatccttgaaatgatgcaaagatgtcacattctcttctgagttgaacttgagattgctttcatatgaaatattttatgtccttaatgttccgtgttctatttcttggtgcaatgtaatgctacctttgggcttaaatataacattggaataggtctttggggggacctgtactccggtccccgcccaacccacctccattgtatataaattaaataaaaaatcatttattttatttttccctttttagcataaataaaataaataaatatttttataaaaatttatgactgtgttgtcatcccttgaatagattctataaatagatcggtgcatatatcccacttatataagaattaattatatttagagaaacaaggagcttatatttttaccttttttcttgtttttatttttcaattaataatgtaaattatgagagtgtcttttattgaagacgaagagatatgtacattgcattaggatcaagatgtcgcattctatttttaggaccatctaaaaaaggtttgttattcaaccttatatctatttttaggttttgtttaaaaaaaacatgtaagaaatggatttgacctgcttgaaaagtattcaagaagacataatatttggaaaagaaaatacttttaaaattataaaaaacaaattgaactgtgttatcattccttaaatgagttccataaataggttggtacatacctcgtttaccactcacaaggagtgtatacttttactttttttttcttgtttttacttttatttttattatcttttgatgaaaatttctaacgaaagaacttattttgaagattggacatgatttatgatttattacactgtttagaaaaggtttaataaaggcaatagaaatatatgattgattttaataattaatgtagatttaattaaattttatctcgatataacggggaactaaatatgaaagtgcaagattcaacaacaatgtttcatattgttattgtaaagttttgcttcttatttggggcttttattaacaatgtgaataactaaaggaaaagggttgtcattttttccattcaagctctgaactcttttttatattttaaaataaaagaagaaggggagcacacgttgcacggatttttgataagagtacagcggttttttaaaataattccaaaattactataatagaaaaaatatttccaaatataccgtagttttatcccgttaggagggagaaaagaaattgtaaatgataaattgtctcttaaaaagatgattttcacaaaaaaaaaaaaaaaaaaaaaaaaaagtgagaaatcgtctcttaaagagatgattacttaaaaaaaaattaaaaaaaaaaacctaagtgggaaatcgtcatttccacaataaaataaaaataaaataaaattctcactttaaaaatttttttaaaaaaaaccatgtgggaaatcgtttctttaaaagacgatttccataaaaaaaatttctcactttaaaataaaaaaaaacaaaaaaaaaaaccatagaaacgatttccacaaaaaaaaaaaaaaaaaaaaaaaaattctcacttttaagagacgatttccacacaaaagctgcccccaacaaaaagccaaaagtgagaaattctcacttaaaaaaaaaaaacctttaaaaatccaattttttcattctttattctatttatacagtaatacatttattataaatatatatgttataaaatcaattaattttatttactaaatttaatttataaataatatactaaatttaatataagataaataatctttatatattgttttttttttttcattttgaaattaaaaaaaaaactattatcaattttatgtgaaaattaagtttaaaaaaattgttattaatttattaaataaaaaaaacgtgagaaacgattttaaaaaaaaaataaaactttaaaaatccatttttctattctatattatacttatacaataatacaattattaaaaatatatattacaaaattatttaactttttttttatattttttcattttactgtgaaattttaacttaaagattaatatttttaatcttaaaatttatataataaaattaatttaaaaattaaacaaaacaaaattatttattttgtaaataattatttaataaattaataatatatttgttttttaaacccatttttcacatacaattgataatatttttttatttttttaattcctaaaagaaaaaaataatagataaatattatttattttatattaaatttactatactatttaaaaattaaatttagtaaataaaattaattaattttataatatatatttttaataattgtattattgtataagtataatatggaatagaaaaatagatttttaaagttttttttttaaatcgtttctgacgtttttgttttttattttttatttaataaattaatgacaatttttttaaactcatttttcacataaaattgataatagttttttttttaatttcaaagttaaataaaaaaacaatatataaatattatttatcttatattaaatttagtaaataaaattaattaattttataatatatatatataataaatgtattattgtataaatagaataaagaatgaaaaaaatggatttttaaaggttttttttttaagtgaaaatttctcacttttggcttttagtgggggcaacttttattaagaggcgatttctcacttaggtgttttttttataaaaaaaaatattaattgagaatatatttatttattttttgtgtggaaatcgtctttttaaaagacgatttctcacttgatttttgtattttttgaaatcgtctcttgaagagacgatttctctctttattattattatttttttttgtgaaaatagtctcacgatttctcacttacaatttattttttcttttttagctggacaaaattatgatagatttagaattatttttcatactacggtaatttaggaattatttttaaaaattgctggactcttataaaaaatccgacattgcatcggatatagcattgttctccactgaccgcacagagacgtgccgcattccatccgtggacacaacttgaaaggggttaaaaaaagtcacattctcctcgaaaataattatggctcttcaaatttttttatttatgggtctgttccaagaacaggagatatggtcccggcatccttgaaaggatgcaaagaagtcacgttctcttctgagttgaacttagagattgctttcatatgaaatattttatgtccttaatgttccgtgttctatttctcggtgcaatgtaatgctacctttgggcttaagtataacattggaataggtcttttggggggacctctactccggtccccgcccaacccacctccatcatatataaattaaataaaaaatcatttattttatttttccctttttagcatatataaaataaataaatatttttataaaaatttacgaccttgttgtcatcccttgaatgggttccataaataggtcggtgcatatatgtcatttatataagaattaattatatttagagaaacgaggagtgtatatttttacctttttttttcttatttttaattttaaattaataatgtaaattatgagagtgtcttttatagaagataaagaggtatttatattgcattatgatcaaaatgtcgcattctatttttaggaccatctcagaaaggtttgctacttgaccttataattatttttttgttttttttttcccaaaaacatgtaagagatgaccccgacctccttgaaaaggattcaagaagacataatatttggaaaagaaaatacttttaaaattgtaaaaaataaattgaatagtattatcatcccttaaacgagttccataaataggttaagtgcatattttgttcaccactcacaagaagtatatacttttacttttttttttcttgtttttacttttcacttaataatgtaaattacaataatgtcttttattgaagatgaagaagtatgtacattgcattaaaatcaagatgtcacattctatttttaggatcctttcaaaagggttggctattcgatcttaaatttattttaaggttattttccaaaaacatgtaagagatggtcccgaactccttgaaaaggatttcagaatacataatatttggaaaagaaaataaaaaaaaaaattctcctcctagatgtttaagttatgattgtttatattataacgtgtttttgttcatctttaccgactatttttttctaaaatagtaagctcctttgcataaaatatagtactaaatctaacttagctcaagtcatcatatgcgtaactagtgtaggaatcaaccttcttgtgtcattctctttaatagtttaatgtctcttcttgatcataggttttttttattactaaaatcagtattcaaattgttaaagcactttacacccttttatttatatataacatttcaaattaagtataagaaatatgaagcttaaagggcctagcttgcatatgcaaaatatttttgtagaaaaaattacataaataggcattttaattaattaatttattttttataagagactttaaaagtaaaatagaaagctataaggtcaaacttattgtaaaaataatttactcataaagaaaggattggttatcaaaaaaacattctttactatatttttaaatgattgtttaaaattttttatggtattaatagctcattttaacatgcagttacattaaattaatacaaaaataactttctataataagataatttggaaaaaataaataaattatctatatgaattaatttgaaggttagaaaaaaaaaacaatatatgagttaattattattattattattattttctttattccctttcccctcacctctactgccactcctttacacattccatccatagtttctttaagaaattggtaagtttttttttttttttaagtttttttttattttattttagtttttacattgattgttcttaattattaaaattctatgaattaattttcattatttttgggtttgcatttacttgatttggatattgtggactttgggtgatttgggtttgttgacttaggttttatttgagtttattgatcattattttgagcttagactattgatacttcattagacttatttgattgggcttattgttgggtttattaattattgggtttcaaattgttgagtgcatgatttgggcctgttaggttatgtttggttcccggaaaataaaggagaaaaaaaaaatgcaaaggaaaatgattttttcatgtttggttgtcatatgaaaaatatcaaagaaaaataaaatataattaaaactaattaaaagcttatatattttaaaattatttaatctttatattaatgagttaaaataaataaaatgagtttgaagtaacaaaaaaaataatttatcaacttttaatctattttttttattttccttcactttttctttccttctacttttcctttgtattttctttcccttgcattttccttcaaattttctgggaaccaaacatagaaatttttttatggtattagactattgatacttcattggacttatttgattgggcttgttgttgggtttattaattattgggtttcaaattgttgtgtgcatgatttgggcctgttaggttagaggttttcatatttggatttgaacttgatttaattgtttagattttgagcttacatgttatttgacttgagttttattttatgttatgcatgagtccatttttttgagaccttttttgctaagcatggattcgtgacacatggaagaccgaattttatggaagaaaagaagactcaagaagacttaaaataggacatgaaaccttaagtaaaaagagggtattgagcttgctaaatatttgtttgggtacacattttatttctttacttttatttagtttaatttatggtgactcctataaacatctttttgtatgtatttattagctgtttacaaagttgaatatttgatagttaatatattttgttgtaataaaagaaataatttagtagttatgttttaataagataatagatcaaaaaaatattatttttaataaaaaagagttatcttaataaaaaattcagataaatatttttagaggaatccataaaatcgcttgtagtaaaaattaaaaaaaatgttattaataacaactatttgaaattttatttatttgtctactaaaaattatgcagaattttgtttttaaaataaaattgtttactaaaaattatccaaaaaattgtttttaaaataaaattgtccaaaaagttcatttttaataaaattcgtccaaaaaaaatgttttttttaaaataaaactttcttttctcaataagaatgtgattaaaagtttttatttttatttttataaatagatgtcttaaagatttttttaaaaagtaagaatatgatgagagtcatttttataaattgaaattgtagaaatcatttccttaataaatttagattgaaaatattttcataaataaaatttataaaaaaaaatcaattcatttgtaaataaaatcaaattagaatattcttctgtaaataatttttttaaataatttataattttttttttctaaatgaaatccaaaaccttctaaataagaattgaattgaaagttttttttcttttccaaatagattggtaagtaataaagaatttctttcgagatgaaatccaaataaaaatcattgtgtaaatatttttcttttaagtttgtagaaaatctttatataaaataaataaaaattaaattaaaatacttttgtaaataagattgtaaaaattattttcctaacaaaggtaaataaaaaccattttttgtaaataagattaagctggttttttttattaataaaattgattttaataaattcttttaacaacgttgagtgcaaataactttcttacaaataaaattgaatcatataatttcttgaaaataaattaaaatttaactaataagtaaattgaaatcattaattaatttatttattttatgtaaataaaccattttcaaaatttcttgaaattgtgttgcaatctttaaaataatcaaatcatcttttttttttattttatcaatttaataaatccatttgtgtaattcccttgtcattctttttgtacattattgtaatatgattttgttatatattgatttgtattattattatttttttagtattcttgattaattaattaattgttgtaattccttttacttactttgtatagattgttaatatgcagacttagagggttattatgacttatcaccatatctgctcgatgggtaacttgctctcaggatttgaatttgattttttaaagacacatcttttcttaaaaaataaggagtgatattatgattttatttattattttgtcttcttttttaaaaataaacaaaagtaagtgacaacttcaaaattttcaaaaaatcatttttcacataaaaatgagttttattatccagtaggaatacacataaaaaatgcgggtgcacacatatattgtgcaaaaattattccctccatatttttaatgatgaaaggtgaatttatggctaaaaatgacattttgccccaaaatttagtttatggcaaaaaaaattgtgaaaaaatgtgatatttgttgtagcaataataatttaaaataatattttttaacaatattttcatctaaaatgaataatgaataaagtttaacttttttaatgagtgaagtttttcatttcatgtacacatttaatatcgaagaatataatattttagaatgttttgatttaatatagaattaattagatcggtcttttgaatttgaaattattcttaaagatttttaaaatcatttaaagactttaaattattaattatgtcttatttaatttattatttatttacctaaatttaaaaaaaaatatttgtgtttataagagaaacaataaagtcatgatttataatatattagttttgatgattagatcaattttttgagttccaactattttaaaaaattattaaaatcattaataaattcaatataaagtattactcaatttggagttcatttttattgtgaaaatttataaaaataattatttgtaaaagaaattaatgcatctatcatgaaccattttttatccataaatttatggtattaaggaacttattaattgaatgtgaaattattttaaaaaattattaaatttgttaataacttcaacacattaagttttgtttaatttggaacttatttatcttgattaaaaaaattataaaataatgattttatatagaagagaaataatagagtcattttagaccaatttttgtccacaattttttggtattgattgaatcattatttgaattttaaattatttttaaaaattattaaacttgtaaaagaaaaacaataaagtgttctaaactaatttttgcttataaatttatggtattaaattattaattagttcaatatttgagttttaaattacttttaaaaattgttaaacttgataatgaatctaacacattaaattttatttaatttagaactcatttgcttaataagaaaaattagaaaatgatgattctatatagaagagaaatgataaaattattttaaatcaatttttgttcataaagttctgatattaattggttcattatttgatttttaaattatttttaaaaatgattaaacttatcaagtctttcttaatttggagtttatttgacgaattaaaaaaaattgtaatatatatatatatatatatatatatggtattaattggttcatgatttgagttttctgattattttttaaaattactagatttgataatcaatttaacacattaagttttatttaatttagagtttatttgcttagtaaaaaaaatggaaataatgattccatgtagaaaagaaataataaaatcattttagatcaatttttgtttataaagttttggcattaattggtttactatttgatatttaaattatttttaataattattaaacttgttaagtcttgcttaatatgaagtttattttactgataatatatatatatgtatatatatagttagagagagaataaattaccctaaacatttaaaataaattggatctataacttactaaagttattaactattaattttcatgactttttagtattaattaaatctatttttgaatttcaaattatttttgaaaattaataaattttatgtatcatatacaatttgttttgaaatttatttgtttaatgaaatttttttaaaaagttaatagaaatttggaaaaatacttataatttaaaagaagatcataattgaagattttcgatatcaaatcgtggaaagagaaaaagaatgatatcatgtttaattttatttaattttataattttttaaaactttctatattttccttttatttttaaaaaaccaatgatacaacttttacttattttctaaaaacttttatttatttcactttgtttttaaaaattgtcctaaagaacacggtgagataatattaaaaaattttaaaaatggttttttgtttttaaaacctgtaaattgttttaaaatcacacaaccaacagctccaaagatttcaaacttttttattttcacgttttctactacaaaaaaaaacttagtatgaatagaggtatgtagtctttcgtttagatttataatcttttcttggtatttaaggtggtatcgaaggattcgctagagaagtcaagttgttgaaagcgattcattcacgccaaggactacattttctccgtggctgtccagcgcggccatataacgtaaggcggcatattgtcacttttacgttggatttgtcgtcatttttatcagaaaatacaaaggattcttgtgatttgctcattagattaatattttttctgattccattttgctagaaagcatattatatttggaaagcatcaagttttctcccgcaagcatattatagttttgttgttagtacaagtcatcacacaagtagtaactgagttgagataccactccctatgattttagaacatccgctttaaaaataactaattttataatttcatttttcagagaatattttataatacggtgttatcacaagaacataattttttttttataagatttaattaaatattaaatccaagcaatttaagaacccgccacgaccatgccaattcgttattggcttcaaaatctccatcccgaagtgaggtccaactgggcagcaagtttcacctgcgagcttcattcaaaag

SEQ ID NO: 12110 - DNA, 8275 bp, Vitis vinifera
  Intron number 4 from transcript GSVIVT01023227001 (locus G SVIVG01023227001) derived from phytozome v7.0 (chr-ID chr1 2; pos 20928896 to 20937170 reverse strand)
attcttgtttttgggtgagaaaaggaaactacagctgttctgatgctctcattgacaagcctagagaagaactactgtcgagatataggtattccttcttcagtctgtaccaacagaatctgtgtccgtgcgtgcatgcccgtgttcttagaagacgggtataaatcctttcagggtaccataggaaatctgagagcccactttgactggcaatctttgagtgctgatgtgcttttcttctttctattcttgcattagcatttagaatttaatttctccgttctcagatgaactaccaaatgcctgaaaggatatgtctctctgcattatgatgtgtccaagggagcctagaagaggcttagatcttgtttgtattggcttcttaaaatgccatgggctttcctcttagctctagttgctccattaaaatagtttgtgatcaatgagcatttcatttctaactttctctcctaaattccttgaatcactataagtgatttttcaattttgtttcattgaaatgctctctaaaagcatttttttaaaaaaaaaaatcgattattaggtgtttctcgggtaagtattgtaagtgatttttcaacttttaaaagcacttcttaaattttacccaattcttgaacttttttttaaaatgttttcttaagctaaaagtgtgttttaaaattactttcatatggactctatccattagataattatagtcctaaaagcatttaaaaacctttttatggtaaaaaaaataaaaggtattcgataatattttaaaaaacacttttgaaaatttaaaaaaaccctaaaagtgttttttagagaagcacttccatttcttttttactctctttttcctctttcactttctttttataaaaatgatttgtgagtttttttttaataatataaatgtttatatatatttgtgtgataaaagttttggttttattataatattttctttttttaataatggtcatttttagtaatttattattattaaaaatattttttttacttatgtaatatattaccaaaaatattttttgaattacttttctaaattctcataaaaatgtttttttacaaaaatatcgttaaagaaaacactttcaataaaaatactttactagaaatcgagttgaatttcttttttcgaaaatattgtaatttgcaaacatctaaatgaaatttttaattctaattttgattttttttatattttattttcccttccattccctttttcagaaacaagggcataagaataaaattatacatgttctgttttttaataaattttataatttataaatatttcaatcttgattcccttattctctttctttcttttttaaagtcgtaaagcgtcggtttgaatttgaaaaaagcaaataatatgctacattgaatggagcatattcagaaggtgtggatgccgtttagtgcactacagttaaaagtttgtcaaggaagagactgaaactttttgggcggttccacttccaccacacacaaccccccacctcaccatccgtaatcctttggaatatatgaaatttgttaatgaagtttttttttatctaaaattttgttaaaaaaaaacatatttggtttaagaaaatgggggaaaaatgtgagaaaaagaaaatagagggaaatgataaaaataataataaatataagttttaaaaaaaattaattattttttattttttctatattaaaataaaataaggaaaaaaaaatcattttttagtacttttgaaatattaaacttatatattgtttaataactgcttttgatttttttttttttaaattgattatagttttttaaaaattgtttttttatgttttgcaaaacaaaagtatgtttaaaacctaaaatatttttaaactatttttaaactatttttaatatttttaaatatattattgtgaaccccgtattttggctcatgcgcttccactcgatggcgagctcgatttttatttgaaaaattatttatttttattttttagaaaaatgacttggagtcgtcacttatttttgttttatttttaaagggtaaataaaataagaaagaaaatcttaaatgtaactccttattttggaaaagatggtccgcgaaaaaccgaatcgaggctcgagggtcgggttacttatcgggaaggtacggtaaagactgtaacatccctctaagtccctaaaaacgagtctctactaataaaatgaagtaagcatgacgattgatgagtaaatcaatggatattgaatgaaaaacacaacaaaatacccgaatgaatatgagaaacaaagaacgtacctgagtgatgaactagtttactttagggaaaacaaatgtcagtaaacaaacacagaataatcgtatgcatgtcatgaagtggaataattcaaacaaatatagcaatcaatcataaaatcacatatgttaggctcccatcaaatctcattttattttgcatgaatcaattctaataactcaattatttggaattaagggattaaattcacgcttattttaaaacactttaagaatcatggaagatgtgaaaatgaggcttgccgggaagaagatggcggcaaattttattggaaaaaggatttttggaacctaaaaaaatgctaatgatggaaaaatttggagatttgaaaatattttaaaacaagaattgtagaaattacttacaaaatgggttttaggaagattattttcaaaatcagagaatgagaaaataaaaggagatgacacatggtcaaaagctgcatgtccaaggtggttatgcaaagatgcaagaatatgtgccagggtggaaatgaatgcttgcagaaacaggggtctctttctatcttctatgctcatgccctaagagaatctgtttaccattctgaaattttctatgacaattgtcaccaaagcttctttagtaacatcatcagcaagtgtaaacacattccattcttggcattgaaaagaattatcttgaggcctctgttaagaactccaaagctccatcatttcagtacggggttcataatcttgggaccttgggactcaccactcatcatatcttgcgtcccaaatagatcattctgaagctgcctctcgtatgcatcagcaatatggacccccactttgagattgccaccagatagtttttcaactaatagagcatcatcaaaatcaatggcaatagaaggatcaatagtaaataagcacaaatccctaagatctcttcttctttcaatttcctcatcgcccaaaaatatgcacgacatgaattaggggaagagaactttccttcctcccaatcaccgatttgtgcagctacaagctccgtttccattgatgcatctccatcttccattcgtttcttgatgcagttaggcaagcctttcacaggaaccaccatatttgaaaatttagggtcagtcggtgtcaattcgatgtactcactatcagacagtgacaaataagtttttttgttcattttagcgctctttctgtgaagtacacggctagtaagccactccttaacactaggaaaaccaacaacaacacaaggaggcctctcaatgatagctacaacactgccaattggtcgtttcgatgagaatgaattaattgcagcaccagtcttctccaatgagtccatgtgactttactcaccaaaacaacttacatgtgaaggaccaaagacatggagtgatgtctattaacataattatggcccattggttcttgggaaatattctccacttgccagttcctttccatccatcaccaacaaaagtaacatcgagaagcaagttatggtcttctgttagatcagcgttgttagaaaacacagttgaccctttcattcggctaaatagtggtctcaaagttcaagatatcatcattcccattaacaagaacatgcatttcctatggtatttccacgatggctgatttagttcttttgcagcaaaaatattgcccataagtattttgtagatagtaaaatataaagagcaaggtgtcgatgccgaaagcatccagactcaaccgttcccaaaaggcaggatcattgacaatgggtgtccgtatttgagggcagattggaaggatcacaacagggtgcctcggagtataattccttagatgttccaagtctttagatcgaggatggaccaaacaaagacttcccaagccttactgaaatccgactgtagccgaaaagtgcaagatgaggcagagtaagaggcaagcgtctcattgatgaaggtcataacaatgacgctcataagtgggttctgtgaggttatgaacacaactataaaacggttgatgtgtagatctttctttctttcaatatgttgtttccatacctatcttcatcccagtttcaaacaacttgttcattattctggcccttctttagtgcgtgtcgaccacatacgttgtcttccaaacgttacttctttgcttgtcagagttctggaatgccctcaagagcatgtacgtctccacgatgaatagcttgagaaacttgtcctatcaagccgatattcctgcctttgttgaaagatatcatgcacgccatgaagatagggtaacaggaaaaaagtgacatgcaggtagggtagagtgtagggtataggtggatgattgtatggggaccagagaagatgactacgtacacgggattacaaagagaatgggtccgaatattgatcatatggtgggtatggtatggaatatgaagttggagattaatgggagggtatcgggaaatgaaaaaaaatgggttagcctaaatggaatgagagatgaagggtaatgagattttatgagtatagtgatttcatgggtagataagatggatgaatgagggtggcaactatagggtgtaagaaatgggtatgaataggctgagagagagaagtgggtttagtgggatggcttgatgagtatctgcgtgggaggtatgagatatgggtatggaagatatagagatcaagtagcaaaatgcatgggtatgaaaggatagtgggcatgaagagaggaatatattgggtggtgggataaaaaaatgggagatatgagaattgagatgggtgtaatggatgatggtgataatagtggtgagatgaaatgagtttgtaggtgtaggatggaaacagtagtgagataaatgggtaaatgggtattggtcataggaacttggtgggtaccaaagggctcaaacggcttcattgggcatgttcatgtaaagagcaatatgtgagttgaaagcaatttgcagctcaattgggaagttgacatctccagtctcttttgataccatccagccattgaaatgatcccatatgacatcaattgcaccatcacaaataacctttgccacaatgttttcagccacgatgggttttgcataatccaatttcaaattgctaatgatatctagactgtgtgaagtgaaaagctgaaaggaatgaaaactaaaaaacatggtagaacagagtattcttgaatcttttgaattctctattttctgaggtccatctctagtttttgtgagccgtgactcaacatatatacatgtatttgaagttagttatgccttataactgattatctaacactaccagaactgatcaactagttagaggttagttacaggtttctaactaatgttgtttagttacaaccgtacatggcttaacatcccccctcaaactcaaaggtctagctagaacagtgagtttgcttcgtagattgagaaattgttgaacgggtaaggctttggtaagagcatcaacaatttggtcacaaaaaagaatgtgttgaaccaccaaagtcttattgagcacctttttcccgaacaaaatgacaatctagttccacatgtttgactcgagaatgaaaaataagatttgcagcaagaaatgtggctaaaagattgtcatagaatagaataggagaagaggaagatgagatagagagctcctgaagaagatgttgaatccactgaagtttagaagcagcatttgctaaggccctatattcagcttcagtgctggaacaagacacaactttctgcttactggagctccaagagactagattatagccataaaagatgcaatgaccacttgtacttcgatgatcatcagggcaaccagcccaatcagcatcagcataagcagtaagttgaagattagaagaagaatgaaaggaaagaccaaaggaagtagtgcccttaagatagcacaacaatcgcttaacaacttaccaatgaagattagctggtgattgcatgaattggcaaagtttattgacggagaaagagatgtcaggccttctaatggtacaatattgcagggctccaacaatgctgcaatattgagaagggtcagccaagagggaaccttcagaggcagataaagtgtgagaggtagtcattggtgtagcaatagctttacaatctgcaagtccaacatgagttaacaagtcctgaatatatttggtttaggagagatgaagagaagatccttgccaacatacttcaacacccaagaagtaattcagaataccaaggcccttgagagcaaactaagagtgtaaagaagaaaccacttggtggactaactagtaacaataatgtcatcaatatagatgacaacagtccctttccaaaaaagaaacatagaggaatcagataaagaacaagagaaacccaagcaagtaaagagttcttcaatttggtgaaccatgcctgaggagcttgctttagaccatacaaggctttgtgaagtttacagacaaaaccgggtttagaatgatcaacaaagcctggaggttgaaccatgtaaacctcttcttctaactcaccattgagaaaggcattattaacatctaattgtttcactaaccaaccatgagatatagcaagagaaagaacaattcgtatagtagttggtttgattaaaaccctttgcaactaagcgggctttaaaacgatcaactgagccatcagcattgagtttcagcttgtatatccatttacaaccaataatggtttgttaacaggtttgggaaccaatgtccatgtggaattggtaataagagcatcatactcagttttcatagcagcttgccagtcaggatgcaacattgcttctttgaaagaggagggttcagctacggtagtttggataacaaggctgaatatttttttgggtttaaaaataccattttggctacgagtaacaatggttcggtttggaagtgaaggaggatcaagagtggaggctggaatagagaattgtggtaaagtaggagaggaaggtggaagagatggaacagaatcggtaggggcagtaatgagagaagaaaaataaggtggaggataatgaggattccttgtagatggtggggaaatatagagaataccataatcaagaagtgttgaagaggagttggatgatgatactggttgagaggataaagattttgttaaaaatggaaattgagtttcatcaaatataacatgtcgggaagcatatatccgagaggaagccacatccaaacagaggaatcccttgtgtttagcactataacccaaaaaacaacaaacaacagatctatttgctagcttgtgagaagcataagggcgaagataaggaaaacacaagcatccaaaacttcgaagagatgtataatcaggtaaacaattgtaaagaactccataaggattgatcgagtgatggaaatgattgattcgtcatctgagatgtagtttgtcccgtaatcagaccagttccagcaattggaacctctccagaatcttgtaatggagtcacattggttgagtgatctgccattgttgtctgctctgttaccatgtgagaagtgaaaagctgaaagaaatgaaaactgaaaaacagggtagaacagagtattcttaaatcttatgaattctttattttctaagattcatctctagtttttgtgagccgtgactcaacatatatacatgtgtttgaagttagttatgccttataattgattatctaacaatactagaactgatcaactagttagaggttagttacaggtttctaactaatgttgtttagttacaactgtacatggcttaacatagacagatccaaattacccatctaaacaacacttataggtcctccaatgtaaaccacaaataagagtccgggcagagataccgatttgtc

SEQ ID NO: 12111 - DNA, 3520 bp, Vitis vinifera
  Intron number 5 from transcript GSVIVT01021749001 (locus G SVIVG01021749001) derived from phytozome v7.0 (chr-ID chr1 0; pos 10487268 to 10490787 reverse strand)
ttggagaaagcacccttgaacctctcaggtatgtatctgtaatctagttttaatactggtttaacgtgctgcaaacaagcttgttcttcttgtgagaagtggtttcagtagtttgttgcatgtgacagtttgtaaaataaaaaagtttcgattttaagatacctttatgtttgttactcattgaagactagaattacagctaatgattggataatattggtaacttatctttttttttcttgtttttttttttctatcaaaaacaaaagggactcatttttattaaataaaaaggtcaagaaggatgagacatccttgcttagtatacaaaagctgatgaaagaagggaagaaaaaaaaaaaaaaaaaaaagaaaagctacagaaagtgaagcaagacaagctgcccatttaaggaaaagacaaaaacagtccaagatcaagccaaagatttactaattgtaattcagggaggcaaaagattccctacaaaagaaaccaaaagtttgatgtcttttggctaaaaagtttgtcatttgattgactaagcgaagaatccaatgaaaagaatacctaactatgtagtggtattaaaaacttggcaaagtcacccatcaaacctccatgagccacttttcttcttagtcacctgagaaataatagtgatgggatttccttccactagaagattagaaaggcccaaatctttggcttctacaagacccttcataagagctagtcttatcttcagtagtgaaacagtctcccacaggcttagaatgagctcttattattttattctaatgatctttgaatactccttcaaatccttagctgccttcgggtatccatagaacatccaccaaaatttaactcaatgtaatccttaggactagaccatactagaggggtcttttgaatcaatcttctaggcctgcatacaatgttccaattgtggtgccaatagaagttgaagaatccttcattgaatggtagctgacaaaatactacaaaatatggtatttaggaattaaaaccacccatctgtgaaggggcaagcccatctcccatagaccttagggcatttcctgttttcagaattatgaaaataaaaatgtacataaaattttccgaataactatgtggattatagcactgtatagaatgcgaggtagatatgcacctgagttgtagaaaattccatttaaggaaagttgccttcattgggggcaactgatttattcatttttcttgaaaactctacaaatcttccttgaataggttgttttttgaagaaagaaaaaggattttgcaaaggaagaaagaggattttgcaaagggatgcctgagatgaaaatgactgaaatttatatcatattctgatagagtgggcaaaatcaacctaaaccatgtcaaagttatttctggatgaaagatgtttgaaaacagtgcttttctctgatgacatctgtagaaaccaattcccttatggcttctggaccttttgtatcaggtaattgagattgtttttttgtgttcgaaaatattattctgtacaccaggacatggaagtatattattgaatccattgaaactattattaccctttcagattttaggaaataccataggaactttgtgaggcagtcattaccataataaatttatgtaacctctatgagtagtcaagcctttttaaaaaattgtaaccttaattagtatttaaaaaccctttagtggcatgtttgagattagacctggcaacaaatcagctttgggcatactcagacttgttacccactagataactaatcattttttttaaatgattaagagaacattaaaatgctattttcaaagtgttcccataaagaaacatttataaaaatgtttaggaaaaatattaagcataataaaaaaattaaaaatcaagtggatatgggtatcaaactcaaacttgtttctgttggttgagctaggcggcttgtgggctttggttaactttgcccttttagttaagattcactagactagaatggttgtattattatatttagggctttcccaaaatgctcgatttacattagctataaaggcagggattctagctttcatggaaagcttgtctgtagcaaaagttctagagggtaaatatcatttttgctggaggaaatagtcatggttatttcttgggtgtggaagagggtcttttggaaatagcaagctaggttgtgcaaaatatttatccctctagagagataggatgctctttttttttttttgggaggcagccatcaaccaatcaggtagcagattgataggctaagctaggagcctccttgttagagagttcagcctatcagttggaatccacaacctattttccgaaaaattcgtgcccatggcaggaatagaagaggaaaggactcaagaagtagaaaataaaacaatttgaaaaattattctccaaaatctaaccttccaagactacaacattatatagtcatttaggtacatagcatgctcggtcccacaagcaacttgaacactaatttacttggactctacctagaactcacagatgatcaaatgtatgattaaatcctaacaaaaaaaacccagttctaagcttaacaaatttccttaaatgcccttgatagactaaaagataccctaaacttacataccctttctaagatagaaagttaaagaaactatcaaattattctttatggattctgacctcctttgtatctaaaacttgcatcttgatgttgatcccatcataggggatgaacttaatacagtgagttaggttgatctcgcccgattttatctgtaaccattaccattaccactgatatacttaatgcccctaagcatgtaccaccaccggcataacagcaccacaactttcacctcctttgccagcaataccattaacactaccattttggctgtcaacaactgtgcccactttgttgtctataaagccagtaaccatgcatgcaaaacccttgtcattattattagtagtacactgaaaaacactacaattatagtgagaaacatccttttcatcaacacctgtttcttgttaatcctaaacttctacatactgtacagcagcattaatctcagaattattatcatagaggttatggcttgatgcaagcattggttttacattgtatggtttgaggatttagaaaatgttaatatttttctaggacatcagcttgaactgttccaaattttagattttttttttaatcaaccattaattttcccatgtccattttcttttcattttacttttgctaacatcatatcattaggagttctaattatcttcttctggtccctttccttgataagtagaatggttcatattatgatggaaaattgaaaactatgttcttaataatgatatatttgatgatatctatagaaaaaaaataatgatatatttgatgatgctgcacaggtattatcacaatattacatcaaatacgttggtag

SEQ ID NO: 12112 - DNA, 3879 bp, Vitis vinifera
  Intron number 2 from transcript GSVIVT01012412001 (locus G SVIVG01012412001) derived from phytozome v7.0 (chr-ID chr1 3_random; pos 575948 to 579826)
gtgcctttgtctaataagcttaacaggttcttctacattttcaccatttaattctctaacgttcatcatgatagggttgaaatttcatcatcaaatcaaaacatatcctcctataagaggcctttgaattctgaaataatcaattcactttattctcatattggcaaagacaagcttacactattggaaagactacccctaacctttgccctcccaaatagcaaagatgagagagaacctttcacaaaatcacaagaattattcaagtttggaattcataggcattgttattgaatttcatttgtataaaattggtgtgttgtgtttattttgttggtattaaaattgaattttttttaattgcaaattgatgattttttttctctctcacatttatacccattagagtttcttattagggtttgtgtttgaaatttggagaaagtatggtgcaattgttcatcggtgtggtgtaccattttgtttgttgtatctaatatttgggtatttgatttaattttattgttgttgaaattgaaagttgaaatccaagttaattgtttaactagctatttgtagttgacttgttttgcaccaatcttgattacccatttcatgggaataatcgattccaattttccttcatggttactaaaaatatattgtaggtgaaggactattatggagtatattaattcacaagaaaaatgttcctttagttagtaaaaacttcattcatgtggtcatttatgagcatcataataatccatattaaaaatatttaaaaacattaatgcactaaaacattgatttcatcaacaaaaatacactcattcttttgacttatagcattcaaagatgtttaaaaatatatatgtacaataaaacatcatcgaatttattaacaattaaacttttaaccccaaaacaatccgttactttagtagataagacactattggaataacattatttttagctcaagttagaagttaaaatgataaggttaaaagaacaaaaccaacaaaaaaaaaaagttattttttgtcaaacttgacactagtacaatttaaataatgtagctcaatgccctattgaattgagtcatataactagactccctaattatatattatgatacacacacaacctttggtctagtatacatgattaaattaaatgccaacctagtttgcaaagctaaactggaatcccaaatctagttcattataaatactcttcaaccaacttgctacaacattcaaataagacaatgacaatgatagaaaaccaaaaaaatacctaatatatcattgaaaactccttcctaaaggaggtaaaaaaaatcatgaagtaactttcttctattaataaaaatgggaatacaatgatctatatagtgttttaactcgaaactgatggtattacaaatattaaagaagaaatttaaaacacacacacacacacacacaacaagcatgttgtcaagcttataagagttggagaaatttctccatataaatcttcaaaacatgatggagagtaaccttgacatttaagtcaataatatacaaggaaagacaacccaaaaagatacaactttgagaacaaactctcctttttgcttttttacataaccttttttttttttttttcctttttgaaaacttctctcctttcctctaattgttacaccatacaacaatcctaaaaaaacagagtttaaaggcttgtttgataactgtttttaaaaataattttgaaaaatagtttttgaaaattattctctaatgtttaatttgtagaacaaaagtttgtttggaaacccaaaatatttttaacatgtttttaatgttgttaaatatgttttaaaaataatttttatgtttagtattttatttttaatcattttatatgtttatataattattttttaaggcaaaccttaaaaaataagtgaaaataacataaaacacttaaaagatattatctgaaaacaccttattttattgtaacagaaaataaaaagcggtttttggttgtcaaacatgttttcttaattttttattttgaagaatagaaatttgttcttgaaaatatctagttatcacattagttattgcccattttatgattttaattattgcttaaaaactagtttttcagctaaaaaagaaggtccactacttatgggtcaaaccttcaactttcaaacccgaacacaaagttatagtcaagactaatattcacatattagtattaatatagttcattaaatatgaatttctattgaagccaaaatcgagtttttaggggaagtaacattcactttcaattaagcaatttttaactcataagttagtacttgtaacaaaatttcttaatagagactttaattgagttttaagaagaattttttgtttgttaaaaaccaattcaaacaaaatctaaaactaatattattatctaaaagacataatgaacaacataaaccataaaccaaagtggtagtgacaaccaatatgtagcgtcaatgaataattgaaaataacctcattttctaatgacctcgaacctagaagctctaaaattcttgcctaattccttgtgatgactttggttcaaccttaatggcgagggcaaaattctaaataatttttgtcacaactcataaatttagaagaaaaaaatgagaataaatggaatccctaatgagaaattgttatttttcccctttatgacaaaaatagtaacctactagtattattaaataacatggaaattattatttcaactttaataccatgtatgacataactttaacaaccttaatttataagattatttaatttaaaaggataaaacaattacatattcataagaatcgcttctattttttaaaaacaataaattccattttttggacaaaaataccctccattgtttttatcaacatttcacaatcaaacacttattggaaaaaaaaaagtataagggtagctatattaaaatgaggttataattataatactcaataagtggagattttttttccaaatattgggatcatcttctccatttgacacaaatatttataatttatattataattactcttatagtaagagagaaagagtaatttcacatgaaatggacccataaacatagatttattatgaggcatgatactataataataataggaaataagacgagacgtgataccataataatagaaaataagataagtaattcaatacttaatgaaggtctgaaataattatgtttctcattaaatgatattaaagacgaaaaaaaacttattaatttttattttaagtattaagattatttaataaaattaacttaaaatttattttaaattatcaaattgatatatttattttcatagattataactaaggtaaatgaaatcaagtaataatggatgtcatgtagtgaaagagatcctagaggcaacgggacaaattgtggtaaaaaatgtcaaataaaaatacgaacttaagaacaaattaattgtttgtacttattacttaaagttgttatttattttatattattaaattattttactaaatatgcttaatttatttaatgacttaaattaatttattagtcactttaggctattaaatcgggtttaccaatcatatcgaatacatttggctagtaggccaagactcaagaatattgctatcatatgttttatgtattaaggtgccaagaataattcaccacaaaatatatgatgagttgataagtataggatacaatctaaaatatgcacttgatttcatcatctaaataaatgctctcggcaaatggatcatcctagctgataccagagcacaagccgcc

SEQ ID NO: 12113 - DNA, 2673 bp, Vitis vinifera
  Intron number 1 from transcript GSVIVT01031173001 (locus G SVIVG01031173001) derived from phytozome v7.0 (chr-ID chr1 4; pos 1516854 to 1519526 reverse strand)
gaaggtgatacaaataggctatgtttggtttttgaaaaatactaagaaaataaaaaaataataaagaaagtgactttttcatgtttggtttcactatatatactttcaacaacaagtattttagtagtctaaggcagtggaaggtaatataaatagactatgtttgattcttggaaaatattaatgaaagaaaaaaataataaaaaagtgattttctcatgtttggtttcactataaaaaaatataattaaaattagttaaaatattataaatgagtttaactaagtagataaaaataatttatagactttaatcttttttttttaattttatttcatattttatttcttcctacttttctgttctattatttttcctcagtattttccctcaaatcttttgagaaccaaatatagccatgatgtttgaggggataagcctctactaactaaaattaaaataacaagtttatcatataatctaattcaaattcatgtgtttgggattgtatgcaatcctaaatatattaatgtatgcttcaccctttgcaaaaatgttaactagaagttttattttttatttttaaggttgaactctctctttctcttattgaaaagtagatgtatttaatatcaaaacttaaaaatggcatcaaaatgtcaatttgtagaaaaaggtggtgatgacaaaaagcataaagtatatgtctttgcttatgttattttcccttccgttaaatggaataatttagactttttatgtcatccttgtgaaagactcctttagtgagagctatccttgtgaaagacttcttcgttggagtaagctctcaccctcgtccattaaagggaaaaaacccatgtaaagttgttgtgaaaatgacatgttttaagggtctttggcatttaacccttccatatgctacaatggtactactatataatctattgtttaatatcgtgaaaatgacatttttaagggtctttttttttttttttttaattcaacccttccatgttctacaaatggtaccactagctaatctattgctcgaaaccctaattaattttatctgcctagggttgatcaggagtaattaaatggacatgtttaggaaagtttttaaaaacaattttgaaataaaaaaaaaattgtgaacaattcttaaacataatttttgtttattttaagagcaaaattctatttgaaaactttaatatgaaaatatttttctcaattcattttctatgaaattattatatatttatatataatgtaagaattcccaaaacattcttcatatttttagctgtgttttgaaaaccaaatcggattgaactgtttttgatcggtttgattattggctgatcaccattccgattcgatttgaccttttgaactggtcaccctttgagccaaccgtgaagcactggagctggcaatcggattgatgaattggctaaatcaaatggttcttcatgaatcgaatagattcaaaacaaatgacgttttaccttatctccttccccccttcccactccaacccttatgcgccattgccctcccctagccgcccagcgcctttcgtgctctagtccaatgcgcctccttcaagctctagagcacatcggcatcgacgtcgctggctgatggggacaccgcggatgccattagtagtctcattcccggttgtaactgtaagtctcccctcccattttctttgtaatttatctactttatttccattataatttattttacatttctatttgttttaactttttgatttttaaaatttgtgattttaatttaaattgatgaatcatacttttgaaaagtgaaaacattgtgattttaaataaatttatgaaaacattgtgtaagttcatgattttaaaataagtttataatttaaaaataaattttaaattttctaattttaaattaaaattctgattttaattaatctaaatttcatatttgaaagtgattttctggtttaaaaataattttttgattttcaaataattttatgacatacggtgacttttacagataaaaaaatttgtgaaaaagctcaacaaataaaaaagaagttatcaatctgtagaatttattatttttatttttaattttaataatatataaattatatatttatgacatcattagtttaattgcagtttaataatctgtctgatcgatgaaccttaaaccaataatttaatttttcggttcaatgaccccttcgcttctaattaaaaacattgatttttagttattacttaaaatgctacaaaaaaaaaactaaaaacatctcaaatttattttaaaattaacatattttcgtaacaaattcttaaagaattggtttctataaaaaaaatattagacttgttttgtaagtttgaaaaccgttttctgctttttaaataaaaaactgtttttaagaacaatttccaagcaaggtttaagatttttttgaaagttattaattgaaagtacttcaatttgctaataaggttaaacatacataaaggatgatggatcaacatcccttccttgtcctttggtcttgatttcacttcctagaaagaattttaatgaagcacacaatatagttatgattgaaacaatttttttgggcatggtgttctaaattataggtaccaa

SEQ ID NO: 12114 - DNA, 11216 bp, Vitis vinifera
  Intron number 2 from transcript GSVIVT01027327001 (locus G SVIVG01027327001) derived from phytozome v7.0 (chr-ID chr1 3; pos 16545293 to 16556508)
aagtatgttgttattttgcatatatttataaagcattcgatatttaaattctcaaattaagtttcattatttcatggattgtatgttttgtaatagttatttatctttttatataatattgtttccatttggttctccttgctaaagtatcgtattttggaagtttaatatcaatgtcttaggatttcttttccttataaattgattacctgctcaagtacataacaaattgaggtaaggtgtgctaaggggtctgtgtaagtgcaagtgagtagacataaagtgtttgtagaccttgtctgcatacataaacctaagtaatccattaaagcattgagtttggatccttatcaccaaagagggttgtgctcatatcatttattcaattgttcctaagcataagaattgtcaaaatagtacccccgttgaatatgtgggttgaacttagaatatctaatgatttcaatactagaggtatggaaaataggtgatttaaggtgaatgacttacaaatagaggtagctctaaaacataatggaaattaaagaattaatcagagactaatttgacaaaatttcaaataacaaagcaataagaaaatcagacaccaaaggaaaagatccactaaggaaatcaccttaatctcaaatcctcctcaactagatgcttttaacccaaggttgaaggagaaacaatggcactaaaccaatattatttttagccttcagtttagatcttgaataagaatacaatgcttagtccaagtgaatccatatcaagttagcttatacttgtgcctaagattgctcaacttttgaccttcacaaccaatgtagtaagcacctatgaccactaggattcacgtgaacttcacatagacatttaagccattagaggactgatttgagatatgatttaacttagattcactcatcctttggtgcctcaatggatttagctactcatgttctaatcaaaagaagcaggtaaaacaatgaaataaaaagacaaagacatgaaattttaattaagaatgaaaattagaattctattaataaactagaaagtggtgaaaaaaaaccaaagttcaatagggaacacctagagaaatgggtgtaattaaaaatttataataaagatttatgtgttatacctaatttttccttgcaagatagtaggaataagatacccaatcaaccaatataatcaagagatctgcaaaataaataaaagagatatgcaatggacacaagatttttacatgaaaaacccctacactaactatggagataaaaaaactgcaaggttgaaggccgctaatctaaatccactatatgagattaagttacacatatttacttggcctatttaccttaaagacttactttctagtacttataacttaatacatatctgtgatgtaacaacctccaattgcttcagtgaatacgctttagcctcattgaagggatgtaggtcttcaactctaaattcttgaatgaatcatttgaatgagagatcgggaatggtgtggctcattaggctttctctcaaggagactctcttttgaaatcttcccaatctcttaccctaaaaggattataatgaggtatatataggcctggtttcgcagttgcgaaacacccttccaaatggcgtctcggctgcgaaattcccgttcagctttgtgcgcttgtcttcaaacgaccataacttcttcatttcagctccaaattgagtaccgtttgaagttctggacttctgacttcccaagctttgaaacgagatatcatatgcataatttgagctccaggaagtgcttcaaaaatgtgtccaacagtagcaaaatggaggtgcgacatttccgttcatggtttgcacagtcatcttcaaacagccataacttttccgtttcaaatccaaatctagaaccgtttgaagctgtgaactcgtgacttcccaagctttcaaatgagatattgcatgcataatttgaacttcgggaagtgatcgagatgtgtccaacaattgccgaaatgggggtgcggctgtgaaattgggatttttcactttttaggacttcgcagccatttcacagctgcgaaacgagggtcactgtgctgcaaaatggcactcgtgtgccaaaagcgctttcgcagccgtgaaataccctgcggaatggggctttggctgccaaaaaaatgaaattttttttttttttttttttgtttcgcaaccattttcacagctgcgaaatgaggttcactgtgctgcgaaatggcactcgtgtgccaaaagttggcttcgcagctgcgaaacacccttccaaatggagctttccctgcgaaatggaggatttcatgctttggtggttcgcagccgctttcgtagctgcgaaatgggggctcctgtgctgcgaagtggcactcgtgtgccaaaagtggtttcgcagctgcgaaaattctcgcagagaggggcctaaggctgcgaattggttttacagcaaagtgccgatttcgcagaggctgcgaaatctcgcagacccctgtttttcccctgttttcgctccgtttgacttcgattttgctccgattttgctccgaaagacttccttcaatttctttgcaattcctcttgattttgatcatccaaaaacctatattacatcaaaacaaactagaattaaagcattgaaatcaaaattaaagcattgaaatcaaacttaaaacaagaaattaacaaaacaaaaagatatggactagctagtctttaaaaagactaagtccatcaaaaaatttgctcctgatttagcttgcccggatcccatatgaagtttgcatccttcaattgagacttggtttgtatgattttcccatacaaagcttggagaaaaggtggaggcatgtgtttcttcatcaattcttccttgatgactatcctctgtggttctctatgtacattaacatcatagccatctttctctatgcttttcccctttttctttcctttgatttcctccctattttctttctctgtttcactctctaccttatgctctagcttgcgtgtgggcagatcaacctctttaccactcctcagagtgataacctcttcgacttccttcaccattgaagattctccctcttgagcctccacttcatggatactcatggaattttgataaggttgagaaggagagttttctttctcttgcactgtgttgaggttggcaagccttgagattgaatcttggagaatatctaacttctgagatagatcattttgcatttcatccatccttttattcaaagtactctccactctgtcaattctttgattgatttgagcattggtggcttcttgctttccaataaaatctcccattaccttggtgagattagctattgcttgttcaaggcctgaggcttgcggaagtgcttgaacatgttgcttgtactgaggcggctgtggtttccaagagaaatttggatggtccctccaattggaattgtaggtgttgcaatcaccaaacatttccctcttggctggaatggtaggacactcatccactaagtgctcataagatagacaaatggcacaaggcatagcttgcaatggtgtttgagagatggcttgcactggctgcatatttgtcatttctagctcttccaatctcctttccatagctgcaatctctaccttcatgttcataccatcattcaaaatatacatctcacccttagctttaggttgagacgtcattcttcccatatctctagcatttggttcaccccattctcttgagacttcagccacataactcattcatggcttcctctgctatggtattcaatatggcatgcacaactagcaacttgtgaattaaaaacagagaacacaaaagaaaacaaaagaaaaacaattcaaagaaagaaaattaaagtaaactaaaaactaaataaaaggtatactaaaatatgaacaataaagaaataaaaagagttagtaaaaggaaaagaaaagtcaccaaacttgtgatgaagatcacaagtactctaaaaaggtgatatcactgtaaagtggcaccatccccggcaacggcgccatttgattcgtccctagcagcggcagtggcaatggcaccatttgattcggggttcaatccccggcaacggcgccatttgattcatgcccacttggtgtctcaactgattcgggtccagctggtgctccttgattgagggagtaatcaacaaaatttataacctattacaccatatactagggtagcaaagacaaagctactatagcatagtgactctaggatcgttcactgggatgggttttcacttcacaaatgatgttaattcaaagttgaattggtgccttttcatttcaaggttagctttaaaagaaaacataaagatgtttgaatgaaaaaggattggttttaagctaaccaaaaatagtaactgattttacttacaaagaaaaatgtttcttggagttcagatcactaggctcgggttcctcatacaaaaagggagttccgatcacttgtttcttttcctcgcattagagaattaacatatagttccttctccaaccggtattgtatagatgcttcccattaatgggttcaaacactaaatccctctcactgatgcactttgcaatggctcatacctctcacctagcacttgccattcaaggtgatctttaaccttggattacccgtcaaaagctcgcaagagataactaatggatgtctccttggagtccaaaagcttactaagtgttggctattctagaaaatcctaccttcaaaccacctcccaaaggctcgcaaggggtaaactagtgcatctccatggacggagatcacttgccttaccaagtgttggcccaggtgatttaaaggcgttttaagttaactaaaaagataaaaaccattaatgggttacactttctcttcattaaaaactaaaacaacaaaacttccaatttatgcatgtggaaacttacccggctttccttactccaagagacaaaaagcttagtctctcatcctctgaggaaaaatcctcaaagtttggttagctagaaataaaaagaaatgaaaaatgaaagagaaggaaaaaacagagcaaggctctgtatattctatatattgatcgattacattacatgatgatcttacagtggatgcaagggagtttatataggaaggtaatttacccttccttggatacttcctagctaaggaattacatgagtggttgaatacaaggagaaaatggaaatttagacacaaaaatctgaagaaaaatatccaaaagagtcggtggaaaatatcgggaagctccaggaaccatttcgcaagagaaaatggtgtctgcaagatttcgcagacactcatgaagggctgcgaaattacttcgcaacaaaaagctattctcacagggctgcgaagttggcttccaccttgaggttcttagcttccagcttgcggcatatatcgggcaacttcaggaggaaatccacaacactgtacaaaaaggctgcgaaattctcgcaacaaaaggctgattccacaacactttagagtgattgccttgcagtggctgtaacttattcgtttcaactccgaatcgtgcaccgtttaaagcattggattcttgacttcctgagctttgaaatggtatatagaatgtagaaaatggacttcgggaagtgctccaaaagtgcaaaagaatactgcagctggctttcctctgttttcttcactctgtttttcctctctccgtgtttctctccttgcatactttgaacgactttggcaaagggatatggggctccaaagcttggtttcttcatgaatttgagcttccaaaagcttttccatgaactatatacagctctccctcattcttggattgctttggtgatcaaaaagctatcaaaacaccaaaacttaacacaatttgattagaattgattgcaagggtccttaacatgttaattgggttaaaaggcaataactactactcaaaagtgtttaaaagagttaattacaagctatcaaatagcactttttgagtagtaatcaaggcctagaggccgaagagggtcggtatctcaaggtttctaaataggatttgcatgaaatattcaataaacttgtgctaatcttcaataaaattggcatgagcacttgagcgcacttaaccaccgcttaagcgccttaggcgcttgagtggtgtcaagtgcttgtgtggtcttagcacttgagcgttgttacctgcttaagtgcccttgcccttttacaaaaataaataaaaattaatttaattctagaaaaaatgcaccgttcctttttataccctttaaaagcctaacttgccccaggccaaaccttcttagacgtacctgttactttttggttggacaaacaacaactcttgatctttaatgaagagtaagtcactatctaaaaagatttctaaggtcacaatttacttggaacaaaattaccaacatacaaataagactcaatgttctaacaatctcctcttttggcaattttgtgacaaaacataacataaacctacctaaactctcataaaggagtttacataacacacatgaatgctcaattaaaaaaaaaaaaaactgaggaaaggccttacatcatcatgtaacttgcacacaaagaaaactatacataaggtaaagcaatgtgtgggataaaataatgtcaagaaagaaaaacgagatagttggagattttgcttgatgcattgtgaaggcatgaagatggaacagattcctatagcaacaccaatgtgcaaagcaaagcttgagaggaatatagatgcatacaaattaactaaacctaataaaagcttgataagacacaatagatcaacaataaagcataggaggctttcaccaactagaatatacataaagaagatcatgggaacaagtttttatgacttagagtagttttagagagatagacagataacaaagaaatattttgcaagaaacatctatgttaagtatctctcttaaacttctaaggcatgcaatcaacaattgatttggttttgttgatttggttttctccaatgtctcaagattagtatcctccaatatatcaattactttccctcaagaattaaaaatgaataaaaataaaatttgaaaataatttttcaaaaaatatctccccaaaataacatttccccttaaatgtaagaactctcattaaaataaaataaaataaaataaaataaataaaatttttgcctagagatatctcccaaacttcaagaaatatcttatatatcttctaatgaactccaccgttggtatttgattgactttgcaagtatgttttatagatctcccatttttcgtcacaaaaatgaaaaaagtagcaagatagaaatataaagcacaagagagacacaatgggaaatataaagcactatcatatatatagatactcatgattctagatacaaaaaatgtgtaacaaatgaaaatcaatttagatcaaagcaaaatacataacagctctaagcatcaagaggtggaagaggtggaatagaactcgatgcgccctgagaatggatccattaaatgatttatgaaagctaaccttagacctcatggagctaggtgtcttgtgagtctattctcagatgaagatgagtcatggcatctatgatcttttgtatagtcagatcaaccgtaaatagtacagaagatgatgtgtgtgagaaactagcatgaccacgactaaagcgtgtatgagcaagctccgaaatattgacctcgagaactagagcattctacttcatcgctcaaacctcattctccttgttgagagcctcttgagatgctaagactagtgttacatcctatataccatgggaaacatgggaaccatgagaccatagacatgactataatgtttggcttaagaactcacatttggaagagcataaaatgcttgaaccccttaagaagcatcaaactagaacccaaagttgtttaggattcgagaaatgagaaaggtaaaagaaaggccaccaaatttgaaggagtgatcacaagagggggtcatattgtcgagaatgacctaccctatatcaaactactagccagagagaatgacatgaataaacctagcagtttggtaatggatcttggcatagtaagtgaagagatagcttggtgaaaccaacaatggaaatgtaggagggaatggggtgagaaatgctataaagagaagtgggaatgaatcaagcttccctcgagtgagagcctatacctcaagaaaaaaggaaggaacacactcaacaagacaaggcataccaaggacacattcgatcgactaggaggagatgagaaaagaatggcaatacatggtcactctaaatgtaacgccaactataatagagtgcatgttagcatagaacatctatattaagatgagggtagtaagtcccttggagaaagaacaaagtcttctaccctcactcacaaatgatggtggagagaagagtatcttgaaaggctctaaggtcgactgaacactcaatctcgatgcgataattgtggaaagaagcgtaaaagcgagtacgatcctcctcacaatggaagcactcccactaggaggtcatccaagtcaaaagaaccttaaagaggaatgtcctgaatgggctctagtgacctagaagcggtcacctcatgctaatggtgacaactagccatcaataatataaagaatatacaaaggcataaaaaacaaagaaaactatgaaagaaaactaaaccactagaaatgatctaaactatgtcctaaacaatactatacaaatgaaaatgtgaaactaggagtaaactgacctcaaatgcacaaaaaccaagaacccataacgtttgagctaactagaaggaggttatttataccctataggagcgcttgatgcagattagcactcggacgtcatgagcatgggaaacaacttataacacttgagtggtcttattgcttgaagcgatgttggatacaacttatggcacttgagcacttggagcactggataagagtgctcaagtgttggtgacaacgcttgagcacttgatttagaatttaagcaccaagtaagagtaaagggctttctaaaaaggctttgaaatccaaaaccaatcaaagtataaattactcatgaatttaggaatgataaacatctaagggtagaatcatagagctcataaactcacaaattaggttgaaacgtaatgtaccaagtaaagtttctggatagtatccatccatcaaacaagaatgaagttttcaactccaaaaaacaaaattaatcttaattttagtttagaaaatcaatgcataactatcaatgtataagaggatcaacatagaaacataagcattgatgttcaaaggaatacgacttattgtctagttctatatttcgaaattgatctcctagaagtaacatctagtcatgtctttagtcaaattaaagaacacatccaattaatttgttctaagtttgtttgatttttgtttaacatgaccttgttgatctacatacaacaaaacttaaactccctcttaatttgatatcatatttttctttttctttttattttgaaagtggaggcattgatcttttaattttactttttgtttttattcatatttgccattttatcctttttgggagtgtttccaaatgttgcaagtgagcagcatatatttagggaatgaatcttggaaagtatataagacttatcttagccaagtattcaaattttgcattgacttatgaaacaataataatgatcatagccaaacaaggtatgaggataataagatttaagcatgataaaagatccttccaaagaaaccaaaatctactttgtgagttaaacttaagaagttccccgcttgatcaatcacaaagtgtagttcatgttgaatttccactatacaaagatttttaattatcaataagtatgtacctcaaaagtgattaacaaatatctaaggaaaacctacaccaaatcttgtaaatttaatacatttctctaggtcataaagtcgagacattacaaatcatgctaacaaggtaagtaaacaaacaataattatatgcccaaaactaaaatttaagaaggctaaaggaaacaaatagaaaatagacaataatatatatatatatatatatatatatatatatatatatatatagtacttagaagcttgaaggattctaactccttaacgcactaacaatcatcttcctgcttgcaaaatagacttaaataggtcctcaattattctcttaagtgtttgtctaggtggaggcattatgaaatagcttaatagatcccaaagtagagaagaaaagccaaaagatgtgggcttaagaaaaatcaagagagcaaatagctatgacaacatgctcaggtaatagaggaggtgtcaccctagttgtgtctgcttttccaaggtagggtgccacttgataggcgaatgccaaagttggcttccattgattttctttgtgcatcttctttcttgccttacttaagtaatacaccttaaagaattcctttgagctctcttattcacaaatatggattcaaactcacaccaactcaatgaaaaagtgagaaaatcaagcattggaaaaataacacaagtttagtgttgggaagcatgtttgatgccaaataaatgtaagaaatgtatgattcatggcaaaaaaaatgtgctatatatgatcgcaagtaggaagttgaggatgtaagtcttatagatgaagaacatgacaaatgattttctccccttgtgtttgttaatggacacgagttttggctattttgtatgatttttacgtagttcttacttttcatagcatcataatttttaatttatgtataaagataaaaaggtattaacttactgtatttcatattaattgaagatgtatgttttattattatatcttcttgatcttcccaccactcttttcttacatattttctcatgcatttatgcatatgatgtggacaaatgggatgttgaattaaaagtaatacaattgattaatggttttactgaatgtcattttatgtgcagatttctcaaatttcaaggaacttggaagtgt

SEQ ID NO: 12115 - DNA, 19099 bp, Vitis vinifera
  Intron number 1 from transcript GSVIVT01023103001 (locus G SVIVG01023103001) derived from phytozome v7.0 (chr-ID chr1 2; pos 22558856 to 22577954 reverse strand)
tgataaatttttgtcatttgtgtaagaatctttttgtttgatagtatccaaaaaaagtaatttttgaaagaaaaaaaacaacaatgaattatttgaggataattttttttcagttttaaaaatttattaaatatttaatattttaaagaattggtaagaaaatgttgggtgttgacgaatgataagtaacaacaacatagtatttatttatttatttatttatttatttagaggtggagatggcgatggcgatccgtgaacaaatggaaggagatattactacatagaatctaccagatgtcggtgtaccaataaggcacgcggttttgtttacatttcaaccactccgtccccacccccacgacatctcaacactcctaagtctaatatgcctcaacctaacgttggcttgccgacactctaagctttccattattgctgttcactttttttaaaaaatatatgcatatattccttgtctgaattttctgggcgccgttcctttggactcatgggactcagacgcttatactcaacagtaggctcttgtaaacgtttaggtagcatacgtcatggatagctggcacttaaatcttcccctccaaactcgttttataattttgctcatatatattattaaaaaatggatcaatcaaaatcttgttacgattcaattttacttccagttattctataccaatgacttagatttcaccatgtatttttaatggtctcaattacatctttaatatgggtaccatacagtacctataaatatatgctaattagagattttgaaggaatacggtataatgatcaaaagggaatttcaaaagtgttcattaatgatttctctaaaagattcacttctaaaaatccaatgataaattatgacccatttgatacttttagtcctcgcatctcagaagaagaaaaagagttaattaaagaagccacaaaaaaagaaatttgtgcaactccttcacaaatcaatagtatgaaagtgtttggggctgatggtctccaagctagtttttataaaaatattggaaaatatgtttctaaaatggtcaaagctttctttttcaatggacatatgctcaaagagataataagatttttatcacattgattcctaaatctaataacttggagtctttaaatcattttagacctattagcttatgcaatgtctgttataaaataatagctaaaattttgggtaataggataaaacctctcctaaacaaaattttatctcctttgtaaggtgcatttgcccaagaagacttgttattgataatgtttttttagcccatgaaatcatgcatttgtttaaaaagaaaaaagacaaatcaagatatatgacgattaaacttgatatggaaaaagcttatattaggcttgaatgagattttattagggtaattctttccaaaataggctttcacccgaaatggattgaatgggttatggaaagcatttccatagtgtcttactcaatcttgattaatggtattccggaaggaaaaattcaaccttcaagaggtattagatagggagaccctttatctacttatattttcattatgtgtacaaaatatttggggagagagttagtaaaagaaacggaaaaccctataaatcatctaagaatctcaactcatcgaaatggacctaaaattccctcccttacatttgcatatgaatatatcatctttactaaagcttctcaaaatgattgttctaatattaatagaattttgaatggtttttgtgccatgttagggcaacttgtgaattttcataaatcctcagtctagatttctagtaatattcaaagggttatgaggaagagacttgagaaagctctaagcattcctatttctaatgacattagcaagtatcttggttgtccaataattcaaggtagagttaaaagagacactttttataaagtaattctcaaatctcaaaaaaagattgcatcttagaaagctcgattcctttcaagagcttgtaaaatagtcctaataaaggctaatttggctagctcacctcttcatgttatgaattgtttcaaacttacaaagagaaataatgaagatttagatagaatcaacaaaaacttcttatggttaccaaatgtagggtctaacgagtctaaatgttttcctttggtagcctgggatggggtttgtagacctaaatctaaaggagggttagaaattaggaataatgaagatgttaataaaactacaattactaagctagggtggagaatccttacgaatactaatagcatttgggctaggatcatgagagaaaaatatattaaaaacaacaatttctttaggatcccaaaaaaaaaaaagattccattgtttggaaggaagtaattaaccatagaaaatatattggagttgggctaatatggtgcataggagatgagaggaaagtctacttttggataaattactgggtttacatgtcgtcacttatttcttttgtggatgaaaaccacttacattgcatcaattgggatgccaaagtgtaaaactttataaatcaggattcctaatagtggaatttacagtccatttcctcaatcctcccccaaaatgttctaatagacattaaagctatcctaaatccttcctctcccttatgtgataggattatttgggaattctctcaagatggtaagttcattctcaagtcagctacttaggctatgagaaggcctttgatacaccctataagtagtatgagtaacccctccattttgtccctttagcacatgtctttgagttcacttccagtgttccacagtaattcattggtggcccattgctactcacactacatatattttctgaaccactttggagactttggttgaggggtttatccagctccacattatgaccttaattgcctttcaagtttagactaggcttcatttaggtacactttaggttagacttagttaggtccacctagtctcacccttggcccgtataagtataccttaggcccatttagacaccttagggctgtctaggttcacttagggtcatttagacaccttaggcccacttagcccattagacatttttaacgtgacttgtacgtttgcatgacccatttatctcatttacttatttttttatttttatttttattattattatcaatcacttttatttaataatttattatatttatttattttaatttattttcattgttatcaatcacttttatttatttagttattttttcttttttcttttttatttatttgttcattatcttgttatttatctattattattatttttatcttttatttattcttttttatttttttgatttaataatttgaagttttataagaaaatctaccattggagaagtttttggcaaatgtaggacttttaagtgatatgcatggattcattttttttaaattaaaaaaaaaaagacttttctagtggatgtgatagaatttggagagagtaagactcctcacgtagcagcactaccaatggctacaaaaagcatgagtagatgggtttttgaggaggttaagagagatagcaaggagatatagcaagagagatagcaatgaaatatatcaggagagaaaaacaaagagatatagaagagatagagaaaaatagggaggttttcaaagggggggactggcagcacgcattgagaataggggaataaatgaagaatttttcattgctttaggtgagaaaaaaaaaaaaaaaactcatgcccataggttttttttttttaaggatttcgaaaaagaaccatagctggaagtcaagtgggttgagtcaaagttgttgggtacgtttcttgtttttattttttttattttttttattcccatttatatttgatcctccattgttctctagccatttttgaacattcaatctttgctgtttggtgtggacgctaagggccacgattggttggtttttttttttttatttgctctgattttttttcttggactttcgtttattttcaatgtcattgacttcatctgagaacaatatgcatttgggtttgtctttgaatctgatgatagaaatcccgccctatttatgttaaaaatctcttttgaatcattccctcattttaacccatggatctgcccttgaaatgaggctatttatgttcatcttctgctcatccttttcctggaattttttaatgttttcatctatgctttttgctcattctttcgcacggtgttggagtccttgtctatgtgttcgagcatgtattggggaatgacgaaagtgttgatatgagggatgaagtgtgcgacaatctcactcaaatattggatagttgattccaaggtattgtagtgaattggagaaattggaggtagcgttccattggcatcagatttggattctctaaccccataggattcaatggcccgtatagagtcacaactcctagagttatctgtaagcatagttaaatgggttaaagtcgagctaatatattcccatgctttcaagagatcacgttatcattggccaacacattgttgaagatagtaagatttgatgtgaagaaagtaattcatgttgggtctttctttgaagaaatagatcctccctcactccttttaagaaagcttctgtaaatggtaatgattctatctcacagacaaccaactgttgtgaaggctgagatgcttggtgactcagagccttttattaatttttatggttacacttacatgcaatccagcaacatgccttatacttatcacacagtgcctactaccacctcaagagaacctggcaagatactggagtgggaaattgaagatgtgatttctagttacttccaaaggttgactcagcatacagagcaagccaaggatgagatcatttgaagaccagtacaaagacctagtcatcatcccatgtctctagtgacatatcaggcaattgcagccaagaccatctttcagatgcgacagctccatattgagaatagatagtagggtctagttgaaagggtcatgtttccgtggatatatcctacaatcaatgcaacttttgaggtgcataggtgtctacgctgttgatatgaaagagatgtggatttaaaaagaagcacacttaggggggtggccatgcaagcggggaattcatgcatgtggggtccagggtgcaattgggactgtattgttgtggtaggttgacctgacgctatttttctctaataacaacatcatagtcatctatcttctccacaaaccttgtgttcagaagatcttcgccaacctatctttgtttcctggctagcttcaattcaaatgttgcatcagacttgtacttatgggcacctccaactttaatccccatgagctcaaaaatgaggccaggtttggatatgttgtcgtccgcatttgcctctctcgttatcatgctgacctaagtggacattgttggtcgagattttggcataaagaatatcaagatggacaactgaaggacctttcacttggtttccaatttgaacataatcaatcaaccataggagacgacaatactagatagtcaaggagctcttccttgctggtagctacgcactcttattcagacttcgacaaattgctcattgccatcgacctattgattgctttcgagaatcttgacgccaattgatccaaaattttttgttaaatggaaccaacacagctgcctccaaagctcagaaattccttaagtgcagcttattgtcaatatgtttgctctggaaatcactcactttatcatgaactttaagtttgcagttgttcttgcaaactgaaacataaaactgaccaagggaagaaaatctttatggtttgcaagagggtatagtttgtagggaccacccctaaacacccacgtggcaaccccgcatggcaccccgccaggggacacgtggcacaccaactctctatccggattccctcaggggggcatacgacactctcaaacccattatccggacgatcccctctcttgtccggatatgttgtccggacccaacgctagcaacttaaccaaaagccttggccgtgaaatacgggcctccctggtctacacaaccagaagcactttcgacgggaccatactgagtcacttcaaacaacctgtcacagcccacattccgtcgcctgcagagcgaaatgacaggaatgacggcaagtcattctcccccatgatttctgaagctgcttgtagggcaatgatggctctgccactgccttagcgcaatcattgcaagccaaaaattcttcccaccattaaaggggacagagcttctgacactataaaagagccttcatgcgaggagagaaggtaagctttcttactcaataaaaaaggaagattgattatcaaagagaaggttaacaaaaccatcggagggtgtgttcgaataacctgtccggacgtcttttgcaggttgattgaagcaggaatcatcttcagttgaaagggagcatccatctagctattgcgaggatttcggtgacgcaaggcttcaacattggcgccatctgtggaaacttgctcaattaacagcgaagatgtccacaccttccaagagtcgttcgccagctagaggagatgaaggctatttcgaatggcgcgagaccatggaaaggcaacagctagagagcgagcgacaaatgcaggctctcctccaggaaatgacgagattaagagaagaaaacacggtgttacgcctccaggtttcgtctttggggcctcatcgtgaccaacgcctaaaaggctagggggcgaattctaggcctgatctagaatcgatatatctcagaactgcaggggtcgtctctcatatgtgaaatgagcgatctcgggaatgacccatacccacgtatcatgctccccaagatgaaagcttagactctacccgtctttcatcaaagaggcagtatgataaaagaccccagttgtcaaacgcaatgcgtgcgaggttaggaccgcaaaagcctagtaaggagaggccgccaatggtcgcaacctgggaagcgtatcccgaccccccagtcgcacccattgttcagaacaacccccctcatcaagcggtacgataacccaaaaggaactcatcaaatgaaccacccccaggttccattagcaaaaggttggatgacatgctctccacaccttttaactcacatattattcgttatgatcccccaaggggatttctcgtgccaaaattttctacgtatgacgggtttagagatccgttcgaccatatcatgcattaacgacatctcatgactctcgacatagggaatgacgcgttgctgtgcaaagtatttccctccagcctacaaggccaagctctttcatggtttcaccgactccccccgaactccgttgataacttctgagacctatcagaagcttttgtgggacaatacctgtgctctgccaagcataaacagaacatcaacaccttgcaaaacataaaaatgcaggagaatgagtccttaagagaattcgtgaaacggtttggtcaggctgtgttacaagtgaaggcctacaacatggatgttgtcatccaaatcttcaaacgaagcatatgcccaggtaccccattctttgaatcacttgttaaaaagcctcccacaactatgaatgatttgttccggcgcgcaagcaaatactcaatgctggaagatgatgtgcgtgtaaccacccaacaaattttggtcgtcggacagacatctagaagtgacgtggaaagaagttccagacctccggaccaaccaaggccgtctggtcgaaggcagagggagcaaaattgcccggaattgtcgtctctcactccccttactgtgtcatatgagaagctccttcctatgatccaagacctgtccgactttaggtggcccgaacccatcagaatggacccagccaagagagatcatagcaagaagtgtgcttaccacaaagagcatggtcatattacggagcgatgcaggagtctccattacttggtagaaaggcttataaaagtaggacatttgaagtaatacctccgctcaaaagccagggttagagatactttccggagctacgattctgggacctccagggcccccgtcgcccctaaggccatcatcaattacatccacggaggaccactggatgaggagtacaactccaaacgaaagagtcagaggttgctaggagcagcgtcggtgcgtgagcgcgtcaattccatccgacctgggttgactgacgggagcacccacccgatagatgggatgattgtcttcctcctagtgaatcccacgaaaatattacaaccacaccgtgacgccctcatcatatccctagggatgggagactttgatgtgagatggatcatagtcgacccaagtagctcgactgacctcttacaggcatcagtaatcaaacagatgggactcgagctatccggcttagaaaatcatgggtggatcttgtcgggattcaatgaagcgtcaatcaccttccttggaggcgttgtgctaccggtccaagcaggtctagtcactcttaacgtacaattttcagtggtagaagatttgtccccctttaatgccatcttgggacgcacgtggttgcactacatgaaagtcatcccttccacataccataagatggtaagctttctcactgaggatgaacaaattgatctatacggcagccagctagccgctcgccaatgctatcaaatagtgctagaaatcaggtccaacaaagatggtgagccccttcccgaaaccaccaatgtacctaaccaatagcaattactgaatccggcggataaagatcacccaacgacaaatcccttgtggataatccaaatctcagagaaaaacactcatctcacacatattagctccctcttgacacctaaagaggcccaagatatccaggacaccctccgacaaagccatgacgtctttgcgtgggcacattccgacatgacgagaatccatcttttagtcgccttccatcgacttaatatcttgccctcattaagacctgtccagcagaaggttagacggtttcactcggatagacagaaaattgtccgggacgaggttgacaagttgttggaaaccggatttattagaaaagtggagtatccggactgattgacaaatgtagtggtggtccccaaaaaggaagggaaatgacgagtgtgcgtcgattacaccaacctcaacaatgcatgcccgaaagacaatttccctctactgcggatagatcaaattgtggacttcactgccaggcaaggaatgctctccttcctagatgctttctccggataccaccaaatccccatggcccttgccgacgaagaaaagaaagccttcataacaccgcatggactttattgttataaagtcatgccattcagactcaaaaataccagcgccacctatcagagattgatgacaaaaatcttcaaaacccctggttggccgcatagtggaggtatacattgacgatatagtggttaaaagtagaatatgagaagagcatgcacaccacttacgagaagtcttccacctactaaggaggtacgacatgaagctgaatccgtccaaatgcgctttcggtgtgagtgttgggaaattcttggggttcatggttagccaaagagggatagaagttagccctgaccaaataaagacagtcatggaaatgccaccccctaagaacaaaaaggagttgcagcgcctcacaggcaaactcttcgcactaggacgtttcatagcccgattcactgacgagttgcgacccttcttcctagtactacggaaagccgacacgatcggatggacggacaactgttaaagcgctttcgaaaaaatcaaacgttatctcacacaaccacctatcataagcagccctttgcccggagaaaagttgtagatgtatttggttgtgttagattgggcagttagcattgttttgtttcgttgcccaacacataaagagtagaaacctatttattatgtcagtagagctttggctgatgcagaaacgaggtattcaaagatagagcaaacaatcttagccttgcgaagtgctacccagaaacttcacccctacttccaagctcacccgataatcatactcatcgaccaaccccttcgcaacattctgcataagccagatctatccggaagaatgctccaatgggccatagaattaagcgagtatgcgatcgaataccaatcaagattgtccatgaaagggcaagcaatggctgactttgtggtagaatcctcccaaaaacctgctcgagacaagaaatcgcacgaagaagagtggtagaccttacgggttgccggagtctctcgatcatcagtgttaggaatttgaggctaatacaaactatggtaatcaccctagaggggggggggtgtaaatagggtgatggtctctttttcacaaatttaaactatgcaaaaataagagacaattatatgcaaatatataataaacaaaataaacacaattgcatataatttaaaaaagttagggaagagagagtgcaaacacgagagtttatagtggttcggcacttccttacctacatccactctcctcaacctcctaaccgagtgagggttccactatcttgaaacttcaaccaagcttccaatctctttacaattggattatggttccaattcaccctcttggacttttggctccaagcatcctttacacttcttcaaaagatatccctctcttgaacaacctttcaagtgataccccttacttgagaaaattcttcacaaaaatatacaaataatgatctctcaaaatcctagtaatagaactttaggttcaaagatacaagaaaaactaggattgaatggtgcactaaagatatgcaagttatgaaacaatggtgcactcaaaaacactcttccaaggctcaaatataatcaagaatgatttgggaaggtttagcttatgaaacaatgaagtttggagcctttttatagaagaaaaaagtcatactagctgttgggggttcgaccggttgactaaccattgggaaaagtgaccgttgggcctcaatcggacctcaaccgaacctcaaccggacctcgactggaccttaatcggttgaggttcaaccttgaccgggaagaggaatccactaggagagagagaaactttttggcctccctcaaccggtcctcgaccggacgagcacaactggtcgaccggttaaaccggttgagccatttttttggctcaacactcaacccttctctttgagatggtcttcttctttatgatttatacttgacttgatttgtctttggattgtcactttggaagtcgtcttgcctaatcacacttaaaatgtagttattagttctaaaccttgttttgttatcatcaaaatcaagattaaccaaaccttggtttcacaatcgggatctggagtaggacttttactgcaatccccgatgggtgaacaactggagtaagctatctaggtggggttccccacatcaaacaatgaagcagagtatgaagccatcctgtccggacttgatctcgtcttcgcgctatctgtctccaagctccgagtctacaatgattctcaactcgtggtgagacacatgcaggaggaatacagagccaagggcgagcacatagcgcgatatctagcgaaaatgagaaacaccctacagcggttggccgaatggaccattgaaaaaatcccacgagctaataacgtacgtgccgatgccttggcaggaatagttgcttccttgcccatcaaagaacctatattattgcccatatatgtgcagactgatccctccatcaccgaagcatccacttgcagtactattcaggagagtcaggaggaggactaagagtggacggaagtcatagcaaggtacctccgaacaggctctctacctgatgaacccaagtaggcgcataagatctgggtacaagctgttcgtttcaccctaatcggggagcacctttacaagcgatctttcacaggcccctaccttaagtgcctagaccactcagaagcccgatatgtattagctaagttacatgagggtgtatgcggcaatcactttggagaacgatctttggcgcatcgggcacactcacaaggctactattggcccactatgaagaaagacacgacgacttatgtcaagaagtatgacaaatgccgaaggcatgcccccataccacatgtgttgtttgaaacattgaagccaatttccagcccctggccttttacacgatggggggatggacgtagtaggacctttaccaatcgcagctgcctagaagaaattcctgctcgttgccacagactacttcaataaatgggtggaagcagaggcatatgctagcatcaaggacaaaggtgtcaccaagtttgtgtggaaaaacatcatttgctcactataaccgcaaggcacgaccccgggtcttcaggatcggaacactggtcctcagaaaggttttagaaaacaccgctgagaaaggagccgggaaatttcaagcaaatttggaaggtccttatattgtaactaaggcaagtgaaagcgaagcctatcacctacaaaagttaaacggaaccccgttgcttcgtccatggaatgtatctaaccttaagcaatattaccaataaagagaagcgaaaggtaaagaaaagcaaagaagtgtaaagtatttataaaggattgaaaaattgtctttacaaaatccgtcgccccaaaagcaacaaaacaaagagaaaaagtataaggaggactgcacacaaagaaatctcagtaaggagggcctccgggtatcgcatcctcatcgtcagaaggaagaaacggaatatcatgcataatactgttcttcttcatgcagcaacgatagctgaagaagtacatctcgtctacctgcctttgatacttcgtctccaactcttttttctgagcgacaaacccgacttccatcttctccatctgagcaattaggcccgcctgcagattctcgtctccttcttctgagctgcgaggctagcccgaagttcgcccacctccttcttaagctgagaattctcttgctccacccctttgatttgaccttccaaggcccctttttcccccttcaacaggttcaccttaacctggacagcccccttctccttctcagcctggctctttccgtcccattcgctacggctttctgagtagtggccaactcagcctccgccttttctaaccgcgagcgcatctcctcaacgtcgctcgaatggtgagagatgaaggcgcgcatagcctccaccacttccagtcgcttgaagagctgttcgcacgtatgcatcatgtagcggatgccagccatgacctgcgcagaacaacaacaaaacaaaagctaatacagtgcaaagaggtaacagttgctaaggaagaaggaaaaagtagcaaagaaatgattaccacttttgcagtattaaagatcgtccactcctacagatgttgaatgcaagacacggcggactcaggggtgccaaaaggaagccgggccttgacaaaggcaggaggatcgccacccatgttcatagagacccgcttggtaagcggaaagaagtcagacatccttgtggaaggagcctccgcattcgtgaaacatgacacttccttcaacatctccatcattttctcacagcttggaggaactacggcagctggactattcttctcgtccgaagccttctcgttaatcgctgcctccggaaccccctctgttccacgggtctccactgcagtcgaggcattactgtgagcagttgcgcctggttgagcaacagccgctgtgctaagccctggaacgtcgggtcgggccgtgccgttgtcgttgtgttagatcttgtagtgtttggctgaaccgttgcagccgcgctagaactcgcctcgttcggatgggtcgtagctgacaaaggaacttctgtcgtcggatctttcccatctctctccgggtagaccctcttggttggaggagacgcaagatcgatgggatcgtacaaccgcttactatgcctttgcaaaaacccggttttgaggttgttcatgtctctcacttcctctggttcgtgcacgactctcaagccaacgaagtccagctgaggctgggaagagccaggtcccagatggaaagtctcaagctgcgggaagctagaagtatcctcaggctctagggtagggttatccgatcgattgtacgcagaatcgaaggatgaagacgacaggttaggagtcggagacacaatctggagagcttgtgcaatggtattttttttcttcttcttggcagctggaggacggaccgcgggagaagagtcgcgtcctttctcaccaggccccttctcaccaagcgctttccttagtgtcccctcctgcatcttcttctcccgctggtcaaggcgttcatggcacgccttcgcgtcagcttcgcgagccatttcgtaaaagggcagatccttcaacacaaaatgttccccgggcaccatgaccttaggtagtcgtctggagagaatattgaggacgtacggttgaggttcccggacgaccgccaacaggttccaggcagaaagaagtgtctggtagtgcctttcaatggaaatgatctcgaacagcctgttcaaatgatcgaaagaggccttctccacccactcaaccaagtgacccctcttgtgtgtacttgcgttacccaaaacaaaaaaagttagtcatctgataacactgaatcaagagtcaaaaaccaacaccggacagataccaagagctaccctacccggaagcttcaatgaatagttaggggtaaactccctttttggaggctttgacaaactggcccagtgacccctgaccagcacatgccctttggctccccccttgttcgaatccggaaggttgatcaccaattaaagagacgggatatgagcaaacaggctgaagatgtctatcttccccttcttgatggtgtaaacaaataggacctccagcaaggaaagatctaaattgaacagcatatttaggatgctgcaccccatcaacacccggacaatattgggatggacgtaagttagaggaatttgagtgaagtggatgaactctttgaagagagatggaagaggaaaccagagccccatattgaattgctcattggaaaagtaaacggcgtggttggcaactttctctgtggacatagcattcccgtccactagctgaacggagacaccgttcggaatgtagaaatgctcacgaaactccttctcctttagcttgtcagtaggcttccccgagtaggtctgcccggatacactttttccactaggcccaaccgcactggatgaggccacatccttttttgcaggcatgttaaagcgtggggccgagacaaaacctgtatggcgaaatgccaacaatcaagacagaggtacctggccccacaaccctaagaacaaatgacctagaagacctaaaatagccaaaacccctaatcctaccccaaatgcggttcagtcatccgcaaaggcaatagaagccacaatgggcccaaagcaaaagcaaaaccccctaaaaaaccctaaacattacctttgaccctcaatcgcaaacaaaatacccaataagccaacaaaaatcgaagaaacaggaagcttaagatgaggagatagaaataaaaaaacatacttggcgcaagcttgcaactagaatgaaggtcgtggtatagtcgcccttgtgacaggaatgccgctaacaaaaaccctagaaagggaccctcagtcacaaacgaaatgaacaaagaagtagagggaaaatacagacgagatgaacgaagaagcagaaagaaaaatgcagtcgtggaagctggattccctatttaagggatgcgactcctcaatactccaaatgatcaggcgctcaaccgcgttactatcgaaatgacatgccgcatggaaatccccctaaaaacgacggctcaccataaacaccccccattttttttcgcaacaccatgtggagcataaaccccaaaagaaacgaaggggctaaagacatcatttttaacccgccttttctgcccgggcaaagcagccaatttaaaaggggggcattgtatggaccacccccaaacacccacgtggcaaccccgcatggcacccctccaggggacacatggcacaccaactctctatccggatttcctcaggggagcatacgacactctcaaacccattatctggacgatcccctctcttgttcggatatgtttttcggacccaacgctagcaacttaatcaaaagccttggccgtgaaacgcggacctccttggtctacacagccataagcattttcgacggtaccatactgagtcacttcagacaacctgtcacagtccacattccatcacctatagagcgaaatgacaagaatgacggcaagtcattcccccccacaatttttgacagccgtctgcagggcaatgatggctctgccactacctcagcgccatcatggcaagccaaaaagtcttcccaccattaaaggggatagagcttctaacactataaaagagccttcatgcgaggagagaatgtaagatttcttactcaataaaaagggaagattgataatcaaagagaatgctaacaaaaccatcggatggtgtgtccggacaacttgtttggacatcttttgcaggttgattgagcaggaatcatattcagttgaaatggagtgtccatctggctactgcgaggattcggtgacgcaaggcttcaacatagttgatcaggaatcaattctttcttgttgtcttttggatcaaggctactatttggtttcacattttgtgaaaattctaggaattcttcaaatgagtgaaggcagccactggttactctcattagttttgaattcttactctccacaacaaagttgcacaatctacaagagagatatgtcattctgtcggctccagatgaggtgcgtggtgactccaagtattgtaaggtggccatgcaagttgatattatgcacatgtgtagaggatgacttgacaggttttggaatgaaccccatattttcttctactattcttgagtttgaatagtagactgaacatatgaagtatatggatctagtgaacgccattcttgagcaactgtgagttgggtgttgagttcttcctcaataacttcttattctcaatttgatcctcaatcactccctttgagtctttaaagtttccagttatgtccttgagcttctaatatcccttcattattctcaactagtttaagatagcctcccgtacctgtataacatttctccaatgttggcagatattaaagaacatgggcattagatagtgtatcccaagtagcaaaccatactggagtttctctacttccaattgtcgaacacactttcgattatgatactggaggtaagctgcttgcaacttgacatatcaaaagtaggcatctcccatgtcaaagatcaagattcccattaatttgcagatagatattcttttcttaactactcttgcaatcagacccaacccagattgatccttaataaaaccttgaagtgcatgaccacctttgggtgtcattctcaaagctcacaattgttgggcaaatgataaagatgacttggtccaaggtgaatcacgccactcccatccaaagcttcagatataagatgagctagtacagttaaaccctgacaacaatcactagcttcaatgagtttacagtatatgtgctaacacgaagcataggggagtctcaattaagtgttgcagcctgtaaattgacaaacacaaaccgggaacggcggtttaagaatcgacagagatggctttcattcttacaacattctcatcgttgtgcaacccagaaggcaaatgtcaagatgttaattgtattactgttcgaaagttgtagaggtatatggacagatgtaatctaccgcaatgttcatttccccgttgccagcatattgcttcatcaccataaacattgcaaagactcaggatgtcctgtttgtattcctgtcaagaattatttgcaggcataactgagagcacgcgctggtccaggttctgattttggctcaccaaatcctatagatggatcttgtaaatcccattatactgtagagacagctagattaacttcaaaggctttttcagttgttgaaacctcgaaagatctgcaaccttcatcaaaacgtatgaaaacagagcagccttcccgatctcttcttcctgagagtgaaagttctgtagtatgggctcattgatgcatggccatcgctggttgcattcagaatgatcatcatggggtgcgagacaaacaaaatggagcatcatcagtcttgaaacttcataaagatcacaattatgcaacatgattggaaagatttcggttgattctaaaaatggtactctcaatagaaagacatctttcattaatgccagatctcggaactttatgctaccaccagttggctttgggcaacttggcaaagctcgtgtctgctccaatgatgctgatgttcatcaatttattcaccattggttgagggcccatgcatgcattgagccatttataacaacaactcatcggcaactgagtgaaatgcaccctattttcaagcttctcaaaacccacccatgacgctcaacaactctgtccgaagaggagacgagggtttaaccagtgagagagaggaatggggaatctgaaacaaaaatagacttcagatgaggaagaggcgctatgcaccggtgcagcgaagcataacaccggtaagtggaagaatatccagaaggatccgaagttcaaccattttctgtttacccgctcaaacatcgatctgaaggacaaatggtggaatgagtgtcagtgctagtggacaagatccaagggaaaaatcacggactccaa

SEQ ID NO: 12116 - DNA, 14648 bp, Vitis vinifera
  Intron number 3 from transcript GSVIVT01032239001 (locus G SVIVG01032239001) derived from phytozome v7.0 (chr-ID chr1 1; pos 13590978 to 13605625 reverse strand)
gcagtacacctcgggtccttaaccaaggtacactcctcttctcttacataaaagaatgttggacttatagtggaaatgttaaaaagaaggttttacgttgtgacatggttgtactgtttacattatgacttaattactgtaattagaatctgggcaatcatttaccttaggcgtctaagaatgatgagctatatttatacctataaaaaaaaaggatggtaagctattcattctttaacttcagatgagctcacatgacataacaaattataattcaattttctttttccttattgaatgattacattaacctccttttctttagggtttgtgactatttctacctctgatgccaccccaccaccactggcaacatcactatcatgaccaaaaaaatttctcctgctatttttgacccagggaaatcccaccttccccactgctaaccagcaactgtttccactaggtatacatgtgattgactgtatataactacagccaccataccaccgccagcccacaagtttctatatattctatcacttttgtacctaggttgctattccaagatttgcgtgtaatgttggctaattctccaagcaacctttttaaccacattcattcacaaatgcctttcgttaggtctctgaactctacctcaacactgcttcttgctactactgactattttttacttctccaagttactaaatttccccaaatgtaggtacaatagccagttgtagatcttgggtcgttaatagatctagcccaatctgcatcggaataaacttcgatcctcttattagatcctttttggaaaaataaaccttttcttggtgtcatctttaaatactgaagaattttgtatacaactttaaaatgctcttcattcggatttttttttttgataagtaaacaagatatgcattaaaaagaggctaaaagccacaaagcatacagggagtatacaaggcggctaaggcctcaaaaagagcaacaagaccagaaaaggttcacctccccttaagtggatgctacccactccaaaaagcctataagggagagaaactcctcgcctaaatacaatttggctcagctccataagttacaaacaaaaaaactctttaatttttggatattcaacaccccccccttaaaagctagtgtattcctctccttccaaaccgtctaaaaaatacacaacggtatggatttccaaacctttttccttttcttccccacaaaggggcccctccaggtaagttaaaacgctcttcattcggattattcatgtattgacttacaacactcatcgaaaaacccatgtcaggttgtgtatgtaatgggtaaatgagtttacccacaaggctttgatatctctctgtcaataggtgaactatctgtcattagtccaactttataggttgattctatgggtgtgtttgaaggcttagatccctagcattcctgtttccttcaataagtctagtatgtacttttgttgagagacaacaacaacaaccctttttgagcaagctacttccatacctaggaaatatttgagagttcctaggtccttaatttcaaactctctggccatcacttccttcaatcctctcacttaatctgtataattccttgtcacaataatatcattgacatagacaatgagaatgactacttttctatcatttgaatgtttgatgaacaaggtatgatcaacctgtccttgtgtgtacccattattcttcacaacccttgtgaacttgtcaaaccatatagagattgtttaagtccatatagagactttcgaagcttgcagacttttccaatattggcattattttcaaattcttgagggatttccatgtaggcttcattttctaggtgtccattgaaaaagacattttcgacatctaattgttgaagaggccaatctagattgactgtaagtgacaatagtattcttacggtattaagtttggctacaggagcaaatgtctcttgatagtttataccatatgcttgagtaaatctctaagcaacaagtctaactttatatcgttctatgcttccatttgatttgtacttaatagtgaaaatccatttacaacgaactggatgctttcctttgggcaaatttgacagttcccaagtttcgttcttcttttgagccttgatttcattaccaattgctcgtcttctcttaggtttttgtagggcctcatggatactctttttttaaaaataaaaaaataaaaaaaaattcagaaacgaacaattgtattaaaatataaaaacatgagaaggatgggaagtcgtccccaagatgtacaaacctgattcatggactctctttgggatctctacatttgacagattagtaacaaaagcataatactatggggataatctgtcataagatacaaagttagagattgggtgttgagtacacgacctcacacctttcctaagagcaatgggtatatcaagatcatcaagaacatcacaaacttgagtattttaattttacttggactttctagattcaaatcggattcttggttttgcttaggttgagtgtggtactttaattcctcttgaggtcatttcctccttgagtaaacatgtaacttagtttcttttgcatgttgtgtatgagtcggtgtggatggagtaggtaaaaggcttgaaagactcaagtggtttgaatggctcaggtagaggttgattgacaggaatacttgttcaaacctaggagataattcttcttgaacctaaaaattacattcttgtatattttcctcccccttaatgggatttttggtgtagaagggttgtttttcgaagaaagtgacatccaaggtaacataaaatttcctggtaacaggtgaatagcacttataccctttttatgtaggagagtagccaaggaatagacatttggtggcctttggatcaagcgtacagcgatgatgatcatatatgtgaacaaaggttgtacaaaaattttgggtgggaaggtggacataaagcttgtattgggatagctttgaagaagtttttggagtggtgtttggagttgaagagtttgagtgggcattctgttgataaggtatgcagatgtgagaatggcttcacccaaaaattcttaggcacattcatggtaaacattattgatcttgcaacatcaagaaggtgtctatttttccgctcggccacaccattttgttaaggggtatcaatacaagaactttgatgaattattccttggttcacaaagtattctcctagatttgaattaaaatattttcaggcattatcagatttgaaaatgttgacttttgcctaaaactgattttggattatattataaaatcttttaaaaatgagaccaacttcagaattttcttttattaggtaaacccatcagacccaagtatgatcatcaatgaaagatacgaaccatctggatcttgtgacattattgattctaaagggaccccagatatcactatggattattgcaaaaggatgagagactttataaccttgaagtggaaaactggttcttgcatgttttgacagttgacaaatttcacattgcaaagatttagctttggaatttttaaataactttggaaacaagtttttcaggtataaaaaatttggatgtcctaatctatagtgccacaacataatatggcactattattatttgaagaattaaagggaatagaaaaagacgcactacatgcagtttgagtttgcttcttaggactattaggaacctcaagaagatagtcctgcacattccttagcattgccaattgtcctccccgattccaagtcctaaaattcacaatgtgttgaataaaagttagtgacacaatttaagtctctggaaagcttgctaattgatagtagattgcgagtaagatttggaaccaacaagacagattttagaattaagtctttagtgagacatattgatcctattcccgccaccttggacataaaaccatcagcaatacaaactctaaagttctcagaatacaagctgtaattatgaaataaatcagcattaccagtcatatggtcggaagcctcagagtttattatccattgattcttcttctccttttgagaactcaaggcaattgaaaaattacctttttgagcaaccggagctgctgtcattgagtttgtttgggaagcggcaatctgagagattaatttctgaataatctctacttgtcctttgctgaaaagtgtggacttcttggctgtctgctgtttctttgtctctcctgtcatggctatcatacctcgaccatctctaattgactgtcgtgatttccagtctgctggttttccataaatctgccagcagtggtcctttgtatgccctggtttgcgacaatggttgcaccaaggtctgctattcctcctttggtgattgttgttggttgttgtttgactggaattctgaacattttctggaccagaaatgacctccaaagaagatgacttgtctttcagtagccatgctattttatcatgaggactgatgcaggcctctgtttttgaacacaaaaaaaaagggcggaaacagaattctgcgatgctggaaaacagagaaggctgaagaattttgaaacccagggagcctaattcggctatgataccataaaggtttattgagaagaaaacttctttatttttcttatcttcattagggacatgaaatagaataaataggagagaatggctacaagactgccataaaatcttcttgatacagggaataaaatgccatccctataaattagggatatacatggaaaaaatgagatttggaatatttattctttatctttttattaactagttaactaatccctataaaatagggatttatattttgaaatcctacagttttcccacttgatcttttggagtaggaaacattgttccaatctaacagtacaaaactcaatggaatacctataaaggcatttgtaacagtgattcaaagagcataaaagaagtaagcaaggtcccaaccaatctccaattatcttcacttgtcctagtaaattgtagcatttcttgtatcaatcttactttgaacatctttccaaaaccatgaaaagctaccagtggtatatcaaggatctagttgcctactgcatgtccaacataagaaagaggaatttccaaagatcataaaaaagggctgggggacggtttgttgaaggttccaggttcaagtcctaatggggacaaaaatttgcctctcagaaaaaaaaaagcaagtcaagaatgggggcaaaaatgatctatcgcatcttcgcatctttcatagaacacatgagccaggattaaagcatgctactagcatttactttcttgtgagtcacaaaccttgtgagtcacaaaccttgtgagtcacaaaccttgtgaatgatttaactctagagcagccattggaatttggatcttcaggtctgcttggctggtaagaaacagttaggttatcctttttgaaaagaaaagggaagaaggattttgaagagaaagatcttgatccatttcaggcctaacatctcttgtttggagcaaaaggaggaactgccttttttagggaaaggagcaatgccaaagcaataatctcactctcattgagatttcaatgagaagcaaagtgcgaagatagtgaataacagggaaaggagaataacaatgaattggggagttgcaccttctcaaagataagaggaagaataacaaaggggaagaataccccaccaatggtcttctcagaatatgcattttagatccattgcaaacaatgaactatcatgaggaagatttttaaccatgaatcctggaggtagatgctggtttggtgttgagaaaacttttgagattaacatagaagagcagaaagggagagtgcgtgggaaaatctgtgagagaggccctaagtcttcttcatggataagatttggagggaaaagtctatctttgttgcttgaaggggttgagtcatgctgtgagctataggaaagaactcctttcaagaagttttggtcggaaggggatagaaactatagtctggaactgcaaagcaacaaagcagggagattcctgttttgcgttgtaagggatgtggagaacaaaagattctccttggcttttccagaaggtggggggctcgttggaggctggaatctgctcgtcagtaaactgaaaagcttgggtgtctctccctttcagtggaaaggtgctctacctcaagctctgcctaacagaggtgtggatagagcctccatcccccttcgagtttgtcccgcgccccgcgatgccgtctggttagaagctgataaagaatctctcgttagaaatgaggaaatgctgggtaggtgtctgataggcctttggaagggagactcggaccgcctccctgatctctttaccttcgggacatgggcgaaaaatacctggctcctagaagggaacctctggctgtctaacatgagggaaaacctcttgtttttggaatttgagtttgcggacgaagctgagagggtgcttaatttaggggagaaaagctttagaggaagaagcttccaccttgaaaaatggaagccttcagtgggctgccttaaggaagacaacggggatacgcgccttgtatgggtcaaaattttaggtctccctttgcacctttggggaagaagcctcttcaagaggtttggggactcttgtggaagattcgtggctgtggatgaaaacacagccgagcgtcggaatctcaaatgggccagaatcctcatcgaaaccagagactggcatcacccaatttctctgcaggtggtcgccggctcctcttgtttcgctatgcagctctggtgggaagaagaaccccgcatctccactgtgctcccttcccatgggcccggtgcttggaagcgcaaggatgacgaagtgtcccactcacgcgccgaggggagcgtgggctttccgccctcttcctcagccctttcgcagcctgaaaagctgcccccgcagcctgaaaagctgcccccgcagcctgaaaagctgcccccgcagcctgaaaagctgcctccgcagcctgaaaagctgcctccgcagcctgaaaagttgtcttcgccggttttggggagagacgatgcctcagacaagtcgaagtcaactgcccaccaggcccttgcctgcgatttggatttgggccttggtctggactcctcggcccacccggacctggcccgccccattgggcctgggttagggaaggcccattctctgggaaacacttatataccccttggcccagcttcttctagcgacttagggctgggaacctctacctgctccccgcaccggaggagaggaccccccgctgagagcccccagttggaagcgccgtcccatttggaagtaacgtcggcaaatgacctccctcccactgccgaaggccgcaatcttcaaggtatgctcttgccccctccaccccccttgagtgggatgccttcttctccttcttctactccattcttggttacgggatccgagagggaaaggggatgctctggacagacggatccgacgtcaagagagactgaagagacgccgattcctctgtccttgatgcttagagatgggtcgacagtggtcctgaggcccgaccccccaaactttgcggcgaagcagaaggaccacacagatatctccccgcgcgaagaagtatggtcagaggaggagatttccaatctcttccattttagcaaagtcttgggaatatctgtcgaaggacacgaggttgaaattctgaatttacttgaggaattgaagctgaggacgggaaatagcaccctttgcaagcgacgaaagaagaaaaaatcttgcaccacccgttttgaaagagagttgaaaaggttggaatgctctgttagttacggggagacttcagggttagccaaaaagtccggccacaattcctgggatttggttccagttgactaatgagaattaaaattctctgttggaatgttcgcgggcttaatgactcagagaaaagaaagttgatcaagggcgtggtaaggaaccaaaaaccagatttggtttgccttttggagacgaaggtgaaagagatgtctcagcaattggtcaacagtgtgggtattggaagatttcttaattgggcctctgtagatgctaggggtacggcaggaggtctcctgctcctctgggacaacagagtcttggagaacttggaggtagaaaagggggaggggtactctatctctatccgtttcagaaactgtgtcgatggcttcacttggattttttctggggtatatgggccggtgattagcagtgaaaaggaggatttttgggaggaacttagtgccatccgtggcctctgggaggacccctggtgtttaggaggggacttcaatgctgttagattcccagaggaaagaaggaactcccttaggctcacaactgaaatgagaagattctcagaggttataggggaactggggctaaaggatctccctctggctggaggccctttcacttggatagggggtttgaactctcaagctgcctctagactggaccgttttctgttttcggaccagtgggaagaccacttctccgccatcacccaagctgctctccctcgtttgatttctgaccatagtcctatagtccttcaagttggaggattctcctcaggcaaaagccctttccggtttgaaaatatgtggctaaaaatcgatggtttccaagacctagtccgaagctggtggaatgggtattctgttgaaggttctagtagccactgcattgccgagaagctcaaagcgctcaagaaggacttgaagaactggaacaaggaggtgataggtaatgtctctctcaatagagcagaagccttctctcgcctgcagcgatgggagaccagggagaacgacagccccctcactgctagtgaagtagaggctaaaaatctggctcttgaggactacaagaaatgggctctgttggaagaaacttcttggagacagaagtcaagagaaatttggctaaaagaaggcgacaagaacaccaaatacttccacaaaatggccaatgctagggcaaggaagaacttcctgtctaaaattagaataaatgaggtcactctctcttctagtgatgacttaaaagaaggcgtttgtagggcctataaatccctcctctcagaaccaggggattggaggcctaatatcaatggccttaacttcaaggagctgggagaaggtttggccagcagcctagaagttgtgttttctgaggaggaaatctatgcagccctaagcagctgttgtggcgacaaagctccaggcccggacggctttacaatggccttttggttgtgttgctgggatgttgttaaatcagaaatcttggagctcttcagagagtttcacctccatgggaccttccagagaagtttgaactccacgtttcttttgctcattcccaaaaaggaaggggctgaagacctaagagatttcagaccaatcagcctggtagggagtgtatacaaactactagccaaagtccttgctaataggctgaaatcagtgatgggagaggtgatttctgattcgcagcaagctttcgtccatgggagacagattctagacgctgttcttattgccaacgaagcccttgattctagattaaaagacaacgtgccgggcctcctccttaaattggacattgagaaggcttttgaccatgtaaattggaacttcctcatagatgtgatgtctagaatgggatttgggcacaaatggatcaattggatgaaatggtgttggtccacggccacattctcaatcctcatcaatgggtgccccacgggcttcttccgtagttctaggggattgaggcaaggtgaccctctctccccctacctctttctttttgccatggaagctcttagccaactgctgtcacgtgcaagaaatgagggctttttttcaggcttcaaagtgggaggaagatgtagagaggggctgatcgtttcccatctcctattcgccgatgataccttaatcttctgcgacgccaatgcagttcagttgcaataccttagctggaccttcatgtggtttgaggcgattttagggctaaaagtcaatctgagcaagtctgaggccatcccagtgggggagtgtccccccatggagtccctcgtctcagttttgggatgtaagattggatgtttacctacttcctacctgggtcttccccttggagccccttacaaatccactagtgcgtgggatgcagtggaagaaagattcaggaaaagattgtctctctggaaaaggcaatacctttccaaaggtggccgtctaaccttattaaaaagcaccctctctagcctcccaacctactttctctctctctttgtgatccctaagagagtttgtgcaagactcgaaaaaatccaaagggatttcttatggggagggggcgctttagaaaacaaacctcacttggtgtgttggaaggttatttgtgccgctaaaaaggatggaggcttgggcatacgcaacctagctatttttaataaggcccttcttggtaagtggttgtggagatttgccaatgagaacgagtccctttggaagcaaattatctctagtaaatatgaccttcaagatgggggatggtgctcaaaaggtgttagagatcgttatggggtgggtgtttggaaggccatcagaaacggttgggaaaactttcgatctcactcccgcttccttgtaggggatggcaccagagtgaagttttggaaggacttgtggtgtgaaaatcaatctctggaagaagcttttcccatcttatttaatctctcagtcaacaaagaaggcttggttgctgaggcctgggaggaagacggagctgggggtagctggggacctcgtttcaacagacacctcaatgattgggaggtgggggaagtggaaaacttattaagcaagcttcatcctttggctattagaagaggtgtggatgactcgctcaggtggaaagcaaataagaatgggaccttttctgttaagtgtttttacagctcactctcaatgggcatcaaccaccccttcccagctagtactatttggacgtcttgggctccaaccagggctagttcctttggttgggaggcggcttggaacagactactcaccattgatcgcctaaagagatttggttggaacatccccaacaggtgcttcttgtgtaaaaatgaggaggagtctattgatcaccttctcctgttttgtgagaaggccagaatgttatggtatctaaccttctccctttttggggtgcaatgggtgatgcactcctctgtgaaaaggaatctcctgggatagtatggatcttttgtgggcaagaaaagggagaaagcatggaaaactgcccccctttgcctaatgtggactatttggaaagaaaggaatagaagagccttcgatgatgtggaaagaaacgatcaagatatcaaatccatttttttgtacacttttgtgaattgggctagggtatatattaaggatcatactttatcgttgtttgattttgtaaactggttagccaccaagtaagggtcagaaccttttgtttcttgatcctttgtatcttggtatacttcgtgtatactctctttagccttttggcttttaatgaatttcctttatctatcaaaaaaaaaatgaggaagatttttaacacttgtgaaatagtttccatgtgttttggtgaggtcctgacccttgaatgggcatcccatctattatttgcacaccttattgctcttgataacatagtgccaaagagaatattccttggggatcacccacaactgctagcctatactaatatgacgaagacttgaaacccctaggaaataagtgtccataggcctggtgagtagtcttgatcctacagttggcattccatctattatatgcaaaccatattgctcttgatagcagagtgtcaaagagaagtcttccttagggatctcccttaactacaggcatatataatggtattttttttttttttttggataggaatatataatggtattattataagctaaacaacctctccaaccttactcccttgacgctgtccctcccccaatttagaggcttaaataactaacacaggttctagtatgacagtgattttccacttcattgtgtctagcttcaatgaagttagtagttgtttggttggagtattgcatatacaatttaaggtataatgaaggtgaagctttagacaaaggggatgtatgttccatcctacatgggaggttcactttgttgtagactttgccagcctgaacttgtaaatgttcagaacagtatttctgtgcttgcagaagtttatcatccacctcctaaaagttcatctattttggtgaaatcttgacaagcacttaggtactcgttgataaaaatgaaaattaactgctggaaaattttggtgttgaataagtactgaaatatataataaaaatgattattgaaagtttgaaatggtttgtttttcaagtttgctcttatacccccattatgatattatattaatggaacatattttgataaatattatattaatagaacaattcaagaactataaatcttaataattcatttagaatttgattcttcataaggtagaaagacttttattcataatgaaatttattctagtagaaagacttatttcattgatgattttttgtgtgaagaatagagtattaacagatattgatttaactaacggtaaaaataaaatgaaaaaattttacaatgaggggggaaatgaaattaaaaagttgtaaaattgtaaaattcacctattatgttttgcgttaagtgataagtgaggtattcaggactgaatgaataaagttgtttttaaatgatttttagtcttaagtgagtgatttatgttatcaagcacgtttaatcatccggacctacttattttaaaagtttctgctcttattgtgattctcatacatacattattttccacttattgtaattatcaaactcttctagaatgacaggctttttggctttctcatgcaactctctcttacttgtgacacaaaatttgctgctggtctgacaaattttgaaacaaatttttattggtagtgaagctttcctttgggacttccaacaaacaattgctgacatgtggcaacaaagcccaatataaaattacatcttcaactcctcaaagcccacatgacaaactaaaaatcccttgtaacagttaacataaaaacaaagtataaacttgctattctttattgaacaaatgaaagaacagtaccttgtgctcatcatgatacaggactagcaagagagcttgagtacatgggaacaagttagcagtgagtctgggaaaccattgggtgatttggtttatcaggggtcactaaactacctattgatttagcaaataatcaaattactgctctgaatctctgtatattttaaacaatttacaaagccaaaaatatttatgatgtttgtaatcataatgctgttacttccttgattcaatctctctggtatgaattgattgcagtttgttttggtagttttagatttcagtgtcaaactggcttgttgtggacatattttaacctaacttctttagatattgttatattgtttgattttcatcatgttataattctttaaaatatttggtccttttgttattttcagacttgtttacaggagaaaccttaaaactgatctcttccccactctttttttcttcatttttgttatttagaatcgtgtattggtgttcaattgggtaatatatttgcaacatgtgccattttacggatcatgtagtatcaggcaaccaggcaagagcctgggaaactgatgtctattgtactagttccattagcttttagatgagtctcagtaatctggtgaaaacctggaaatggaaagacctattcttcgtcaaaagtcttgtttcttcaactttttttggatacatttgtgtctaccccatatagaaagggaacacctcaatttctccctcttctgttcttgatgggtctctcacccttttacattactttagaatacctaaaatagactttatgatcttaaaaagaagacagccaacgtaagctcccatagaaaatctattattttattacacatcccactgaaactcctaaaaagtcttaactttccgaacttttttgtacaactccctaaattttctagaactcctgcatctatgtgctacagcttctagctcttaaaagaaaaaaaatattattgcaagtgcagtaatttcattattgcaagtgcagtgaaatacctagtgatacgtttttgtggttgtaattgagtgatacttttcttggattatgtatcctatgtggaagagctctactgaagataactttttatgtactgactctcttccttcttttatgggtttcaggtttagaggcatctgcaattgcttctaattcaaat

SEQ ID NO: 12117 - DNA, 6419 bp, Vitis vinifera
  Intron number 4 from transcript GSVIVT01011583001 (locus G SVIVG01011583001) derived from phytozome v7.0 (chr-ID chr1 ; pos 6264431 to 6270849 reverse strand)
aaggcccctacaagtctgttgtggagctgtgggatgaggaaattcaattctgattaaaatgagcatggctgagcaccactcccaattgacttgaaaatagctagttatatttgtgaatgaattgaaccttttgtgatcgatcaattactatttgataaaattgggaagaaatttagaggagggctatccccaatgaatagctcgtcacctttgaatgattgtgtgctctttttctcacagctaattgaacatccataattttcatatggctctgctcataaatttttttccccataaagcaaatgtcgtcaatcaatgccaaaaaatagctcatataagccggtgctaggagaggtggaatatctagccaagaggttcccctttagcacagaaatagttctcccagccaccactctacctgtaccatacttttattatcaaatattttaaaatagctcctcatttttcttaaaaatttcttagtgtatcttttatatttctttgtaattttttgaaaatgttgtgaattttttttagcgttttaaaaatcggatcggatcaacgggtccaacttatctgactgtcagttggtcaccagtccggtctcgattcacccttttgaaccggccagcctctaaaccagcctcaaatcactggtaccgactaccgacagtcaaatcggtgatccagttgacccgattggtttttgtggtttttgatgaatagaacggttgaaatgaaaattttactttttgttttttgccttccctttctttttcgttcttccaacctgttttccctctcccataatcgttgccccgcccactttttccagcccgttctctcccctccacaccacccccctccccaaaacagttgttgccctgcccacagcaaaacagtccacaagactccacaaaccacccctcagtcgttgcctcgcagctcgttctcccctccgcaatcgtagccccctcccacaccaaaacagtccaccggactccacaaaccaaccccaccatttccagctcgcgtgctattgctcccgtcaaactcccacctccagcccagccaacgcgacatcgccgacctacgaggccgctccgacgggcataagtccgatttttgtttatttcttttattctattaccttatttccttatttaccttaatttttagatttgtaattcttttgactttatgatttagatcttttactctattaccttatttcctcgtttccttatttattgtaatttttacatttgtaattcttttgactttatgatttttaaaatttatgcttttaatctaaattaatgaaaatattaaataaatttttgaaaataaagtgtccttatattttaaataaataattttttattttaaaataagtttatgatttaaaaataaaattttaaattttaaattaatctttctaattttaaattaaaattcctattttaatctaaatttattatttgaaactaattttctaatttttaaataatttttatcattgttagtttattgagcatttgtggatataggatagtaattttttgataaaagtgttatattgatttatattatcattgtattagaaatatgatataggatgacttagtagaatttattatttttattttttataattatttttaattttaataatatataaaatatatatttataatgtcacggattcgacttgtgaactgtgaattgataattttttcgatttgatcactagttcggttttaaaaaaaacatttttttatttttaatatataaaaaataaatattatttataaataaattaatattataaatttgtatactttatttttatgaaaatatttcttttactatatgtctatataaaataaaatattttttatttaatattatatataatatggatgggatgagataaaatcatactctttaaatcaagtgaaatttaaggttttagatttttttgaacgagtatagcaatttttgaaaataattgaaactcaaaaacagaactatgtaccaaaaaataatatattaaaaatggtttaaaatgagtcatgactctattatttctcttttatacacaaatataattttttttctttaagatagaaaaagagaagaatcaataacatgaaaattaattacactaaaattcaacaaaaaataaatcattaaggctagagtacatgcatgaaaaatatgtgtaaaaacatagttatctatcataggaaaacccgatgacaacaacttagagttacttaaacattttctgttagcttctattattttaaattttttatggagaacttcatttgtttttgcacttcttgaagtccaaccttccttaaccacaatcctttctcttgtgtcttgcattataaagatttaaatttattgatatgtattaataatgtaacaattcactttggacatatcaaaaataggtcatccctctactagttcaagctcacaagctacatgaaaaaaaaaaaaattcacttttcttggtttaatcttttattccatagcaaactttataccatcccaatgattaggtagagaatgtttttcgattgattcctttttagtaaaaggaggtaggtaatgtatgaggctttgattgattcttttttagtaaaaggagtttcatatgtccttaggtctagtctcatattgttcatgatacctatgtgtagcatcatagtacattttggattcatcttgtaagttaaatattggttttttatcacagttttttttaagacaattggagtgtatttaaacattgagacaacaatgaaaaaattgaagagaaagactggtgggaggaataataaatatttttttgtttgcccatatagtaagagaaaagaaagaatttcagagaagaatatttttgcaaagtaggtaataattattgagaagtaaaaagaataaatcaataggagttataaaactatttatatataaatatatgggaataataaataattacaatgtaggtaatgatgcttccagtattagtagtttctatagatattttacaaatatttgatctcaatttttttatttttttcgtaaaataaaaatagggttttaaactaaatcattaatgaatattaaaaacaatttttggttcaccataaataagacttgtaaaatgttaataaatattaaatgggttggaagtatacaacaaatttattatttaaatgtttaaaatttttaaagttaaattcaagtactaataggaaactctctatataaagattggcctaaagatttatttcttttaatatattttaacttagtaatgcatgagaataaattttttttgaaagagtaccattgaaaaataaatataattgctaaaaatgtttgagcataactcttcaattaaccttatttttttcaatatgaattataattataatttttttaaaaaaaaattgaatattaatattttttttttcaaacatattgctaaagtttattcaacatttttttttaaaatatgttaactattttgattattaatatagctgttgattaaatataatttcaaaagggaaaaaatctatacctatactctatattatatataaaatatgggtggttgtaaaatattttttggtctaaaacaattctactatatatatatatatatatatatagaaaactcttaaattttattttaattattttgttaagtatgattaaaattgttattgggaatggaattgtgcacatgaaacgatattttcatattatgtggccaattgccttccaataaatttgttttatttttaacatttagttataatacttataatttccaaatgtgcgggttattttcacatcatcctttgcaatccttagaaagctccttgaatttttattaatgtcagaactaaattaatactcaatatcaaatttctaattttgaatctcaatgttgatgttattgttcatgcacttggaccttatttgaatattgtttttgaaaataatttaaaacaatttccaactcaaaaaacaccttcaataaatttttaattgaaaataaatttttcataatttattctacaagtatcttgtttctttggaataaattgaatgtttatttttataaaatattatgagaaataattgaaaatatggagaatattttacgacttttgtattgtatataaagaaataatggagaattatttaatttaaagaaccattctaaaaaatatatttgaaaattgcttttaaaagctttattaaggttatatttgattggaaagaaaaaaaaatcctaaggaaaattattttcttatgtttagttatcaaataaaaaaaatattaaaagaaatcaaatataattaaaataaattaaaattttaggtatttttaaattatttaatttttgtgtagaaaaattaaaataggtaaaataaatttaaagtaatatacaaaaataatgtattaactttaattctatattttattttctttattcactttttctttttttctttttttccaatatttttttcctttatattttacctcaattttttcacaaataaaatatacccaaattatatcttaggtttctaagcatttccacaaccttataaagatggattccaactttcaaaatcacacagaattaaattcctcctagttaagaaccaccttggccaatacttgggaaagctaaccaactctcattgtggtgactactaatcaaaattttacaatgttcccatacaactttaccatttattttttacctccttttgttttttcaaatcccttaaagcataaaaaaattaagattatttttattcatagagatttggaataaatacatctaaccacggtttatttttatcaattgaggctttaataaatttattccaattattatatttatattttaaagatgttgctgtaaatacatttaacaatgattgattttcatggattgatactttaataaattattcaagggacaattgtgttttggatctaattgggcctaaaaattaagttttggtccatataagttcaccatttaagcccaagacttagagaaagtgtgaaaattgagaacaaagatatgaactttttatcttttcaaaaatgatatttattgactatgaaaaaaaaaagagtagaaaaacattaatttaaattttattccttttataaaccttaataaaatttaatttaatttagtgatttggaaaaaaatacatcattttccaaaaaaataaaaataaattattattattatttaaaaattaaacatcttggaaaatatatatttaaaattatgtatataaaaaataactaaaagtatgtcaaaattatttttttaaatgatatatttttagaatatattttttttaaaaaatagttttctaaaaataataaattttcaaaataattattaaaaaaaattaagataaaaaagtttatcaaacattgtgataaaaaatactcaaaatagttttgaatggtatattggtctcttcacattttatatctttttcatcaattatacaatttttatggaccaaatcttaatttttgggctcaattagattcaaaacacaattatttcattatttaatatatatttatttttttagaaagattttgaataaaaagatttttggtaggtgtggttaatgctttttttaaaaataaattttatacataaacgtgcaaggaatcatcatttatctccactttattacggccatttaaaagctttcatgattttccaatactagctgaggaggtggatcgttgtatcttcaacccggagccagtatctgatacatcactttctcttaatcttgactccgtccacttacaagttggaaatgtaatgagcattggttattattattattattatggggtggggccgatgacaaaatgattgagtgttctgtgcaatgcaagtaaagccgtgaactttttctgaataaactaagcaattaaaatgttagggtgaattgacagtatttcaataaacatcgtaatttttctatcatttcaataaacatcgtaatttttctatcatttctttaggtaaaactaaataggcaatatcaattaacagtaataaataaataaattcatgtaacaagaaaataaattagacatcaaaatttttacatggaaaaccccccaatttgaaagaaaaaattacgggatttattccaattcaaacatccattattaacaataatgagttacatctgtcttttttagaataatatttaaagattatcaaatacatcaaaatcacatatagccttggattatataatttcttttgacaaaaataaagaaaaattagaggaagtatactaaaaacgtcgttactgttt

SEQ ID NO: 12118 - DNA, 9300 bp, Vitis vinifera
  Intron number 1 from transcript GSVIVT01028345001 (locus G SVIVG01028345001) derived from phytozome v7.0 (chr-ID chr7 ; pos 6380080 to 6389379)
acaagctcgaatactccatttctatcagttggaaggtacccatctctcttttttttcccagggagtggtttcttggaatgatgtccatgttttttgggcccttgacccctctgtttggttgccgagaaaatagtggaagaagtggatgaactgatttttttttttacgctgggtagaagggtgttttttttttcctttttcggggttcaagaattttgttttatcggggatcaaatggggagtagatgttgttgttgttgttgtttatttatttatttttttgtgtgtgtcctttaatttatagtctgtttgagtggatcaaaagctcgaattttcatgtggggttcgttggttttggagatttctgctcggtagaagatgggtctctgtggattggcatggatggttattgtctgtgggttttcgctgtttgattttatgggtatcgtttagtgagttttcttaatgtgtcttgagattagatggtttatttcccattagtattggtgttcggatgggtggcttgcttcacgcatttcttagactacaattttttatggtttttttatatcagtttttttgtatgccatttatattattatattatgtgtggttaatttattctatcttgtatagattatgtgtggatgttattggtctcaatgaggtattctttgttaaaaaaatatttcaatttattttcagtgtcttggatttaatttgtgaaattggcccctttatcagtagcgaatagaattgcgaaaatgcaaagggattttctttggttgggtttgggagaatttctttgaggaatatggccctcttagggaagtggctttggaggtttccttgggaaagttcagttctttggcgtaatgttatattgcacatatatgggacacatcccaacggttgggataccaacatttcagtgagatggtcatattgtggttcttgaaaggctattgctcaattattccgggattctccattcatactcgtttctggtgggtaatgggacaaagatccattactgggaagatttttggtggggggaataacctttgagttctcaatttcctaatttatacagagttgtatcagttagaaatttttctatagcatctattcttggtctctcttctccttttggttggaacttttaacattcattaaaaccttacgaattcacagattgaggatcttgaaatactaatgtccattctcaattgtgtgacctctcactgtccaccctagatgtgagagtctggtcattatcatccccaagcttattcatggtcaaatttttttcttagcctcatccaattactcaattccaaccttttttctctagcgaaattcattgcaaatcaaaagctccatcaaaggtcaaagaatttatttggctagtggccaacaagaggctaacacaaatgacttgctttaggtggtaagacctttcaaagcccttagtcttgatcgttgcattttgtgtttgaaaatcagggagtcaattgatcaccttttttttacattgtctactaactttggagctatgacataagttaattaagctagttagattggaatagatttctcctagaagtattagtgacatgatgaccatttcttttaagagattggggaactttattagaggcaaggttctataacatatcacatgccttatgttgatttggatactatgacgggaaagaaatgtaaagatctttagggataagtggaggacctttaagatgatatatatattttttttttgataagtaagagaattgtattatgaaaaggcgctaaaatagtggcttaagatgtacaagaaagtgacactcacccccttacagctgaaacaaaaaactgtccaacaagatatacaaaaaaacaacattttcctcaacgggaacctatccaatcaatgaaatcaattagcgttgaaggaccatcttttataaacaatttagactccgaccaaagtaaatatacaaaaaacgctttcagtttctgcatggacagcacaccaagctgaccaaaacaagcataaagggcccgcattccaagctgccctccacttcttacccataaaagacctttttcaccccaaaagggtttccttaactgaggaaggaaacacccaatacactccaaacaaagtaaagaatagcttccacacttcccttgtcttttcacaatggagaagaagatggttaatggactccttatgcgcttgacacaaataacatctattttctaaagcccaacctctcttttgaacttggtccaaagttagaacttttccccatgacgcttcctaagcagagaagcttacttttggttgcacactagagttccatattatcttcattgggaaacaccatgttgagttcggctctaaggctttgtaaagagacttgattgaaaaaatgccatcctttgattccactcacctcaccctatcctccttctccacaatcactctcttcccactcaaacacaacaacaagttttccacctcatccatctctcaatcattaaaaggcctagagaaacaagggtgtaacttcctctccctccctttcctcactttttgaaacagttcaaacatttttcacccaagcctatttagaagtagctaaggcaaataaagagggaaacgaatcacccaaaggtgtagttccacaccacttagccttccaaaaactcaccttttgcccatttcccaatagagctaacaaggtgcctaaacttcctaattgctttccataggcctacaccatacccctccctaacttcttgagaacaccacccaccacaatccctctcatatttcccctgtattacttgattccaaaaggcctctttttcatttgtaaagcaccaactccatttgccaaggagagccttattgagcgaggcaaggctcttcaccctgagtcccccttttcttttatctaaacaaactatcgtccaccttactaaatgaggttttctctcaagagccccaccttcccacagaaaatctctttgaatttactccaatctcaatctaaccactcttggcaaatgatatgagacttactttatttctattcctctttcttggcttctattgctcctgcttttaaggccatacctatcaatatcattcaactggattgggaaaaatctctgaaggaagatggatctgaaggcagaattcggtcttactccagtggtaagtcatttacattgaaggctcatctactttcccaacactcgtggtagttgacgttcataaatttgtgaggacctcttccatggaaaacccacttgttaagcccaatcaaaaactgcccactgctgaatctttttcttgtatcattctgctcccagattactgacgcgatcacctggtattcatgatggtgtctgctaacctatgcaatatatactccattagagcctcatcttacagtctgttaatcccgcattatggctttaaccacccagagtttgactgagtgaaccaagtccagcaagctgattcaacagcttcacggccatagaagcatgtagtgatggagaagaggggcattcaatacccatgggtatttccaccaattgcttcagtaggttaggatgcggatgcagtgttctcaatcaaaggagaatcattctgacaccttgcatgtagaccaattgctgtctccaatttgcttcattataggctcaatgacgaaaggacatttgagaatatggcactgatcaaacccttttcttggaaggagcattgaacgagtcttcttcatcgtttgcatttcccgcagctgtgggttttgaaaatggcacacccaaaggtggccatgcactcttatgcagaagtgggggcccagggtgctttggttgagcactggatatggatttcaggtcttctaatcttggatcgacttctgatggttgatgatacacggaaagtatagtgaacatgggtgatgcgttagcatttatgaaatgagagagagagaatgagggtggaaaggttggcgtctttggggagctttcttggtgagctgctgaatttatggagaaagtaaagaatgaggaatgcatgatggaaaggtgctaaggggattgagtggtgtttggcgggtatgaagaatgggttaggctaatggaggtgagtatggtatgggaggataaactgaaagtggtgagcatgttaatgggtatgatgggtatgttgggtatgaggtttgattagtggaggaggtgagagaagcgggcttatcctgaactacgacccattttggtgaacatcccattcagcttcagctgcatggattcatgaaccatcaacagtcaaaaagcaacactaataccctagtatagtagagtaaccaagcaactccatgaacaatgaaatggcatctacccaaattcagaaactatgcccatacgaaaaccaatggtgacactaacaaaacccttctccttagggtacaaatagtcaccggaagcagagagtaaatgatagaggagcaagcataaaaacagagcatcaaataagccaaagaaaacattaaaccgtgccccttctcatattgaagtctatgggcttatgtatgggtgggaaaaaccaggtggaaataagatcaaagatatgactcatacatccaaaggaaagctaaaaggaactagatcactcttaaacccattcccttgctcagctcaaaattacttccctataactcatcttgctccagatgtctcccccagcttattctctcctcattgctttcacttcatttttcttcctttgttttagctctctctagaaaacctttcctctctgtccatcccacaatcccgttcacccctctctcttcatctcttctctaaaacccctcatccttttctttcagttggtcccttcctcaagctatctcccccgctcctccccaacgaccttcagaatattcccccacacctgtcaccctctgattccttcaagaaaatgccttttccagcccactctctcatacatgtgttgccaaaacttcctaaaaggtggtaaaaaacatggtccaaaataccccctacctatagaccaaaaaaatgagggtctacataatggttgatatataaggattaagtgtcatgattattgaaatttttttgtgggttgttccttagcaagtagtgagggcttttagagccacttgtctcggagaaagatcaatttgattggcgttccacaagaggggagtttgtctcggcgttgtgcatgcaaacccctccaaatgttgtggattaagagacggtgttgggactttctttagttgatcttgttggttcgaggatggtttgcaatgaggcaactctctcttcactagctctcttctcatggagcctagaggagagagtgccatatgcagacgttgccttcttgtttgaagtggaaggttttgtaggtaagttattgactctagttattttgaccggggtaggtcttctccttcttcatcttttacttccaaagacgaggggtctatcattggggatggctaatagcttggttccatggaaggaacaagacaaagagtttttagtagaatgcaagagtgatggttatgggcaatgcattgcaaatgatttctagtgagagtttggttgtggatttcctggagaatcattctagagatgctaggcgtgtgggcctagatgtgtgcaatgagaggtggcttcaggaaatggcaatcctagcaaggacacgatgggagatgggagcctctctggtctatctttctggaaatttgtctctagcaaatttttgggattgctagtggaagggtatgagaaggaaagtgtacccttgttgagaaagttagaagtgataaagagccgtagagtagtggccttaagtaaaaagaggaggccttcctttatgttccattttgatagtgagcttcagaaatttgactgctcgtttaattacaaccaatcaagcaaaaaaagaaaggagccagaagagtgggtgggaaaaaatttgagatttttggactaccgaaagtaggtttagaggttgggtgtttggctctccttagaaataggaaggatagagatgaggtggagggctgggatggtgggaagaggagaaagaatacattctcttcaaaatttgaaaaggatttagaggagcaggaatgttttgtaatgtttaaaggggcaggaggtagtcgttcaggaagtggttagggagaatggaaatggctgcagtgggtagatgaagtttgaatttatcttttggattcttcgaggggctaatgtcagcaagaagagatggagtttcaaggctttgataagattgcagtaagcggacttggttttcaagaaagaaggttgtttggggactttctgtttttctaggtctttaggttgatgtttgtggatggtttgtggtttgttgtttctcttttaccattgtttgccttttggtgctatttgtatactccatgtgtattttatgtgccttttctaagcgcttttaatataactgcttggtttactttaaaaaaaaaaaattattgaaatttatttaatgaaaattttaatattaaaaataaaaaataggcaaaagtaagcataattttcgcaatctctatgtatttcatatcttaagaaatgcactcttttaaattgagattcatagaggtttgggtccctatggagagtcctaagggcttgaccatggaaggtttcttggttatccaaaaaaaaataaaaaaaaatgtactcctttgaattgagattcatagatttgactagtgaaccttattagcaaacatttcattaatgtaacttatcaggatttttaaggtgaaagatagaagagacttttgccgaatctcatctttagttcatatcacattggtggactatgacaaacaatttcaaagagaacaatgactaaatccttttttttttttttttgatagttaaacaacacaaatatattaatagtgctaggaaaagatgcataaagtacacacaaagcatacaagtagcaacctaatacaaaccagccccccaaagtaaaaggaaagagaaaccggaaactaggccctcaaagtaccgacttcacccttaaagctagcaaaactaaaagccctagacattgcaaacctttaggagaaactgccacaacccctcttccttacccttcctgaaaccaccatcttttgcccattggaaattttaatccaaacatgcatcgtacagggtcactgacaaaccatctcccccctattactctgactcctctcttttttgtttgaattgtagtaattgatttagcattttcaaaattttgaagctccctaacaaagcggggcgtggaggatggcctcctctttacatccaaagaactgtgaccctttctacttcccaactttctcaacagggacatagtttctgtctcatgaccatccattggcaatcccataaacttgttaaaagagataaatctctgaaaagacaggtcagaggttcagtatagtaagttgttcaggtaacaatggaggaaagcgagagcgagagggctggagagagagagagcgagagcgacggaggagagcgagtgattctgcatgcaagcgaaggtgtagagggcaatgtcctctcgggaacttggaaaagcttgaggaagagtagcttcggagtggagtcgaagactttcgaggtcaaggtagaggagaagaaaggcaaattgcaagccacgattgtggagaggaaaagagggatttcttcgtggatcaagctgagactggagagcctagggctctttgtagaatgtctggttctatgcattaaggacacgagaactggaaaatgggaaagaaaatggaagaaaaaagggagggcctattcgctggtgcgcgatgaaaacaaggggggggtgctttattcggttaggagttgtggacctggagaagaagaggttcagcatctttacccccaaaggaagaggagtaaagggtggttgggcttcaatggcggaaacattacggctcttgggtgttgcttttggaggaaaggaaagccagaaggacgaggcgatgatgctgaagcccaatttggtgaaaacctttgcggaagtggtcaagctaccgaggagcaaaagcagagcagcggttagggtgggggttagagaaaatgagctaagtcgaaatttaaacaagttggttcattgtttggttaggttctggaaccccagtttagtgaggggggacgacttaaaaagttgggggacccaattggcaaaaacttggggactgaagggcaaactagggctagcaaaattggaaaggggtaaggtactgctggaatttgagctattggcagaagctgagaaagccctaaaccttggaaggacttcagttggggggtttcttctgcgcctggagaaatggaggcctaagacggggtgcttgttggaaggggagaaaaggagcgaggcatgggtgagaatcgtgggcttacccgtctcattatgggatcgggctattctgagaagggtaggggaggagtgtgggggtttctttgcagtcaattcccaaacggagaagctggaggaactgcagtgggcccggattctggtgaagctaaactgtgaggagcttcccaacgtggtggaaatttgggttgaagacattttctattcgttaaccctttggtgggaggttaggccagtaatgagaacggtgctggcatgaaagagtgggaagaatttcgaaacagaaggtgaggttgggggtgaggcttatgcatgtgcgggcaagcgcgtgttggagaaggatgacgacacaaggcttgaggccttgttgcagtctgccgatgggacgcgggggcagacaagtgggtcggggcgacctgtggtttttcctcggagccttgacggattgtcggttgggccctaaggaggaatgcaacttttgggtgggcctcctaagccgggcctagcaaaggttccatggagttctagtccggtttctgggcccgttgggctagatccagtttcgtccacctcatttgagattgggccgcttctctttgggctgtcgtctaggaaggaccctgggcgggccaaagcaaaggagtccttcgtggagtctgggccggactgccaaggcccgatccagcctttagctaaggttcgagcccaatttggtgaggcccgcccctcggttttgtctggcttaagcttactgaggggtctagagtttgatatctcgtctttctgggtgaagg

SEQ ID NO: 12119 - DNA, 5658 bp, Vitis vinifera
  Intron number 1 from transcript GSVIVT01032569001 (locus G SVIVG01032569001) derived from phytozome v7.0 (chr-ID chr1 4; pos 28457674 to 28463331)
ggtgactacgtaggtcagttccatttttattttgtgcttatgagtatttgatttttgagctttatatagtctgatcattaggatttaaatattttgtatgtttggaagtgtatccttctctctcgtcacagttggttgaggttgagtgttttggttttgtttctttgatgtgttgaaccgcagctagtcaaatggactttgtggttggatttggattgatcatgtaggttgaatgctgtccaatgcatctctgagaaatgcttgcatgctcatcagtaaatagtattagatgaatgaatccctctattatccatttttaggcagattagcatttggggtaattaattatgacagtttttttttgtttttattgttttttccttttaaattctcatctatcagttacattgtattgaatactttagggaatgcagtgtgttactccagttttgccatagttttaaaaggccccaggtcctaaggcacaaaagtctcatgaggcttaggtgcaatgctcataacaatgtgtgtgcccaagaaaaatgcaaatttaaaatgcatatcaaacttataacacatgatccaaaatcctatccaatcaacaaaaaaattaaggttccaaatatttaaatgaagcattcaacaaaaagtaatgaaattctttgcaatttcgatatagagttagaaattttaagaataaagtgttaaagatgggggggaaagtagactaagtgcacctcttcaataaggcacacaccttaataagagaggccctttaactagggagtggttgcgccttgggcctaggtgcactttaggtgcacgtctaacaactatgaattttggataaagagaagaagaaggggaaaattactttgcatctctcctggaaattggatggatatattgtggtttgcataatgtttggccagtgaatccattgtcacaagaagggccatttctggaattaatctccatataaaagatggtgataatatatatttcaagagtgatagcaacctaggatatataaatggagatcctagaaaggatatatatacttggtgttacattatcatttctagagtcccttcctacagagtatatagtgctaccaagagtgagcgagcttgagtagcactcctaagattgatggaaatgtagcagatatataagtagataatcacaagtttgaatctagcagaatatgaaacttaaaacatgttgaacaagtgaggcaatatgaaaatttttatctttagtgtagttctttcatccattggaatacataactcatgtagcccctccaggatgcatctatcttgaagctttctgcagagtgaagtcctgatgttcccttaatgtagagaaacagaaactagaatactattgtaagagaagagaagtgaggcaagaggatctaatattttttcaaaacattagaaaatagaagaatgggaagaagaaagaaagctgttagctaatcctgtttctacagatggctgctcaataaatatcaatctagtagaccaagattgtaatacagtttctttataattgaccacattctgggaaagtggaaaacacattccccaaatctctctcttttccccttaagcgttctgaaccgggaatatatgtgatctatggagtcatgtggagcaaaagatgggtttgagaaaattagtgagtgaaaaattaaaagggtagggattaatggatctgatatgtgtcatgagtgagggaacttgatatatttgaatggagatttttagcagtaggctgatacggatcatagtaaatcacttgttcacttagttttacaccattgtttttttttttttaaatgtagaatccattctaatggtgtaaatagtggtaactgctaactataatgtatgaagttgagtattactcttagagcctgttttgtgtagttgcaaacttctagtgaagtgcttttagaagatctagctaaaaagaaggtttctatttaacatctaaaaataaaaaataaaaaaaattcaagcctcttcctaggctcttccaaaatcaatcaatctctaactttatcgaaaaaagttgttaatctcaaacttcttatgctttaaagtgctttagggtaataaccaaacacataagtaagtaattctatagtcaaaaagatctttttggcaatttagaagctgcagaaacagagccttaatggattttatatcccttatgtccggggtggtgtgcttaattatagtgtacaattgatggattcaattagatgagagtgacactggaggcgactccccataagaatttaggcaagttcaatagaactctcttgaatattcaggtagggccatgacctatttttatcaacctacatcaagcaatttaaaatagagcaaacaatgtggatggttacttaatttgcatgatatgaaaccttgctttatggaatttttatttcaatagattctgtaagttacaacttgcctaccctaagactaattcaaaggcactagttccactgcattgatttaatttgtactttgattttaacatgttatcctaatcatatatttattaacattcagttcttttagtttttcctccccaaatctgcacctataatgtttaaaattttacctaaacctgtcataataggggcaggttggaaggaattacccaaaaaagggaagggggaaaaaaaaagaacctatcctatccttactcaagtgtatgttttgctctatttgggctttgtattcccagttcttggtagattttaaggaaacaaccattggtgtatttatttttcaggttaatatttattcaccagctatctgctaaattagggtcagttaatgacctttttttagtcctttattttcttctattcccagctattttgacaaaataccagaaccttcttgcctcctttttcttactccagaatcctacttcccttctttttctacactaggattacttcacagctgttcaaaagagcccacaaattgagtgtatagccatgaaaggctgcaagattgtcagacccagggtataataccacaaacctgttacgccaagttatgcaccctgaaggctgaaactaatctaaagtgtattgttttgacatgcctctgtcaaacagtttcagcatctcttcatttttcataatcttctagattcaaacatatgattgcctactttttttattttgttgtgtttctaagaaaatttggaagtttcataacaacaacctagaattagaaggtatttggaaaagcaactttaatgacttgatttaggtcattaagcattttaactaagctttgtaacatagttcaaaatctcggtcgagactggtacgactcggccgagtcgtatccgcctcgaccatggccggtaccggaccgatacccgagttggagtagaaattgtggagaaaatcagatgagaggatcaaaacccatgaaaatgaaaaatacagagttagaaccctgcatcttggagtcgtcggcgaggtcgaagaagcacgcctgcttgttcggatcgcccaagttcctgccggagatggaactgagcgacatgaggagcagagtcgccggacttcggcaccgctgttatcatcgacggtcttgatgggtttgcaatcgggacaggctgtgttatggaacttctgcaaggatttgcctccggtgatcatgtaggctgacatcccacttctacaatcacctgttgaggcaccacaatccagaggccaagcttttcatcgaaggcatgctgtcctaactcactatcaaactgctttccaaaaccatttcacgcatctcaaccatttgcctatgaaatgggtatctttgatacagataagtgtttgaccggagggttatgggtatctggaggatttagcttttaaataatttgtatttattttttaattagattatgagtatttggtgggatatggattttaaataatttgataaaaattataatgataaaaaataaataataaatattagacttatatcaaataaatatttatataaaaattaaaattaatgaatacattttataagaaaaattatatttatttttttaaagatgaatcatggttttatttttttaataattaaaaacattttaaaaaaaattcaaaatatttaatttaaataattttttattaaaaaaatttactttttattattttcatcttcaataagaaatatttatcatcaagtaattaaattaaaatattttaaaagatttttaatattattataaatcatcccaaaaatatgcttttattataatttgaataatttgaataatttgaatataatagaagtttattttattaatttttttactctacttatttgtattttatttttttaataattttcataattttttaaaattattttgagatcttaaattaaaattttttgcgtatcacccgataccgatccgagataccgagaccgatgtgcctcaggacctcccgagtcaatgaccgataccgcgactttgaaccctgttttgtaaaataatttaatattacaatttaaagttgaaaattacctaaaagtaataagtcaaaataattaactttttctaatcctaaatatcccttatctcagttgtgcgtggctctttcctcctttgtttctctttcataacctcattacttaatatcaatgagagtaaatatgtcaattaatagtttagaaaaaatattaagttggttttattaaaccaccttaaaataataacttaagcataatttaacctaaagtcatctaagcctttaagcattaagtattaagttctaccaaacaccctcttagtcttaaactaatgagttattgtggcgactcttttgagtcctctcttcttcaatgactacattcaaaatcatgaaatttttccttctaaattatactcgataaagagttaattccaactacttcatggaagtgatgagcattcaaagtcatcttaagtctttaagcaataagcattaagttgtaccaaacaccctattagtcctatattgatgaggtattgtggtgactcctctcttcctcaatggctcccttcagaatcatgaaattttccttcttaattatattcgataaagccttatcccaactacttgatggaagtagtgagcatttaaagaaatctaggaggtacctcaattggtacttaagatttaagagttgattgaggggatttgcacacaaaaactgcgaactggagggttataccttggagaaggcttagtaatttagtattgaagttttagacagtatatcttacatgaagaactggattctgatttttgttgccagttacagcagcaattttctgtttatatttcaattttaaaattatttgattgaagaactggattctgatttttggtggcagttacagcagtaattttctgtttatgtttcacttttaaaattatgtgatttaatctccaaaggttttggttaaagaattttgcatggggagaattgttgtaagcttgtacataagcatcttctgtatacatttggaaaagaaggttccctcatcattttaccacagttctattatgttaatgcagatcgtggatactattctgtggagactgtcacactt

SEQ ID NO: 12120 - DNA, 9189 bp, Vitis vinifera
  Intron number 1 from transcript GSVIVT01014605001 (locus G SVIVG01014605001) derived from phytozome v7.0 (chr-ID chr1 9; pos 5551611 to 5560799 reverse strand)
tcttcgctactgtcggcggcaatcgagtacttctcccatttatctctccaaccaaacgcatttttcgtttcttgctttgttagatgcttgtctggaacttagggttttcgttttggtgttgtctatttgctgtcaagtttttattttgttaagctattcgtggagattaagatcgaccttgggacagtttggttattggcggatgtagacgcataaaccctacaggttgtgaaaagagagtgatttgagagaggtggattggatgccacttgggtaactgagaaataggcaagcttttggagaattgagagaagttgacttgaaattgctgagttgagctcaacagttggacctttttaaattgatttttttagttggtgcagcttcaaacatgcgtgcttgaggaagaatttacgactgtttgatttcttgatgggattttattttggcaatatactgattattgagtgcttatacaactttgtatcattacttagctgcttcttgatttcaagtgctgatagatgctctaatgttagatacaactagggtttcatttttagatgtgttttggaggttctggtattattgctgatatggggtcactgttgatactttctttcagaagtattgttatacatgctagttggccctacccataaaggatatgcgtttgtttttttgcttatagaattccttctaatcaatgtttttaaaggttaaagtggtattggggcatttttcccaatgtttcaaaaggttaagggcagtcttgaggcattttgcctaaatgagacgaagcgtaggcctccactttaataacaataaaatgattttttttttaaacattggagaaatactaataaaatcacttgaaaattaaataataagaaaaccataccgtgcctttgactttaataacaataaaatgaaaaaaaaaaaatcagagaaatactaataaaatcacttgagaattaaataataagaaaaccatatggtatataacaatcaaattaatcgtatgtcatttttaatacttctaattgatacttataaaaaaaagacaaaaaaaaacttctaatttagttctttttatctcatctataatctaactctctctcatatatttatcaaataatctttaaaactaccactactatcattagtaggatcctctaatgaatcatgattatatccaagtgctctattattctctctatcattgttaatgtcaatccatttttctttgctatatacaatgattatcctatccaagtgctatattattctctctattttcctatccaagtgctttattatcctttctattttttcttctcaatctctctttttccgtcccatttaaaaggttaattggaagtcaactaagctctcatttcataaaaggtttaaccaagttagtacccaatacaaactcatgaaatctatatcaaagacctacaaaagtatggatgatagagcccattaaaacttattgaatgttgaggcttaaacctcttataaaatgtatattaaaagcctacaaagaccaaaaaccctttggatatttgaggctcaggattcaacaactttgaggctataacctcaaaactgtaagcctcaattaccataactttagctataatctcaaggctaattcacagagtgtcactttgaggtgagccgtaaggtgtaagtctcaatagccatttagttataatataattgtcacaatgaaattgatattctagctgattttttactttctttttggctggatttggaacatttgttggaacacgtccttattcctaataaggaaaccatgtacaactgtatttggttaggagtatattttgggagatttgattagcttgtatattcctgatttataggaatctgatttaggtagttacttattttttagcttccttattttgtaattagccatgtatgatatttagccttgtactttgttatttcagcatcaataatattttagaaaatcattccatttaacatggtattagagctttaggctctttgggattcttttgatcactggtattgattgctctgcaatttcaagcttttcttgtcatcatttttctgcttgaacatctttttgtcattcaattggcctgtgttgccctagaaatcggtgtgttattcgatcccgcttcttttccctcaatttcattcctttcatagaagatatgtcagaaactgccgaagtcaccagtgcctttgaaacgaatataacagaacaaacatctaaaccattctacaggagatctacaaaacatccaggctgccgatcgattgaatggtaagaattatctaaagtggtctcaacttgtccatacattgttgaaaggacgaggcaatttgagtcatctaaatggtattggaccaagtcgaaaagatcctaaattcgaggcatgggatgaagaagatttaaaggtgatgtccaagttgtggaacaacctggtgccaaagatcaacgacacctgtatgtttcttgacaccaccaaggatgtttgggattctgtttgtgagacatattcaaaggtaaatgaagatgttaggtgcaaaatagggtactcgttctgtcacagagtactcaaattatttgaagggactgttgcaggagatggacctctttcaagacatacaaatgatgtgcagtgatgattcatctctcctgaagagatttgtcaagaaggatagaatccatgatcttcttattaggttgaatatggaatttgatcctatttgagtgcaaatattgggaaaaggagaccttccttctttaaaagagacaattgctctactaagggcagaagaaggcagatgtgatgtaatgattgagactctagggactttgagctcagctttggtgacaaagaattcaaacctgaaggtgcaaacctgatcaacagcttggcagagaaaatggccaattaaagctgtccagagccattaataaggattccttatggtgcacatattgcaaaaggcctcaacatactaaaaaaagtgttggaaacttgatggaagggcacaacagcagcaaaatagtagaaactgatccatgaggggtggatcatcaaatggacaggctcatgtgtctcaaacacaacctgatggtgaaggtaatcctcaagaacaagctgagttgaatagggaggaagtaggaaagctaaggaacctcttggggacattggagaagcctagagctataggtacttgttctctggcactctcaagcatagttttaaaaggcgtaaggcgcacttaaagcgtagaagtctcctatagcttaggcgcaaggtgtaacacaaggcacgaggttgagtgaagtgaaacctgacctgggatgcgtatcaattttataaaatatgattataaatttaatccaatcaataaaagatttaagattccaagcatttaaaagaaacattcaatatcaattttataaattatgattcaaaatttaatcaaatcaatgaaaaatttaatattccaaacatttaaaagaaacattcaacaaaaaaatcatgaaattatataaattttaaattagaaatttcaagaataaaggtgtttaaaaaaaagaaaagtaaagtaaataaggagtgcctttttaacaaggtgcatgtcttggcaagcaaggaactatagctagggagtggttgcgccttgagcaccttttaaaactatgctcttaggtaagactcttatcttatgctctaaatgtttgataaaatccaccccggttcttgggtcactaattcaggggctttcgaccacatgacctataactcccaacaatttatctccttcaccctaagtcctaataactgaaaaatcatcatagccaatgaaagttcaacaaccgtagctggccaaggtgatattcatgttaatcaatatctcaccctcaaaaaggccctccacgtgcctaagttatattcaaatcttgtatcaatacagaaacttactaagtatttgaattgctttgtggtattttatccttcatgttgtgcattttaggactaagatttgaggaagaggattggatgtgctagggagaaagatggactttactatcttgaagagtcgagtggacaatctagaaacgagaatagtgtatttttgtcattattttctaagtcttccatgtcaaataaagacaaaatctgaatttatcaccattgtcttagtcattcttcgtttagcgttcttaaagtaaattttccactattgttcaaagaaatgagtgtcaaacatttgcattgtgttgtttgtgaattggcaaaacacaaacatgcttattttcaaataagcaataaaagaacaaatgtttgtttttctgtaattcatagtgacatttggggtccttcaacaatctcaaatatttttggggctcattggtttgtttcctttattgatgattgtacttgagtgacatgactttatcttttaaaaaaacaaatcagagttgagtttattgatgtttgtactttgtagcttcttgttttcgttttcttgttgtttagttttactttggtgggaggatgcctcatgcttctcttgtacttcttatttttatcaatatatctctttgttgtttcctatcaaaaaaaaaatggttaaaaattagcttggggttgaaatcaaaaggttttggtctgataatgcaagggattactttaatcaacttctgtctccatccttcccaaaggaagacataattcatgaatcatcttgtgtcaacacaccccaacaaaatggggttgcagagaggaaaaatgatcatcctttagcagccacaagagcctttcttattcaaaataatgttcccaaaaatcatttgggagagctttctttttaactactgcacatatcataaacatattgtcttcccaagtgcttgactttaaaagtcccatgcaagtcttgtctacattctttttagatttcaacacttcaaacaattttgtccccaaaatctttgattgtgttgcctttgtctacattcattctcaaaacaggggtaaattagaccctagtgctctttggcttgtctttgtgaggcatttttctattcaaaaagggtacaagtgttgtgggtagacccaagtgttaactttggatcacatccaaaggagagagtgggttatggcaaatagaggcttcctttgttgcaaagaagaggaatcagttgatcacattctcatccattgcgacaagactagagctgtttgaaacctcattttttcgctctttggcttgtcttgggtttttccctcctcggtgagagagactcttacaagttggcataggtctggtgtgggtagaaaaaagagaaaagtgtggagatctactcccttgtatctttttggacaatctagaaggaaaagaatagtaaggcatttgaaaatattgtgccttatgttcatagaattaaactggattttttgtgtaatctttgggcttggtccaatttgtttatagatcttgactcttcttcaattgtagattttgtggattggatagggtcttgttgaggggtgcctttttggtgttttttctttgtttttttgtggtgttgttggcgctcattgtatactccctatataccttgaagcacttttctggcactttgtttttaatactctttatttacttatcgaaaagggtacaagtgttatcatccttccacaagaaattctatatctctgcatatgtcacttctgtggagaaagataactatttcattgatccttatctttaagtggagaaatcatttgtggaggataaggatagagactcattcttacttgatctccctatgttttctagacattattctttgcctatttgagagtcaagtattgtgacaaatttgccctcaagtcaagtactgttcaccccttttgagtccattttggtcactgagcctgtttttgaaccttcagcccctattctaaatgagtctgaactgtgtgcatctcttgttgtaagagtaatggaaaaggaaaaacaacttcaaagttctactcatccattgcaagtttgattaagaaggaaagcttccatcattcaacctattcgcgttcaagagtctgaactggtttctggtaatgaagtaaccacttctccctttgctgtttctaaccctaaattaccatggaaagtcgtacctaacacaaattaccatgatttacccatagctctccacaactaggacatgcacccaacacctcatatacatttttatgtcctacaataaatcttctactgcccataaagccttcctcactcacctaaacaccgtgtctatacctaaaacattatatgaggcacttggtcatgagaaatggagggaagctatgagagttgaagtcgatgctcttgagaagaatgcaacatgggatttggtggtcttgccatgagggaagactctagtgggttgtagctgagtctttacaatctaatatagggctacaatttggcgggttgggccaagttgagagccaatccaggactaacccaaaattgaaatgcatcaacctaaggtatgacccaacccaagctcattttgaattaaaattattaaattcgagtttaaaataaagaaagctaaattccattacattgttccattcccattacaacccattttgaaattgaacccttgaatttccaaatcctcaattcaaaacaccaaaaacaaaagaaaaagagagaatgacaatgaatgaaccaatggtggggaagaggtgttcgaacatatgaatcttggtcctcaagacccaaaaatctattcaccaaaaatatgcaaagtttgagattaaaatgaaaagcatacgtatccacagccatagtcaaagagttgaatgacgatgacattgaatgatgccgacaactatgaatattgggggcaacatcgaactaataatcgggaactagggtctacaacttgtgtaatgggtattttcaattttgggagcaaatgatgaagaatggaatggcccgaatgggaagaagcaaataggtaaagttgtaaaggtttttttttttttttttaagttatatatatatagttaggttcgtgttaatttgggttgcccttgcccaatcccgaaatttaaattaagttgataaatatgaacccaagcccaacttgacttacataagagagtacccaagctcgcctaaatatcgggttagattcggattatgtcgggttaacttgcctaggttgaagccctagtcaaatataaggtggatggattgcttgaaaggtacaaggttgtattagtagcaaagggttatactcagacttatggaattgactaccttgagacatttgcttctattgcgaaaatgaatgtagttcgggtgttgttgtcagtggcggctaatcttggttggaatttacaacaatttgatgttaaaaatgccttcttgcatggtgatcttgaagagaagatatatatggaaattctttatggtttcgacttgtagctaggaaatatctatatggtttgatacagtcaccataggcttggtttgggaggtttatcaaggttatgctctctatggggtgcaagcaaagctagggaaagtgacaacattgcttgtgtatgtggacaacataattgtgactggaaacgatacaaaaaggagagaagccttgaagaaatgccttgtgaaagaatttgaaattaaggatcttggaaaattgaagtatttccttggcattgaagttgctcattctcggcatagaatttttatctctcaacaaaaatgtgttggacttgtcaaaggagataagcaaactaggatgcaagccagttgagacaccgataaagtagaatgatagacttggaggggcattggaagatatggtggtagatagaggtacttatcaaaggcttgtaggaaggctcatttacttgtcccacactagacttgacatagcctatgcggttagtgtggtgagctagtttatgcatgatcctaaggaaattcatctctagattgtgtattggattctacagtacttgaaaggaactttaggaaagggaattttatttaagaagggaaagaagttgacccttgaagcttatattgatgcagtctatgctgggtttgtggtggacaggagattaacatcaggctattgcacgtacttgggtggtaatctagtgacatggagaagtaaaaaacaaaatgttatggctagatcaagtgcggaagccaagtttaggtccatgacgcttagaatttgtgaattattgtggttgaagataatcctagaagacttgaagatcacgtgggagacacctatgaggctttattgcaacaacatgtctgctatcaatatagcacataaccctgtacaacatgatcggaccaaacacattgaggttgatagacacttcataaaagaaaagttggatagtggactgatttgcactccatttgtctctattggtggacaactagctgatgttctaacaaaaggactgtctattgcaacatttacgatagtgggcaagctgggaatggaaaacatccattcaccagcttgagggggagttttggaaaacgttcttattcctaataaggaaactttgtacaattgtatttggttagaagtatatttaggagatttgcttagcttgtatattcctgatttgtaggaatccgatttagggaagttacctattttttagcttccttattttgtaattagctgtgtacattatttagccctgtactcctgttatttcaacattaataatatttcagaaaattctcccaattgacaacattgatgttgaaaatggttatagacttattggtgcttgaagattagcattttcatgctagaagatgaacactttttttttcacaatttattctatgcagttccaaaatgaattcacatagctttctaagtgctttaaacaattgtctctcacatatgtcatgttattctaataaatagttcagttcaccatagtcaaaagcactgttaatctacctcattttccatgatttcattttctagcaaaataaacacacctacaatttccacatttccccctcccttttcctcttgtatccagtgtaatggaaatattaaatctttcctcaggtaactgtttacca

SEQ ID NO: 12121 - DNA, 3043 bp, Vitis vinifera
  Intron number 1 from transcript GSVIVT01035773001 (locus G SVIVG01035773001) derived from phytozome v7.0 (chr-ID chr4 ; pos 4186807 to 4189849 reverse strand)
ctctcgcctccggcgaattcacgaagctgggtctgatttttcatctggattttgcttattttttaaatttccttttttttttggtgatgagttttcttgttttttacttgtaatagtgtctctttctattcgtgtgtctgctgtagattctagggttttggttctatgaattgggaaatgctggtttgagaatcgaagtttatctgtcatctagattacgacatctactgctctttgggggtcctgtggattctagggctttggttctatgtgctaaagttgtgtatttgtgtttatacgttattgtgtgtatatggatataggtgttacaccctctccggctattgttcaatgcggcattacatttagttggttttcttgtttgacacctgtaatgatctcaatgctgccttgtctgccctagattctggtgttttggttttatgcttttgaaaatgttggttgtacatgcaggtatgcagtttttttttttagtaagcgaaaaggaattgttggttttatgcattgtttgagttttgcgtattattgcattgtatttgctcttagattaatctatttattggaattgagtttgatgtttgagtagttttgggcctgttagaatgcaagttttgaagcatgtttctgttttcaaaaataaaaacagaaaacaggaatcctgctttatggaaagggaaaggagaacatagagaagtttcctcctatgaaatcgaaaagaaagaaaaaaaaaaagcttctaaagctgggaatggtaaacatgaaatgctatcaaacaggctattaaatcgttcttctagttattttaaaccaacccactgttggaaaatgaagttcgttgctcctgcattaactaatagttttggttgtgtagttggtattttttaatctgcccttgcttctcccactgtgttttttcaggcccaaaatacatttcagtgatttgaagattatgggcctctaagcacatgtccttttggagttttaaagatgtatggtgggatttttgtgcactgctgaaatgtgttttaacttttattttttcttgtttttggatttctcccagttgtttgaggaaccaaaaatggaggttttgggctccagcttctattgaagtgtgttatgagttccaaaggagctttatataggatataatgtaattaaggtttataacatgagtattgaaatttagtttttgagctttaattgttgctgttgaaattccttaagatatagttaccagttgctttcctcataatcagaagtgataagtggtgacattgcagtacctggaaggtgtatttgtaagaagggacctgtttactattcattcattaaaaataataaaacaaacagagatgctcactactgtatgaaaaattttcaacgtatatttccatgctgaggtccagcctccaggcagtttctaccatgcccacctcccagtcctgtttcatcctgatgcgattcttttacccttttggaattttacccacttctgcaccaaaacttataatttatcacaagaagcctccaaattgttaggaaatgactcatgcaataatagatcttgcttatttaagattagaatgagttcctttccatgttctttttgttataacttagctccatgatcttctgaaggtttagccttcttatttaagttttggcccatcgaagaattgaaggccttttcttctccaacctttgtctctgaagcttgcatttcaatggaagggagcaattagatgatcttacatataagttcaagagagggaaaccaagacctaattggagatgataagtaagttttttctttatctgaaccagagtctgtcgcctaaaggagtaagttgtgatacggttaaactgatcttgctgcattgatctaatccattaccccctttttggtgatctctctccaacttgggttcaccaagaggttaccaccttctgacacaattgttgttaaaggtttgatcagtagattttaagaatgcaagataccagaagaagtaactttattgtctctgcaagtagtttatgttacaagtaccattgtgtttgttgactatattccaatcagtccaaccccccattataaattcaacatgcctattattctcagaactaaccatttacatcctttcatctcttgaacaactcattttaggcacctatattcaaagtttgccattgtggaacaatgaccaggttttgaccatgtgcttaggatgtagacccaccttttcatggtttgctgccctatactaaggggaatattctcattgaatttgtgtcttggaaacaatatgtcaagagttcacttgcataatttgcatagttcgtgaatcagttgtatttaagaaacatcatttactggactgcttggtggtgatgcacacaccaccagaaattctttttggctatgctaggtgttgattcacaaacacaagattcttactttttgtttttattatggccagtatatattgaattaaatggaagataattctcaacggttcttagaaagtacagatcatggatacaaacacagatatgatgtccttttgtgatcagatccattgcagagagatgctttctcattatttaatgatctatgaatacacattttatgttgctatattgaccaacatattgcccttttcactctttgataacctgtgcagacacaatttttttttgttttatgttatgacttatgagtcttatgaccaacacattagcttaaactacagtgaaaattctctctagttcttccacagaagttcatctgtgcaggtgaaaaaaaaaccacaagcaaatcatatttataaaaacaatatgtataacaatgtcaactagtcaggattttggggagcttccatgtccatcaccctgaattttcatccaagagaacctctcatattcatgttcataaatcacacatagtgctctgtctttacaatgtttttcctttttttgtgcagcatactacagtgatatttgtgttggttcaattgca

SEQ ID NO: 12122 - DNA, 8218 bp, Vitis vinifera
  Intron number 2 from transcript GSVIVT01037451001 (locus G SVIVG01037451001) derived from phytozome v7.0 (chr-ID chr6 ; pos 13500769 to 13508986)
acacagttccccagcttgctttctacaaaggcattgtaagtttctttggcttttagttatttttagaaattatggttttcacagagttggattgctactttggtgtgtttacttggtcattttataatttcagaaagggaagaaactctcagattaaaaggaaaaactatgctatctctttattaggatagagcttgtttctaagggagaaaatggtgttaagaatctttattcactatcataagagatttatgataatgattcatggtgtgatttgaatattaagagtctggcttgatttcatctatattgtttagttcatgagttatccatatgtgataaccgcaaattgggttattggaaatagaatgggaattataattaaactttcttaaaaacaataaatcatttgtaatcatcttaattatgtagcaagttacagagttttagtgtggatgagatggttcagccatttagaatgagtgacaaaaatccaggaataaatgtgctttggtttgaagagggtgcagggggaaggggaaggccagggaatacctggatgaaatattgtaggccctcttgcaattatattctgtaaattaataacctcatagcaaaggaacatgtgacagacacccagtttcttaattcttttactatgagtgcttaataaaaactaggagtgtttttaggctgtaaaatgaatttttaaaatatgcacatttgcttgcaaattaccattgtgaatgggcacaatgaatgcacaaaattatgtggattgctctttttgaaaaataaaagtagctttaaattccatttctttccatgatgatattgatatttccttcaagacttggaaccttgcatctctttcgacaaggaaaaagctgacccagcatcatatctagctctcattaaggctcaagaatctgaaatttaaattattaatgcttaatgaatgttcttttctgcagtctggttcagtgaacctgtaagctagaatcaggactctagcacgttcataactttttatgttaaaattaatgttttgatatatgatttggcaaattgtccaattaaatgaccagtttggtccaacccaggtcagttgggccaatcagtcacctgtaattttgaccaggctctttagattttttgaattttgggtggaattgttaagtgttctggcatagcctggtctgagccaaagtgtttcactgggctggagcagccgaggttaaaaaactttgtttgaaactgcaatgtaccattttcatgctaactcaaaaatggctgcagttgtaatttctttgatcttagatgcaattgcctgaccaataatttatacttatagtttgtacgttagcatcatagtagaatagtgctttcatcaaaatattctgtgcacacctacatcagacccaatctttcctaaaatgagaaatgggtgtttacaaggagaaacaaatacacagcttttgcaacaagtgatttttatattttatatttttcttttatggcatttttatttatttagaaagaagtgttatggctttcaaattccaattggtatagtaactactagatttgtttttttattttttacttctattaggagtttagtacctttaggacttgataactgttcctttagttttgaaagtgttttgtttttgttgaaatattctgtcactataatcttgggatacttgctgctataatcttgggattatgattgagattgagtatgaatattttgtatttattcttcctaaaataattgtgtatttgaccaaaaaaaaaaaaagatttttttttttttttttgtatcccttggattctaatgtaattaagatatgctgtgtcatggtctcactctccactcaatattgttcggttcagggctacagtggcgcacacacaacccaccagcggaccttggtcttgcttctttattgggcctatgccctcaagaaaaggcctcgataatgtgttgtgaaaatatatggctcttccccattcactcgttgtgtgatgtgggacactacagtccacccttcttagggcccagcgtccttgctggcaggcttctgatcgaagatcagactctaataccactctatcatgaccccactcttcacccgatattgtctggttcaaggctacacacagcccaccaaccgacttcggttttgcctttttattagacctatgccctcaagaaaaggtctcgatagtgtgttgtaaaagccctttatatatggttcttccccattctaggcgatgtgggacactacatgctgtaaatatgtagtagtgtttttttttttaatcttagaaggtcaacctagattgtaatatattatttacatttctcaaaggaatatgagtgaagaaaaaaattttatcttagttttcatggtatcagagtaggttgaagcctgattttttttctcttgtccattttgttcttggccttcatcaccatttttccatttcctaaatctatctccattactaccattcttgacaatgttaaagatctttggaaaaatcactcccacgaacatcactactaaacctgctctttattcctctgagatgagccctactcttcaaattaccacatccaaattgaatgggaacaatttcatggaatggtcgcaatctaggtagatttttttgaaatccaaaaagaaaacgaagtacattttgggaacatcactacaacctttagtcaatgagcctaagaatgaaaattaaggggttgaaaatttgatggttatgttctggcttttgcactccatgcagccagagcttagcaagacttagctcttgctaacaatgacaaaggagatttgggatgctgtcacattgtcttgctcaaggagtggaattgttgatcagttatactacttgaagaagcagattgctaatgctaaggaaggtaagtgataggtcaccaaatatttttaatcttctcaaagggctttggcttgaattaaatatgtatcatgatgtggaaatagagtgtgcaaatgacaaaaaactgagagatatgatagaaagagaggaatttttatttccttgttggtcttagttcggagtttgatgaaatggtagagttttaggcaaagttcctcttcctttcataagtaaggtatttgccttcgttcgaggcgaaggaggacacaaagatataatgcttaggaagcttgaaaacaaactcccaaagttagacaactttgcacttgctacttgaaaaactgtttggaagaagaatattgacaaggataagaagtgatgcgattattgcaataagctttgtcaaaaagagagatgtgctggaagtttaatggaaagtgtcagcctggtaacaaagggttcaattctagtgaaaataaggcaaatcaagctgcatgatctacacaagcctatcaaacagccattgtggaagattcacaggataattttctcaacaaagaagatgtggagaggctaaaaaaattggtgttatagttgaaagatccaaccacaagttcttattcagtggcctagacaagtaatatttttgctttaaacacctaaaaaataaattgttttttcacatatggatcattgattcaagtgcttcagaccatatgattaatttttctatcccatttttaacctattctacatgttctagaaaataaaaaattaagactgtggatagatcgttttcccttataacatcaaacctaatcctaaaccctattctccatgtccctaacctgacttacaacttgttgtctataggacaacatgtagtaggttattatcttaatcttcaattacactataaagataagttctctaatgtggatgaggtgaggaagggattatatgaatgcatggataagatgttggattaccaagaatgtttaaaagctaccattcagttggactcatatgaccaagcaatgggtgaatttggaaggcgtgctgcaattgattcttgaaaattaagaagtcctatgagttggtggatgcattttgagggttcaacaccggagttgcaaaagtttgccattcgagtccttagcctcacttgtagtgctttgggatgtgagagagattggagcacttttgaatcagtgatacttctatttttttttaattttttaatttttaatttctagtatgtatatttttattctaatgttagagaactaatttcatttaatcttaacatataaatttgtttcttttattatttgtagattcatacaaagtgtagaaataggcttgagcataagaggttaaatgctctagtgtatgtgaggtacaacactagattgagggtgaagtctacaaaggaaataaaatgttgatccgattttgtagatgaaattgattcggatgatgcatggattatggaggaagaaggtcccttccttccgcttgatctttgttggcttgaagataatgaactatttaatgttgatgcaattagaattgtgtcatcccaagaccaagagactcaagtgtcatcggacaacatggtttcttcacattccaacaaaagaaacatgatgaatttgcaagtactaaaaattttaagttataaattttattaaatttattaatgaacttataatatttacgcttagtttatactttatgctaggcaaagggaaggggttgaatctaacattgattcatgaagatgaggagttagtttaagtgagaggatttgatagtggaagctttcctactattgatacattggatgaggatgatgatgacattggagagggtgatttaagttgaaacattttagtcatatttgtttaactccatttgatattttgtgacttgattatggttttttgtgaaagtttggaactattagtatggttaactctattttcttttgtgtgacttagttatggtttgttgtgaaagtatcaaactagtaaagttttttataattctaatggattgttttcttgtttttcatttatgctattttatttttatttttatatattttaaaatttattaactataaaatgagggtcttaaaaggcttatgcctcaacgtttcgaggcttatgcctcacctcatgggcacaaaaattcttcaccttatgccttcacctctaaaaactttgtttagaggaggaagaagcaaatggtagcagcatggtcaagtacaaaagctgaattttgggccatggcacctggggtttgcgagcttctatgattaaaaacggtgattacagatttgaaagtcaaagttcaagatcctattgggctttactatgataatatagcggccatgagcatagctcacaaccccatccaccatgatagaactaaacatgtggagatcaacaaacactttattgaggaaaaattagatagtggactgatatgcacgccctacatttcgacaaccaaacaaccagttgacgtgtctaccaaagaactaatagggaccatttctcataagttcttagagaagctgagaatgcaaaacatttttgcatctgcttgagagggagtgttgaaatatactactgctataatcttaggattccactgtaattagtatatgctgtaaataggtagtagtgttccctttttttgatccttaaaggtcaacctagattgtaatatgttatgtacatttcttagagggagtgttgaaatatactactgctataatcttaggattccactgtaattaggatatgctgtaaataggtagtagtgtttcctttttttgatccttaaaggtcaacctagattataatatgttatgtacatttcttagaggaatatgagtgaagaaaaaattctatctcagttttcagttttagttaccactatttagattttagtacctttagaaattgtttagtattcttttacctttttaggcttatctaatttcactatgtttgggtctactaaagggattggttctcattgtaatatgagttttcttttttgaataatattttataaattgttttctttttctttccatgctttttgtgtgatttatcattgtaggttcaccccaattgtgtggtattgattgttgatccttatctatcatctaagtttaatcccagctgtgtggtatcagttggtttaaaatcatcattcaagttctttctgtgctagatccgtttggtgctagagttgaagattaaaaagatttgcaattcagaaatcatgaattgagcagtagagattctattgtggtgaagttcagtaccgtatgcatatatttagaaggctgttagcattaagatcaatgataatgcaacttagaatagattcttaaaagaggactctagctgataagattggatgcaactatggtagcaaagaagtggtgataagagtttgtcactagaagagagttaacgcatgctcttgggaaggccatctggccatgactggagaaaagggcagtaatatataattcagtagaatatatctatccatttagcaaaaatggattaaaaggcaatctacctttagggggactgaaaaatacctttttttctccaacaaatcaggatgtgaggagccttgttcactagaaggtttggaagatctcaaaaagatattacgaaatatgctgaactagaaatggctgaatataagacttaactcctattatttacaatccatgttacaagtcttctattaagtcttctggtttctgcttaaaaatgctattttctgagattgatagcatattggggagagcttgagaagcactgcatttcaatcaagtttatttatgattttactataccaaacaactaggatggttaaagaaacatttaccttctactgatatcccttaagcttgagaattaggtttttcaactaggaggtgtcaactctcaaggtgtatccatacgtggcaagtggaaattattatatattttcatttattgtacttttatttattaagaagtatttggttttaattagcgtggtaaatattagattgtttcttttacttgttacctctcttaggatcttattatctttaaggtttgggatggactgtagtagaacatgttatttagttactggaattttgaatttgacggaaggtcatttctcaccatgaagggagtcttggatttgaaatttgattaagatcttgtctcttttttccacgtattctgtgcatttaccagtttattaaagattaacagtaggtgtgatattgactactagatcccaaatgtcatctaatattgatatctatcatgtgatctcagttggttgactcccagtgttgtctaaggttgttagaattcatgtttgtggcttttattctatgctcattgaacaagtagttttctcctgtaattatgttgtagctttatcatatgatcctaaatgtcatctaatatctttatgatctcagttggttgattcctagtgttgtccaaggttgttataattctcctgtaattgtgttgtagcttaatcatgtggtcctaaatgtcatctaatattgatctctatcatgcgatctcagttgattccctagtgttgtccaaggttgttataattcacctttatgacttctattctatgttcattgaacaagttgctttctcctgtaatcatgttgtaactttcatattgctattggctatcctgtcctaacctggtaattgggtggaattatcttcctccatggtgggtccttgcatcatataagccttaaataacattagataagctgcctcattttgtgaaggattggatacattagaatggttttctccctttatttcatcttaaatatttggaagaaaaagttcctcattcctttgtaatgtgcttagctgccagtgcattagttttggagaacttccacttcagaaaaaatttaagatactcacttattgctttttgaggcttctgtcattgatggtggaatactataccagaattgatgaacacctgctattgtcaccatgcgattgtagaatgcttcttttaatttgatactgctctaaattcggaaaatttatactgcaatgttttgatgttaaatattaagagatcaagctattgaggccaaattatcttatgttgcaagttttttttttattttttttatttttatgttaaattatcttaagtgtttttttttatgctaaatgtcagattgaagcaattgtgcaag

SEQ ID NO: 12123 - DNA, 13364 bp, Vitis vinifera
  Intron number 2 from transcript GSVIVT01038732001 (locus G SVIVG01038732001) derived from phytozome v7.0 (chr-ID chr1 2_random; pos 39799 to 53162)
gttgcttgcagtgccttagcaaagaagataataaggtatatagtttcttcttattaatttgcttagggtctaaattgcacaataggatttgaattttcatgaaactactatggattatgtgcttaagttgatattatttatgaagtacagattaaattaaaaaactgggtctattacatgattttattctgcatagtttatgctgaccttttcttttgtttctcttacatttctttaaataattagttcatttctctgactgcaatatacattcaaacactgaaactttataaagagctgttatagactcatactgtttcatgtaatggatgcaaatgatattttggaaatgcattttatgaaaaagcacttccaaaatgtccaaaatcctataatggttgaacttctttagttattcttctttacttcatgtattttttagtgaacggatatggaagtcctttttattgaaaaaaaggttgttctatgggtttccaatgttcattcactaaaccaattttgtgtttattcttccaggaaattgtcatatgaacttgctaaatgttattagattttatatcaagaaataaattgctgggcaatttttgtcgtgtatgtgaattattgttggtagtgtactgcaaatttttcctaattattttaagatattgtaagtttctctgctgaattgggaaaatttttatgatcttaagatttagtttggcattctagtttttatttgctgtttttttttctcttctggggaatgaggtacccttgcaattcatgatcaggaaacaaataatgaaatgatttctattttctagcgagattttaggttaaatcatttgccaagccatttatgaataaacgtgtcattggtgtgacattgtccttgattattttaagaccttgttggttcctctgttgaattgggaaaattttaaaggtttactttgtcattctagtgactggttttgctgccccccccctgatgaattagagtccttgcaattgatatgaagcaaaatatgaaactgtttctagtcaggtttttggtgaaattatacactaatacatccatgaatagagtcgtcattggtgcatagttgtccttgcttaaaatgatgactcttttcaatatgcttctatgtttttctatttcaacaattaaaatcaaatactaagattttattgcttgttcatctaggtttgaacatcttccctccagggcgtagtgttggaaacttttaatcttcattttctgaacttggacttgtgttacatgtcccatatagaaaatgaattacgtatttaacaatgtttttgtgtctttcttggagtcatatttggcatagttgatactattatttcagaacctagagcccttaagttggatggtagaaatcaatgcttacccttttgcactgaattacattgagagaatccatgaaacaagatcactggctgtgtcttctaagttggaatcaagagaagctaaatatgcacttatccttcctctagtgtaccttttcccccttgtatgcttgggaatttgaatagagcactcctaagtggccttttcataacaagcaaaaactcattccaggagtaactggattagtaatttagaagaacaacttctcaatgaaatattgttctgttgaatctttaaaatctccatgtcattttcatagacatgccactccttgcagaattccatctcttaattctcatatatttctgttcaagtttcgatataattatattctgttatggtctgaagtttgcagtgtatatgttgtgcatggatgtttatctaggatctggttgaagttatctaatcaactttaaattgggcattcaaaggataaaatttctctcttgataacaatcaagtgttcctaagctaaatgactcggtaggataaaaataggagataggtggcaaatattaacatgggtttttttaataattaaatccattaaatggtgcattaccatgcaattcttctagttattgccacatcttactgtatcaatgaaaagtgattctgaaaattgccttctgacaagcttcttatactaatctggttaaatattgttttgatcctccatgacatgcatgtttagagtgattgcaaaacttcatgctctggcatccttgcaacttcttccatatttgtatttttttcctcttttggataagaaatgagactggtattgtgtggtgagagaaaaaaagggaaggatgaagaatccttcaaacagagagtacaaaagtaaagcaagaaatgactaataactggatctccaatcttgcaaaagtgctaaaaggaattctttccaagcactcactgctgacacattcaaagcatcatcaggtagcacattctcttccaagcatctttttccagtctttggcattgtaaaaaattctgacatttcccttaaactggatagcaacatagtacagatagcccttctccacaaggttacccctttaaagctcctgccaaagcacaggaaagatataatcatcatatctgcattacctcttggagcaacctacatgatattgatcccagggaacaacctcttccatctatataggaagagatgattggccaactcctcacttgtacaaagaaggtaatacttaggtttaatgtctttatagaaagctaatcattagtattggccttttcattagttaccaaccatgcaaagaccttgatttttagtgaaagtctttgaccttcaagtaactcagttttaaagatacaactgggaggtaggttggaggggaatttctagatatggaaagagtgaagaagaaagattcggatgaaaaagtgtcattgtgattttggcttggatgcctcttgtctatggctaataacaaagagaaatattttgcaaagataaaggaatggaaaataggtcatcaatttctaggtccatcctctttctacaaaagtcaaaattccaggttgggtagtcattaagagaagggaacctcttaatgcaagggagttggtggcaaaggggttgatccttgtaccagaaatctttctaaaagtggatcattgatccatgctaaagctgaaacaagtatgataattgaattcctccaaatttgattttctaatctagataccaaagtaaagagtgagatgtatctctagaaaaatccaaaatccttttaatcaaatggtgatatttgcctcatccattgcaaatagactgctggtttatggtctgtggtgtgttctcttcatttggtgtttcttgggtccttctccattcggttaaggatgtccttacttagtgtggcacttttgttgggccaaacacaaggaagtgtggtagataattgtgcacttttcttttgaattacctggagggagcaaactaggagaatttttcaaggagttgcgtgtgatcatgcttggagatgaaggtaatgcttctttaaactctgcttttgggtcccatggtggtttggattattgataacatgggggctagttagcttgagtgtgttgttttgtttttagatgtgctacttgtatacatcctgtttacatggtttgcgaaataaaaataaatgtcaaacatttccacgacactcttcttctttgtcttcccttctttttctttgcacttcatctttattttgaaaaaaaaaaaatcaagtggtcatattcccatggcactcttctatcctagaggctagaagcatcactaaaattctccttcattaaaatgctggaagcacttctttttcttctttaatatccaatgattccacctctaaggtcctataagtgaccgctaagacctaactaccccacagatcatcattaatgttcagctcaaaagcttcctcctagggaggaatataggtctccaacctcccttttgtagtgctcttagtctaatgttcttcttgaatcctagaaggagatacccaacaagtctgtgttgtgcctatacacaatccttcctgaagagaatagtctctgccataacaccagtgagatggtggaggaagaggttgtccatgggcttctcttcattttcctcttctaggcatcaagacatatctcagcaaacttggaaatttctacttgaatagtaaataaatatcaaatgattccaactccaaggtcttataatagaccactaatactcattaacattcagctcaaaagcttgagaaggagatagctgacaagtctgtgtggtgcctatacacagtccttcctgtagtctctgccataacaccagtgtgagatggtggaggaagaggtggtccatcggctcctcctcttcttcttttggccgtcaacaaatatctctacaaacttggaattttctattttaatagttaagacagccaataagtctgtgtagtgcctatacacgatccttcctgaagaggatagtctctacatgggcttgtcatcctcctcttcttctaggtgtcaaaaatatcccaagcaaaaaattttactcttaggcttatggctttatatctaagatggaacatttcttattaatccccaaccaagttaaggctctgacatttaggggagttgtaattgtctaaaaaagctcggtttaagggaaggaaatggaggagtgatttcttgaaagtaacagaaaaagattcgatggaaaaagacccttgaaatccaacggccaacccttctcatccaggataggagagggaacctttggaagagaagagactatcaaagggaagataggtcattggtttcaggattcttcaggtttctccaaacatcaaatttccatgaaacaaagctatgaatgaaagaataaaagctataaccctgagatttgacaaagttgatataccacccataattggatccataatccattatcaaccatgaaatgagtattgcaaatgaagtactaaatttgacatatagctttccaaggatgctgtgtggagttgagttcattgagttggtattgcacttattattgtgctaaccataaatgttactaatcacttgaaaccataaggaattttgtacttcaaggaattgccaaaaccactttttaaagaagactatacttctcttgaagatagccccttcaatcatttgtaggctctgttcctcacagaaatctcccatagaatcaatgtagtcctccctccagctggttgtgtttgtttctttctcttttttttcgttttttacttttcctaattggaaatgttggctgccagtaagactgttgatgatgtttttattttaaccttatgcctccagcctgtcttcatgaggtttgtccaatctgtttctgttgagatatttccatgtggctgactgaatctatcattcacttgccatagacatttttctctctttaagatgccaattgaagataattaacttcctcatgtaaggcatttctatcataagcttatgtattttatagattttctcatataatttggccattttgttgtccttctctccatgctctacaagatgtagattcttgtagttaatattttgactggtttgttacctataaatatatatatatatatatatatatttgactggtttgttccgtttccccttttgtctatatctagtagagtagttgttgttactgatggtcatttaaaatggttgctggtgagattcattggtgtaacacaagcctggttgaacaagttgctgtaacataccaacctcaagaagaatgattatgaaggtaggagtggggaagataactattgtttcttatcaattgttgtcatcatggtccctcggcccaatgacaacagaattattctttgaaggtaacctgttgggaaaggggaaggcgtgaacatatctgccttattgggaaaaaagtaaaaataaataaataaaaaaataataaaggaaaaaaatctggtgtccataaataatttttatgggaaattggaggacaagctccttccaatttgaaacaaggactgtggtggttggagatgggagataggacttagagagaatcattcagtcagttgtttaattggataatagacttcagtgaaacttggagaaggtgattgaactaaagactcaataacaaagtctccagtatcttttcagatgagaattttctttttttcctttgatagaaaaaagagcaccatattaataagcactaaaataaggccacacaaagtacacaagaggtatacaactgactgtgaagcatagaacaagaagagagaaagctaaagtacccccttcccttacttgcagcctaaccaatcgacaaaatctaccacaaaaatggacccatcctccagggcccctttgacccactctaaaaaataacacataagcgaggatttaagttcttgatttgataactcaacattgtcaaaaacccttctatttctctttccaaattgtccaaaacaaatgtaaaggagctactttctatgctttcttcctcttcttccctatgaaacgtccatgcaaactcagtaatgttgctttaattgtggaatgcagcacccatacaaatccaaatgagaaaacctgctaccatgacactcttgccttggaacactgaaggaggatgcacttgctagattcctcctcacttttacacataaaacatatgttcgccaaagcctagctttgccttatctgtagttaatatccctttccaaactgcttcctaggcaaaaaaatcaccttttttggagtccacgaattttggataaaaacccttgaaaaagactctcatcttccctataccatcttagaataaaaggatttaactaaaaagttgcctccttttacgatcatccttgctaccctgtcatcagcatcacttcttgctgattttccttgcaatctcaaaaagaatgcttcaacataagcaaactcccaatcatagagatttctggaaaagcatgggttctaatgccttgtgttattagcttgctctcatacataacaaataaatatgggaaagaaatcctcacataagcgtccttccagatttttaccctctttccattgcctacaataaaacgaatcttacctttgaaagctccttgtcctctctttattgccttccacaaccctacaccatgcacctcccttgcctccaaagagcaccgatcctttttttcttccctaaatttctgtgtaataatctgcttccaaaaagactccctttctgacacaaacctctagcatcacttgctgaggagaactttgttcaaaagatagaaagattctgattgcccaagcatccttccttcttaagcaagcaaacttcgaccaattcatcaagtgagccttttttttttcaagagttcccatttgcatagaaaattcttttgaattttttccagtcctagactcccccttcttgaaataataaaaaagggacatcgaatatatgagaaggctagataaaatgctttaagagttaacctccctgcttttgataggtattttctctttcatattgcaactcttctttggaacctctcttccaccatgtcctagactaccataaatttgaaggtagcacccaaagggagatcacaatatttggatggaagaaactacagcctaaaatatccactaacttctccacatttggaaggctcccaattgggatcaacccattttttttctaggttggtcttcaacacaaatattgcttatcaaaatccaattaagatacatcatttgatccttataaggctcacaaaaaatcaatgtctcatcgacaaacgataggtatgacacttccaccccctcattgcctctaccttctacttaaaacttgagatgaaatccccctctttagctctcttgagaagatagctaagagtctttattgccataaaaaaataaatcaagagaaagagagtccccttgcctcaacttttaggagctatggaaaaagccagtaggagtgccattaacaaacaccaagtacttagttgtagaaatacaccatataatccaccgaatccacttttggccaaaacccatttgctccaaaccaccaacatgaagctttaatttacatgattataggccttcttaatgtcaaatttacatataacaccattagagccactctttaacctcaaatcaatgacctcatttgcaataagaacatcatctaaaatttgtcccctttctacaaagacattttaagagttagaaaaccaccatgcccaccactttcttgagtctatttgccaacaccttttctagtaatttttatgggcttcccatcagactgattagcttaaagtccttaaaatcttctacttcacctttgttagtgattaagaccaaaaaagtagtgttcaaacttctttgaaagagcccttgctcataaaattccttaaagaaactacacactttattcttaataatgtcccaacaaacatgccaaaaggccatagtaaacccatcaggacatgggactttgtccccattcgaagttgagagggtagagaagacttcctccttagagaagggcaactccaaactcctaggctcctagcttcctcctacctcaaagactcaaaggacaaccttgagcccactaatactaggtctcccatctccattttcggccaaaaggtgcttataagaaatagccatcccctccttgatctcctcttgatcggacaactagacctcatcaactcttattctagcaaaaaagcaatgttttaataactgaattgactagccagttcaactcgttgaactattaatcagacccttttgtagtatggttctcacttttgacttcttcaaagggttaaccagagaagaacccctcgaaccaatgctcaaactcccaaatcacatgagctagtcacatgaaaaccggataggtcaaatgaaacttttcatataactaggttaggttggatgggttgaatgaaagttcttgcatggctagggctttaaatttaggccaaaatgggtgtaaggtggagaaagcttagcacaacacgtcaaattctcatatgcttgatgtcatcacatgagctgtaagctcaggtttgaccacttcggatttatagaccttaactttttcatcagtttttgatgtgggattagagaaatgccgaaaattgaaacacactgaggaagtctaatctaatgggcctcttttcctttggcttgttgccctctcatgggccataacccttggacaatgaataagaaaatgccaaaaattttgttatttctcgaatgggaacttgagcacaatctcttatatgaagaagaccaaggatggccatggggaaccttatgtctttttcttaaaaaaaaaattgcaaatatatatataataatcttcgttatttttaaaaacataggtaaaactcttaaataaatataaatatttaactctgtgtttattttaataatgataagtatgaaaataatataaattaatgtaataatttttgaaattataggatatatagcttttgacatatagataaagaattaattatttttcattattaatagttctaatttagttcctttttgtaacataaaatttagtcctctctcatggttttaccaaataattttcaatattactgatactatcactagggtcctccaaggaatataatcatatccaatttgctatattatcctccccaattgtgttaatatccacccattcttcttcttcgtttaccaattgtaccgatatcatttgttatctatcaataattagattatatatgaaatcaaccactaggacaatcaacaattctcttatttttctcaatctctccttttcactaccaattaaaatgttaattgaacgtcaagtaagcccttatttagtaaaatgtttaaccaagtaaggacccaatactcaattcatgaaatttatattagaagtccccaaaagcaatagatgatagaacccattaaaactcattaaatattgagatttaagcctcttataaaacatataagaaaagcccataaaggccaaaaaccatttgaatatttgtggcttaggcttcaacaaccttgaggctatggcctcaaagctataagcctatgggatgaggcttaagcctcaataggctatagcctcaaggataatttgtagatcctcaccttgaggcgacccttgaggtgtaagcctcaatagccttttaaaacatggttgtaaatatgctcaaatatctaccattaatttagattccaaacaactcagatcagccaaattaccaaaatgcccttttattctttctcatggttaaccgaatggccttatcaacatcaccttccttcatgtagtaatcttagagcactgaattttggatctgatctcagaaagtcttggccgaaagaaggcctttcttttgtttgccttaggagaggagaggacaggaagaatcactttttcctagttttgccaatgttctaacatatttcatgcctgtgtttagaattcctattgaagtccataaagagtctatctttggtcatggttggaggaggtcctagagatgatctgtttaggaaggacattgtgtgtcatctggaaggcaagaagatttaggccttggtagtatcacttgatggaatccaagtctgactaccacaaaagatggagcatggacactgagacaatggatgggatatacttagagtagggaacctcctgttagccttacatagacatatctcatggatgtttgcttttccatccttgtgctagattcattattagaaatgaaaccaagatttctttttaagaagacacatgttaggggaacaaaaaatttgaagatgcccttgattatttccaggctccctttggaggacctttagcatatttatagtggtttttgtgaactcaaatggatcctattcttggaaattcaattggtttagaaactttagtgatcaagattttatttatttccccagccttccttgtctttagttggtattcatatctcttcttttagcaagtgattttggtccttatactagaatggtgcattttcttcagaattctattttgatcaattgtctagatctttcatcatatttccttcaacctgtctagattgatgtggaaagcagaagttcacacaaaagccaaatcttttgcatactgttgcaaacaaaatcttttgcatactgttgcaaacaagaaggctagtaccaattagaaaatttttaatttagaagaccttgtagagctcttagtttggacatttttgtgtccacttatgttgtgctagtggtaagaatgttgaccatgtatttgcccactgccccattttcctcactctttggtctgacttttagttgggtggcatttccttggctgctaattatgaatttaggagcatgatgggtgtatcttttggaggccttggaggaggcataagaggcaaaactctgtggagcaatgcatccagatttagttcgggttgtatggatggggagatttgtgagaacaactctcgggaaaaaagacttccctagattccctttcggatgggtgtgtttacttagcttttaggaatccaatcaccaaataatttaaagaactgttgttaaggagtatcttgcttgagattttatggcgggttgtgaaatggaagggtggctactactttttattggagccccctccgctgggtcccctagtctgatatttgataagtgtttgcttggggatctaagtgaaatgggattggaggcattttcaaagattagatgggtctaatgttcatgcattttctgacctaatgggctttggttttgccataggtgcagaaaattcttgcccttttttaaagtttgaaagagggaaagaccttaggtttgagactttctaatggtgactcctctgtgttgattttctggatgagaggcaggtcttttaattatagattctactatagagatggaagtagagtgttgatggagtaggtcttttaattgggaggcagattttctggcaaatgggggacttctacacttgaaggggaagactcttggggcatttaaaggaaccccaccattttttggagtacttattttcctcctctgtttactatttttcttctattttgcttatatttctttgaaggattgcacatccttcgtatttcatcctttctgttaatgagattctttgtttctcatttataaatttttctgcattgtataatctcatcagtgagctcatttgagcatttgaaaattcaattgagattctaatttgtcatagatgtatcactgttgactgaaaatgacctgtctagttgcttcttgcatagtcctgaggacaacactattacttatgttaaatcatcagttggcagcagtaggttgaagttaagggctcctggattcatgatagatgatttcaggggcaatggccttcagcttaactatggttgtatttcattcaacggcttgatgcgtgtagtaaccattaatcttacagcattcaatttgtagagctgatcatgcggccagaatttcactagcttgacaataccatatgttgaaagatgaacagttggtgactaaaaaatccatgataaaaatgttactcccgcagaatgggcatgattttaaccagtaacaagtttaaatgtgtggacaatgatgaaatttccagtggcttagctgatggaccctttattaggaatgtctattgtcatgttgagtatctttcatgcttttgctgatattagtatggtgaatgcatgatttgaaaaatctgtctctttgcttgccaaacagatacttgattttgcaaacttgtagtctgggaattttgaagaagagccttcaatttaaagatggtataactgactcttatattggggtttaatttctccgtagaggtgttaaatgatggacagatatgaatcaatgtcaattaatttttggttcatgagtctgcaatggccacttttatgaagtcaagcaacagaaattttgatcctctgccagcatttgaaattcagatgttgtatcatcatttaggagtgtcatatagacttcattaacaagcagttaattcccaataagactgaaatgcatgaaatcacagcattcttacttctttgagccaaaataaaagggaaatagcagtgtcttcacttgcaagttgcaactaacaagcacaatctacaatgcttttcttggttatccatttttatttttgtgtcttaagcagatttctaactatattttttcctttctactttttctggcagtttatttttgttgctgctgcaaagtattgtgttga

SEQ ID NO: 12124 - DNA, 11649 bp, Vitis vinifera
  Intron number 12 from transcript GSVIVT01037287001 (locus GSVIVG01037287001) derived from phytozome v7.0 (chr-ID chr 6; pos 16451363 to 16463011)
agaacattttcgatgtaagattctctctatcctgtggtctgtttattattattattattttttgataagcacacaaaaaaatattattattgatagaggaagggctaaagctagctaacgtacgtatacaaagggagccaagtgaaaagaacaaaaaaaggagggcaaacaaaggggaaataccacctgcttacaactacttagctcctaaaccaatcaataaaatcgatcataggtgtagtatttccttctatatgatgcctaacattatccaaaaaggaaagcataaaagaggatttaagctattgatctaaggtttccacatcttcaaaagtcctccgatttctttcatgccaaatgattcaaaaaagacacaaaggagcagctaaccaagctttcttctacttttttcctatttgaacctcattctagcttagcaacatcaatctaattgaagaatgcatcacccgctgcaacccaaataatgaaaaaaaatcaactgccacatatctgctacccatgaattcttggaattggtgacaacaaacaaggtggggaaagactcttttagcaaggtgttgccacacctcttgtccagccaaaacttgactctcctcctattcccaataatgaagcatactttgcttttaaaaatcttccaattttttctgatggccctcgaaaagcctaatccgtaaccttcactaagtacccccaaagtccaacctccttcctccccaaacttcttaggaataacacacttccaccaagagtctgtttctgcaacaagtcttcaacaagtcttcaacccctcaaagattctattaaatacatattagaaagaatattgatttaaatgctttctatgaatttgctaattatatatggtaaggagaacaccaaataacatctaacttattagcaataaatcaatcagccaacaagacacaccaaaaaagggaggaaaaacacagagcttgttttgtagtggaaatcaaagatcctcattcccattaattaataggcccatacccttcctatgatcaaaattcttctagcttcatagcctatgttgtttcaacacaaatggtaaacctaaaacccaacaaaactttggttgttgtgttggggagcatgaatggaggtgggggtgggtttggcacagtggtgattcaaaaaaaaaaaaaaaaaaatccttatatttcatatatattttttttttaaagaaagaatagtagaatgaaaattctgcccccctaaatttatttattttttgattgataaagaaaatgtattaatgataaaagaaggtatacatgatgtatacaaagcaagcaaaagacccaaaaaagtaggacgaaggcacagaaaccagcatacgcattgtacataaagcgtaaccaatctacaaattctaacattgacaaagaaccgtctctaatatacaatttatccaatcccaaaaaaggttcaaaaaagaattttaaattgtttgatctaagcattcacaatcattgaagactctcctatttctctccctccatatggtctagaatacacataacggagcaacctttcaagtccccccctaaagttataactaaatattattgacaagatataacacttactctctatattaagattttaataaaatttaaaatacaaataaaatattttataaaatctatttaatattcatacttatttgtttttttttttttaaattttattttcatttgatcatcatcctaatacatttttcgttatcctaatgtatttgaatgtttttttaaattatgatttttcaaataaaattaatttttttttgtaattttgtatttgatattttatttaataagtttcttaatggctggttagtttaaattttaaaatatattaaattttatactacttgatttttgataaaattagtcttatttaattttaagcataagagacaatatgacttaataggatacattgaattataaagaataactatcaaactttcataaactacttatattttatgataaaaaataaataaattacttatattttacttggaggggtttttagcgattgtgatgctacttatattttacttcaaattttagtgattgtgatgccttatatgagagataattattgaataaaaggcttcataacttttaattgatttatatttagttatttgaaaaaatcccaaattttaccatataaattattgaattctttaaaatttttgttaaaaaaaattgctaatattatttaacattttttttagtgaaatttattcctattttttaaaaatttgtttgataaattcctttgaatttctttcataaacttttttttttttaataaactttagaacatttttttaactattgattttagtattttgattatttatcgtaattgatgtatacacttaattaatttgttagatgacaaagaattgcttttgatccagagactaaaatattcttttgtttattccctttggttagagacaaagtcgtttataaatgattatcctttaactttagttagttttgttgattggttgggctcttgttaaggttgttttagtcttgtctgtttcaatgttttcttttcctcttttgaccgttttggcggtgggtgcagagaatttaagggattttagaccaattagcttggttggtggactatacaagtggttggccaaggtgttagccaataaactcaaaaaagtggttggaaaagtgatcttagaggctcaaaatgcttttgtggagaggagacaaattttggatgcctcacttattgctaatgaggccattgaatccattttgaaaaataatcgttgtggcattctatgctagcttgacatagaaaaagcttatattcatttggattgagcttttttgctttcggttttgcataagaagggttctggtgaaaggtggattagatggatgaaaaggtgtatctcatgaacaagcttctttgttttgttcaactgtactccaattggtttctttcagagctctagaggcttaagattggggggatcccttttcaccctacttatttgttgtggctattttttttttttgataagcaaatgatatatataaaacggccaacagcctcaaggcatacaggaagtatacaaagctaccaaccctcaaaaaacaaccaaacgaatcaagccctattgaggtgcttagttgtttgataagaagggcagtcagtgggggtttcttgaagggctgccaagtgaggggcaagggtggagaaggggtgaatatttcccatttgttgtttgcggatgacgccctagtcttttgtgaagcctttgaggagtaaatgccgtatctaagttggttacttatgtggtttgagaccatattggggttgaaaataaatttggataaaagtgagttaattccaatgggagagatgaacgatattgagcacttggcttttgagcttggttgtaaggtgggtgggcttccttccttttatttaggcctcccgttgggtgccccatttaagtttatggcggtttgggatggtgtggaagagaggtttaaaaaaagattggtcatgtggaagagacaatatatcttcaaaggagggagaattacacttatttgaagcaccttgtctagtttgttcatttattttatgtccttgttgcgcatccaaatgctagttagattgagattggagtagattcaaagggactttctttggggtggtgggactcttgagcggaaaacacgtctagtgtggtgggatatagtttgccttgacaagaggaaagggggcttggttgtgaaacgtctttccacactcaataaggctcttttgagcaagtggaattggctctttgctattgagaaaggggccctttggaattgtgttattagtgggaagtacagggaagaggaagtgtggtggtgttccagggagatgagggaggggttttgtgttggtgtttggaaagtcataaggaaggagtagggttttgtgagtagtatgatctctgttaagagagagagagaagaaaaccttgattctcagtcattgtgtctacttacaattaagaaaatatatatatacaaggctaggagtcctaactaccatacatgtgacctatattaaaaaggaaagattgtacactataaattcattatattcaacactccccctcaagctggagcatatacgtcatatgcaccaagcttgttacaaatgtatttaatcctaggacctctgagagatttagtgaagatgtctgctagttgatcatttgaattaacaaaacttgtagcaacacatcctgatgcgatcttctctcgaatgaagtgacagtcaacttcaatatgtttggtcctttcatgaaagactggattggatgcaatatgtaatgcggcctggttatcacagatgagtttcatctgttcatcctttccaaatctcaactctcgaaaaagatgtctcaaccatatgagttcacatgttgccaaagccatagctcgatactcagctttagcactagatctggccagtacatcttgtttcttactcttccaagatattagattaccttcaataaaaacacagtaccccgaagtggaacgtctatctgtgggtgagccaacccaatctgcatctgtgtaaccaacaatctgagtatgacctctgttctcgtataacataccttggcctggtgtacttttgatatatcgaagaatgcggattacggcatcccaatggctatcacatggtgactgtaggaattgactaacaacactcacaggaaaagaaatgtttggacgagtaatggtgagatagttcaatttacctacgagccgtcgatatctcccagggtctcctaaaggctccccctgtcctggtacaagtttgacattcggatccataggtgtgtctatcggtttacagtctaacataccagtttcttccaggatgtctaaagcatacttcctttgggaaaggaccacaccagaactggatggagctatctcaatttccaagaaatacttgagtttccccaagtctttggtttgaaagtgggtaaaaagatgttgctttagtttttgaataccatcctgatcactgcctgtaatgacgatgtcgtccacataaacaaccagataaatacactgccccaaggagttatgatgatagaaaattgaatggtctgctgtactgcgaagcatgccaaactcttgaacaacagaactaaaacggccaaactatgctcgaggagattctttcaagccatatagagaacgacgtaacctgcacactaaaccagactccccctgagtaacaaaacctggaggttgctccatataaacttcctcagcaagatcaccatgaaggaagacatttttaatatccaactgataaagaggccaagaacacatagcagccatggagagaagcaagcggacagaagcaatcttggcaacatgggagaatgtgtcaccataatcagaaccataaacctgagtatagcctttagcaactaagcgggccttaaggcgatcaacctgaccatcaggaccaaccttaactgcatagacccaacgacagccaactgtagatttaccagagggtaaaacaacaagatcccaagtgccattagagtgcagaacatccatttcatgcaccattgcctgttgctagcctggatgggaaagaacttcatgggtgctctttggaagagaaacagaggatatagcagaaacaaaagcagaatagggtgaagataatcgatgataactcaaaaaattgtaaataggatgaggattacaagtagagcgagtacctttccgaatagcaatgggtaaatcatcaggagaaggcagagccgaggtaggagaagccgaagggataggaagtgagtcagtaggtgcctcagcaaaagggagaggagcagcgacacgagggcgatgatgataaacttgaagtggtcgaggaggcataacatcagatggggagacaatgggaaggggcaagacttcagaaacaggaagagactcagaagtggtggaaaagaatggtgagtcctcaaagaaagtgacatcagcggagataaagtattgatgagtctcaagggaacaacagcgataacccttctgaagtgtggaatatcccaagaagaggcacttcatggctttggcggaaagcttgtcctgtccaggagtgagaatatgaacaaaacaagtacaactaaagacacgaggatgaaggaaataaagtggttggtcagggaagagaaggaaatgaggaatctgatcatgtaaaacagaggagggcatacgattaattaaataacaagcggtaagaacaacgtccccccaaaaacgaaaaggaacattactatggaggaggatagtacgagctgtctcaacaagatatcgattcttgcgttcaactaccccattttgttgaggagtatgagcacaagaagactaatgaagaatcccattatgagacataaatgaagtaaatggagctgaaaaatattccctggcattatcactgcgtaacacacgaatagaaatattgaactgggtctggatttcagcataaaatttttggaagatagagaataactcagctcgatttttcattaaaaataaccaagtacatcgagaatagtcatcaatgaaagtgacaaaatattgaaatcctaaagtagacgcagtctgacaaggacctcaaacatcagtgtggacaagctcaaaaggagactttgcccgattattcaaacgctttgggaacgagacacgagtatgtttcccaagctgacatgattcacacaaaagcgacgacaaagtggaaaaacgagggaccatcttctggaacttggagagactacggtggcccaaacgactgtgaatgaggagaggagcatcagtagaaatgcaaactgtaggagatgaatccgaggtgaggtgatagaggccttgagactcacatcctatgccaatcgtcttccccgtactccggttctgcaaggtcacaaatttatcagaaaaggtaatagagcaattaagagtacaagtgattttgctaatgaaaataagattaaaaggatattcaggagtataaaggacagaagtgagaggtagagaaggcagaggaagggccaaaccaatacctttagctacagtttgagaaccattagctaaggtaacagtaggtaaatcaaaggtagtagtaatagaggagaaaagatctttattaccagataggtgattagaagctctagaatctagaatccagggtccaagagaagatgtgtgggtaaggtaggcagaagcattaccaggctaggcaacagaggcaacagaagcctgagatgcctgagatgcggaggagcttggaggctgaggcaactgagaatcagaggactgggccacatgggcagtgcgaggaggccgtccatgtaactgatagcaacgatcgcgagtgtggccagtttattgcaataggtgcaatgaggacgttggcctctacctcggttaccactgcgtcctcctcgagaggtagtgtgagaaactaacatagaagaatctgaaatgctatcagatggcaaagtctgagtggatgagatacgaacgaggtgagcaaacacatcatctaaggacggaactgatgaattaccaggaatttgatggcggacaggctcaagatccggacggaggccaataagagtaaggaccatgaagaacttatcaagctatgtttgttgagccccaacatcaggagaaggaggcatcacagtcaagaactcctccttaagagaggcaatctggccaatataagtagatagatccaagtcctgttggctaatatggacaatagcagaagccaccttataaagacgctggatatcattcgtgtataatcctttggcctgagtccaaaatttaaaacaagttttgtaagcccgaagatgaagaaggatcttaggatcaacggattgccataatacactacataactgggcatctatctttctccactgtacgcgctcaacctcagggatatctgcctcctgtgtaaccaagtgatcctcatatccttgtcccataaaccaaagttcaacagaggcagatcaagaaagataattttcactgccaaccaatttctccgaagtaatcataggagatccagatatgacagaggaaaaatggaagttttagtagccatatccacttatctggagaatgaagtatatttggatcgaagagagccctaatatggcttcagatgcggccgaagaaggaaaaatcgaagaatcacccgtgtgagagaccaaatggaaaagaaaaacaaccgtggcaccaccggaaaggtagaagaacacttcccaaggcacgtgcaaggattagggttgagaaaaaatagccggaggacgccggaaaaattgttcggagggccggcggaggcaaaagaaccccaaaagaggcacgtgcagggctcggatggcagaaacatgtatgaagggtggctagtcggcatcaggcgaggctggaggaggaagcgcgtcgctagaaagtggctcacgcgccggagcgtaagatgcagtcgtcggccggaaaaatgcgcgtgggtggttttttggctccggtgctttgggaaaaattggagatctcctccaggcgctccttgcggtgtgggaaaaagacgtcgtcggaaaagtcgccggcggtgaatgttttctgacgacgattctaccgatcggaaagctttggggtctggggaaggtggccggaatgaaacatggtcacaggaaggtttcccggaattgatgacacggggaaactggaaagaattaggttttctcccttggctctgataccatgttaagagagagagagaagaaaaccttgattttcattcattgtgtctacttacaattaagaaaatatatatatacaaggctaggagtcctaactaccatacatgtgacctatattaaaaaagaaagattgtacactataaattcattatattcaacaatctccttggtgggtaatgagtagagggtctaattctagaaggataagtggtgtgggaatgttttgttgtgtaactcttttccgttcttatttgccttagcaagttcaaaggatgcatgggtggaggatgtgtgggattcttctgtccttggggaggggggctggagcctgtgtttctctagacccctcaatgattgggaagtgtggagaggtttctttcatagttagatggaatgagggtacataggatgatgaacatagggtgctttggatggagacaaggaacgggaagttcactgtgaagtcgctctatactggtttagagtcgaggatattgatctcttttccttggagcaacatatggaaggcgtgggtgtaacctagggttagcttcttcgcttgggaggtgacttgaggaaaaatcttcgcatttgatcaagtccaggaaagggggtggtttttggcgaatagatgttttctatgtcatgttgaggaagaatttataaaccatctccttgtccattgtgtaaagacaagagtcttgtgggagttgctttttgccctttttggggtgtcttggatgttgccatcgtcagttagagagactctgttacggtgacatggttcatttgtggacaagaagcgtaggaaggtgtggagaggtggtccattatgcttgttttggatagtttgaaagacaagaaataaaattgcctttgaggaggaagaacttttaatccaaagtttaaaaagttcttttgtttgttttctttggtcataagcaaaagggtgtataaatgatgttcctttaactctttttagttttctagattggttgggcctttggtgatggtgggttggcttaaattcattcttattttgtaacttaggtttattgtggtgtttgttggtggtagctatatatgttttgtataccttgagttgctattttagcggccctttttaaattttttttttatctataaaaaaaagcattttttggtaggcaaataagaacatatgtatttacatttctctttccttgattagcctttaggtacatagtgtatacatcgtctgtactttgtgtgccctttctagaacactattaatatattcttttttattgcctagatatatatatatatatatatatatatatatatactctctagaccacatataaagattcgatataagagaattgttaagagattgatttgtgtatcacaccccttcaaattttcagttgcgttccttccaaattgttcaaaaaggcatagaggaggttttttatttttatttattttatagatttttatagattttttaattttttaatagataaatgaaaaaatatattaaaggctcctaaatggaggtgcaatacagtatacacaaagcatacaataaatgctcaatgtaggcaagaaggataaaagcaaaaaagaaaaaaaaaaaaaagcaaaacacatattacttactagatttgaatagattttattgaatgggtgtgtatgcgttaagggagagggtttttttgtgctttcttagtggcttgggttctttcgtaaggggtgagttgttctacactgtatctatttgagtcacttctttagcgcctcttttgcaatacacatattacttactgataaaaaataaaaataaaaaagcaaaaaaaacccctctccttattttaagcttaaccccacaccattttgtcatttccgctgcttcttcctaacatgtatagcttctgaagaagctcctcaactttatccatcttccaatcttgaaaatgtcttaagaagcacgggttccacatgactaacccaccctctacctcttgaacatcatccactcatgcctccttggaagttgcaaaggaggatagagatggaaaagagtcctttaaatgaacaccaccacatcacacatcttgccaaatttgattcttgtctcattgctcacctcaaacttcccatctttttcttatcaacttccacatctggcgtaatgagcgttgatggattatgataattattagtggggaaaatcttgctagtttttgctttgctgtgattatatggttgggttggtttgttgtttgctattagaatgttgaagagccaggaagaagtatccttttctttgtgatactattctttattgataattgaatatgctgcagttttctattgaaggtcggaaaatatgaacaattatcatactggtgccatgctgattttattctgcaagagaaaatgaggaataacaagtttttgactcttaacaaaatcttaattcatatgcaaattcacatgactataacattgaaatttagagaattttggcaatgctgattttttctgcagttgtgatgatgcttctgtttctatgttttagtattgagtcttcacctactttatgttttatatgccctcgcaagtacaagtagctgcatgctttccctcattttgtgatgccagcttttacattcttgttgatctttatcgttattgtattatttaggaggtactctattttgctgttgtttatgtggtgctttgttgtcatttgttctttcagg

SEQ ID NO: 12125 - DNA, 1764 bp, Vitis vinifera
  Intron number 2 from transcript GSVIVT01006770001 (locus G SVIVG01006770001) derived from phytozome v7.0 (chr-ID chrU n; pos 28297054 to 28298817)
gtcctactttacaaaaagccatctacaggtaggcattctaaggagtaattgttttcaattctttgaattgtagtttgcttgaattgtttgataaattaaattagtgggtcctgcttgaaattttaatttgtcatagttttttccgtgttatttgggtagataggctaaaataatcatcaaattgcaagaatggcgttcggcaaaagatgacccattttggactcttttacccttaatttttttttttacccttttaatttgtctccctctaaaagcacgtcttctcacttattttgttcatttcatttttttcccactcatttatctttcaaatcttttttttttttttttctttcccactttgacattgatcccaatgtattccctcttactacatggcttcatctctaagtgtggcttcaaacttttcttctttctcatttcatgaacatccattatatttttaatttaatttatttttctttcttttcatgaagggtgttcaccttaattgcaggggagttaagttttgttttaaaaaaaaactaaataaagttaagttttcaatcataatgataatttgaactatactatagttaagttttatttagaaaaaacataattgatgttaacagcccgtttggtagtgattctaaaaagcgcttctaatttttttaatactatagctaaatttccctttcatctatacaaaactcgatgataatgacctgagctgcattgtggttcagtttcattttaaaaggaacttaaattaggttgagttttcgttgtatctacaaatcttaaaagtttcaatacaaatgtaaaaaacaaaaaaacaaaatccaaacaatgcaaaaagaaaaagaaaaaaccctaacagaaacatctacaaatcctaaatgcaaaaaatctcaactaaaaataattgcaaataaaaaacaataacaaaaaccccacacagagagagagagggagagcgctaagtcagaatgggagggaaatgaattgggaatgagatttactgtcgtttttgttgaaagaaagaagggcaaaaatgggttaatttaaaaaaaaaaatagatgaaggaaggttatttttccaattttaaaactatttgaggtcttttaaccaaatgtctcttttttctttgttttgtaggtgcttggttcttgctaattgatattctatcacaatatttgtatgtgagattgagtacatgggaattgtgcattcatgttatggagaaaagagtacatgtaggaatgtttgttgatacttaagttgactgataacatattagaattttagttggtctttcattacttatgatcagtaattattatcatgttagcagtagccatatatttgaggcaagaagaatgtagctctttggtgttgactgaagaactctgcacggaatgaatgcttgactcaaaatgtagagggaagaaattttatatgtataaattttaggctcgactgtcaaaggacttggttgttttcgtagttgtttagtaatctgttaatttaatctttgcatctcagcatttgtggcttcaagatttttggttattcagactgttgtaaaactggcatgctttcattatgaaagctttgttttaatattctaaaacccaggcatttccaagccactaagacctgccttttttttctttttgtatagattttcattttgcttgttgcttatgcatatatcatatatgtgctctttccatttaacaatgctgatttcaggtata

SEQ ID NO: 12126 - DNA, 10888 bp, Vitis vinifera
  Intron number 1 from transcript GSVIVT01011363001 (locus G SVIVG01011363001) derived from phytozome v7.0 (chr-ID chr1 4; pos 28970803 to 28981690 reverse strand)
gctacaatttcctctttggagaattcaaaagatctgtcaactattagcttgacagaattattacattccttagaggctgtagaacaaagaagactcatgagacaaggagatactgcagaatgagcatttcaagcaagaatgcagaaaaatgcaggccataaaaatggaaaggtgaacaacaacaagtcgtgtggcaacaaccagaaaaatggagtttttccaccttgtcctcattgcaagaagacaaatcactctccacaaaaatgttggtggagaccagatgtgaaatgcaacaagtgtggtaaacaaggacatgtggagaggatttgcaaaaattaacagcaggaagaaactagtgcagcagttgactattgtcaggaggagcaattgtttgtagcaacgtgttttgctaataaaagcacctctaaaagctggcttgtggatagtggttgtacaaaccatatgacaaataatcaagatctctttagagaacttgatagaacaactatttccaaagtcagaattggaaatggtgagtatattccagtgaagggcaaaggaacggttgctatcgaaagccaaacaggtttgaaactcatttatgatgttttgtttgtgcctgacattgaccaaaacttactcagtgttggacagctcgttgagaaagaatttaaagtttattttgaagataggaattgcattatcaaggatgctgaaggcaaagaggtgttcaacataaaaatgaaggataagagttttgccttgaatttactggaagatgagcatactgctattttacaacaagatagcacaacaatgttttgggacagaagggtcgagcactttcatcatgatgatgtgctctacatgaagaaaaatcaaatagctgaaggacttcctgacttagaaaaagatcttcctatatgtgctacttgtcaatatgggaagcaaactaaacttccctttccaaagaaaatatcctggagagcaacccaaaaactgcaactggtgcatactgatgttggtggatctcaaaagatgccatccttgaaatggaatgcaaacaatgtttggtggatctcaaaaaatgtcatccttgaaatggaatgcaaacaattttgggctaaaactgcaagtagagcagtatattttctgaacatattgccaacaaaagtgttaaagaagcagacccctttcgaagtttggtttgagtgtctacgtgcaagacttggagtttgcatctacaaagtcaaggaggagtgttgaattttgacttagtatttgctggaatttgaattttgaatattgcagctggagtcttgcacaaaatctgcaacatctagatatttttttatttttatttggtcaagatttggtttctattttataggaagtagttattcatcatctagtagcttgattttctgctattctaatgtcatttaagttacaagttcatgtataaattcagcactcttcatcaataaaattagagttccggcagcccaaaaatatatattttgtataagtatttaatccaaataccaacaggctcaaaacatgacccaagatgagtatgaaggttaattaattaggcttcattataacctttataaggatgaaaaagggtcccggaaactaatgatccttacgtggtaactcatatcagtgatcacttgaattaaattgcaaaaaatttagctaccagcaacggcaaacacaactaattataaaccgcagaagtggaggaatgagagctcaaaagaggacaacggaatggtgtgtgagccctaggatggttactccctcctataatccttggacaacaaaagacccaaaatgagtttgtgatttccctggcttcatattagttgaggcagttggggctgtttggtaaaacccatgcttttggctaatgggaatcataaatattgtcataagcaaatgataccttcgaatcatgtttgaaaaactaagctaattattgtcactatattcttaattagtaatattaacaaaacaaacattcagccaggatgaatccttcagaattacatggcaaacaacaattagtcttccatatacatatacaccttcatgatccattcctccgattaatattgtatttgaaaaattagtaccttacttcttgcatagggcaactgacgtaaaccaaatggcggcttgatccagtctattaattaaagaaggcaaaaaaacatctaagtcttattttaataacaaaaatgacatagtgatactgatcattaagcaatgtataaggtaagatgtaccgattcatagccaaaaaatagtgaaaatgaaagataagaaccctcaaagttgttagaattcatgagagtttgcctttgaaaatgtcttagttagactcaatctctgtttcgctccataattttcagtttttctgttagtagaagtagtcatagcagctaagagtttttagcattttcagtttggttgtaagcctataaataggcattctcattggtgaaatattgtgtgcctttctccaactcagtactctaatattttctacaagttttagttccttatttttctccagattttaacagtggtatcagagcattattcctacgggttgtgaggcaaagtttttgagtgtttttagtattaaacacagtgaggttgagtgcaaacactagtgaggttgagtgatctattttttttttaagcaactgtggtgcaaacatgtctccttctagcaatacttcctctgtaattccagtgtttaatggtgaacactatcacatttgggctgtcaagatgaggttttatttaaggtctcaaggtttgtggaatgttgtgatgtctgaagctgatccaccaccattgggagcaaatcctacagttgctcaaatgaaagcatatgaggaagaaaaactcaagaaagacaaagccatcacctgcctacattcaggacttacagaccacatcttcaccaaaatcatgaacttggaaacacctaaacaggtatgggacaagctccaaggtgaatttgaggtcagtgaaagagtcaaaactgttagactcctcacattgaagagagagtttgagttgatgaagatgaaagacgacgaatctgtcaaagattattctggcaggctaatggatgttgtaaaccaaatgcggcttcttggtgaggcatttacagatcaaaaggtggtagaaaagatcatggtttcagtgcctcaagagtttgaagccaagatttctgcaattgaagagtcttgtgacttgcaaactctcacaattgtagagttaaccagcaagcttcatgcacaggagcaaagggtcttaatgaaaggtgatgaagctactgaaggtgcttttcaagcaaatcacaagggaaagaattctggaaacttgcaaggaaagaagttcttcaagaacaacaaagggaaagctgaagggtcttcaagaaaaaaaaaattccgtcttgctctcattgtagaagaaccaaccatgctgagaaagatttttggcacaaaggtaaacctctctttaattgtaatttctgcaataaacttggccacggtgagaagtattgcagagccaagaaaaaacaatctcaacagcaaccagaacaaaatacaagtgtgactgaagaagacaaaaatgatgatgagcatttatttgtggcatcacaagcactcagttctcatgaactgaatacttggctcattgacagtggttgcacgagtcacatgaccaaatatctgtcaatatttacctccattgatagatcagttcaaccaaaggtcaagttgggaaattgtgaagttgtgcaggccaaaggaaaagggacaattgctatcagcaccaagagaggtacaaaaattgtcactaatgttctttacattccagatttagatcagaatcttcttagtgttgcacaaatgctaagaaatggatatgcagtctctttcaaagaaaatttttgttttatcactgatgtacacggaacagagataacaaaaattaaaatgaatggaaatagcttttatttgaagcttgatttagttaaaggtcatgtctttagtgccaagattgatgagagtgttgtttggcacaaaagatatggtcatttcaacttgaagtcactgaggttcatgcaagaagctggtatggttgaagacatgcctgaaatctcagttaatgctcaaacttgtgaaagttgtgagctagggaagcaacaacgacaaccattccctcaaaatatgtccaagagagctactcacaacctggaattaattcattcagatatttgtggaccaatgagcacagcctcattgagcaacaatgtgtattttgcattatttattgatgatctcagtagaatgacttgggtttattttctaaaaaccaagtcacaagtgttctctgtgttcaaaagcttcaagaaaatggttgaaactcaaagtggccaaaacgttaaggtgctcagaactgataatggaggtgagtatatctcaaacaatgtcttttgtcaagaaactggaactgtacaccagctaacagctccatactcaccacagcaggatggagtctctgagagaaaaaacagaaccgtgatggagatggcaaggtgcatgctattcgagaagaagctacccaaacttctatgggctgaagcagtcaacacctcagtatatttacttaacagactaccaactaagtctgttcagagcaaaacaccaatagaggcatggtctggtgtaaaaccttctatcaagcacctgaaagtttttggctcattttgttatcttcatgtgtcatctgtcaagagagggaagcttgatgaaagagctgagaaaggtgtctttgttgggtatgcagctgaatcaaaaggttacagaattcatagcttgagtagaatgaaaatcgtgataagtagagatgtgcactttgatgaaaactcctactagaattgggacttgaagaaagttcataaatgtgatcaaaccactccatctattcttgaaccagcaatagaaagtacaatcattgaaggtccacttgatgttgaagcaacttcagacacactcatgcttaagatgaggtcattatctgatgtgtatgagaggttcaatcttgtacatgctgagcctacatgttacacggaagctgcaagatttctagaatggattgaggccatgaaagctgaaattgattctattgaaagaaatggaacctggaagttgacagaactacctaaagctaagaatgcaattggtgtaaaatgggttttcagaaccaaatttaattcagatggttcaatcttcaggcacaaggctagattggttgtgaagggttttgctcaagttgctggagtagactatggtgatacatttgcactagtagccagacatgacactataaggctactacttgcacttgctggtcaaatgggatggaaagtgtaccatttagatgtcaagtcagcttttctaaatggtatacttcttaaagaaatttatgttcaacaaccagaaggctttgaggttattggtcatgaatatgaagtgtacaagctacataaggctctctatggtttgaagcaagcaccaagggcctggtatagcagaattgattctcatctgatccaacttggatttaggaggagtgaaaatgaagctactttgtatttgaaacaaaatgatgatggtttgcaactggtagtatcactttatgttgatgacatcctagtgacgggaagcaatgtaaaattgctagctgatttcaaaatggaaatgcaggatgtatttgagatgtctggccttggcatcatgaactacttccttggaatggaaatataccaatgcagctggggtatcttcatttcacaaagaaaatatgctatggatattctcaagaaattcaagctagaatcatgcaaagaagtagcaactccgctggcacaaaatgagaaaatttcaaagaatgtgtagaccctcaattttgtccctttagcacatgtctttaaaattcattttcaatgctccacaatagttccttggtggcccatggttactcataccacttacctttttctgagtcacctcggagattttggttgagggattatttgatcccttattgtgacccttggcagccctaacttagacttaggcttttcttgttttttttaggataacttttagatacacttggcccattaggcactaccctaggcccacttagtctcaccttaggcccgtttaggcacactaggcctacgaagacttttattttattttattttatttatttatttatttattttgtttttaattttaattttatgattatcattcactttttattggttatcttcctctttatattattttccttaacttatttatttatttattatttttaccattttttaatttatttacttatttatctatacatgcaattatttaacttcaaaaatttcatgtttttgcaaggaaacttaccattggagtttaaggaagatgggactctccttggaaggttttggaggggaatttgaaattgggaagattgcttttgattggaggatttaaaaaaagaagagaagaagaaaggaaggaggagaattttcctttttggaaacaaatttaggtcttgaggggtgatatatataggtgagaaaaggaaaagaatggggagatttttttttggggggcagagcacacggaattttggaaaaaagcaagggacttcgaacggagatcgggctgtcatttaatcatcaagagaggattttctctttgacttcaaaggttagttttctatatagtacttttatttagcttaattctttagtttaaataatcatatcgaataaagtttgtatttttaatcccaattagtttgattttaatttgttttttagtttaaatgtattttgttgatcttaattcttgactttaaataatcacgttaaataaagtttatgttttaatctcaattagtttgattccaattcgtttttagtttaaatacattttattgatcttaattcttaagtttaaataatcatatcgaataaagtttgtatttttaatcccaattagtttgattttaacttgttttttaatttaaatgtattttgttgattttaattcttatgtttaaataattgtattgaataaagtttgtattttttaatcccaattagtttgatttcaattcatttttaatctaaatgcattagttgattttaattcttaagtttaaataattgtattgaataaagtttgtatttttaatcccaattagtttgatttcaattcatttttaatttaaatgcattagttgatcttaattctttgttttaaataatcacgttaaataaagtttgtatttttaatcccaattaatttgatttcaattcgttttttagtttaaatgtattttgttgatcttaattctttagtttaaataatcatatcgaataaagtttgtatttttaatcccgattagtttgattttaattcgttttttagtttaaatgtattttgttgattttaattctttactttaaataatcacgttaaataaagtttgtgtttttaatctcaattagtttgatttcaattcgtttttagtttaaatgcattagttgatcttaattcttaagtttaaataattatgttagataaagttcatgtttttaatcccaaaatagtttatttttaatttatttgttagtttaaatatgtatgtgattttaatttattagtttaaataatcatgttagataaagtttatattttttttaattctaaattagttcagttttaacctatcttttagtttaagtatatttgtgattttaattcattagtttaaataatcttgttagataaagttcatatttgaaattccgatttagtttagcttttatttatttttaatttggatgtgtttgtaattgtaatttagtagtttaattaatcttattaaataaagttcatgtttttaattacaatttaatttagttttaatttgttcttcacttgtatgtgtttgtgatttgaatacattagtttaattaatcccgttagataaagtttaatcttgatttaatttatttttttagtctagaggcatttatgtgtttagttaatcttatgttaattatggattgttattctcaatttatgcgcttcttgaatccttgttgctaattcttgatggatatttcattagcttatttgatctaaatattaataatttattgctttgatagtttcctttttgttcaaaggccattggaaaatcatgaagattggcctctaccatcaccattatcatttttgttaattactaaaaaaaaaatttactttgaggtttcatttttgttttgttgggtattttatttcttatattttattttttccaaattaattccttttattttaaaataaaatacttttctcaaaaaaaaatcattttaaaaatctatttcaaaaactcatttagagtcctcaggatcaaaatcttttttttttattatttaaaaataatatgcaaccatatcttgttcggtttgcatccttctcggttttcaacaaaaattttggttttgaacaaaaacacgaatcaaagcttgtggtcccaaataatgggatgattctgagctaaattcgtgtatatcaattggggaattggtgaaacccctacataagaaaatcttttcaaaaattatttttgttgccatttttgtcacttgttgaaattatgtctatcttttttaggaattgtatacaggatgagcgtgataattattgttttcatatactttgataatttttgttatgctaattagataacaagcatgctagggtttctttattttattattatctaatccctcatgtcttatggaagcgcattgtaagttatctatgctatccaggtacgccccccctatcacctacttttctaaattttgtaaacaatcatgtcactgtgaagtatgcatatgtttgataatccttaggtgtttagatgtatgcttgattcactatgattaaatacatgttgtgtgttatacttctatactaactctgatgttttatgatagcgcttgaagagcggttcaggtacgcaccctaactctccgtttttgtgatttgatcttgtttagcatgcaaatcttttgaaatcacctagcctacttaggtatccataattaaccgattaattgccatattccccttaacttaattagtagagacctctttagggcttagaggggtgctacctcctagaggtaccttcccaataagtaacctgatccccggaccaagacttgggttttcaaagacacgcttttccaaaaattatggagtcattttttttagggttttatttcttgttttattttcccttaaaaaataaaaataaaataagtggcgactccaactttttttcaaaaaatcaatttttcacaaaataataaaaagcgagtctcgccgatcgagtgggaacacacgtgaaaaatgcgggtccacagaatgatggtgagaaacttgaggaaccctttgcatatagaagcttggtgggcagcctactatacttgacagtaaccagacctgacttgatgtttccagctagtttgctttcaaggttcttgagttcacctagcaatgttcacatgggagttgcaaagagggtgctaaagtatgttaaaggtacaacaaatcttggcatttggtatttaaagacaagaggagttaagctagatggttatgctgatagtgattgggtaggaagtgttgatgatatgaagagcacttcaagttatgtatttacaatcggttcaggtgtcatatgctggaattcaagaaagcaagaagtagtggcacaatcaaatacagaagctgagtatatctccttagtagctgctgcaaatcaagcaatatggttgagaaaattgcttgctgatttaggccaggaacaaagctcaccaactgagctttactgtgacaataagtcagccatttccattactcaaaatcctgtccaacatggcagaaccaagcacataaatgtaaaattccactccataagggaagctgaaaagaattcacttgttaagctgcattatttctcaactgatgagcaacttgctgacataatgactaaaggacttcctaaatcaaggctggagttcctaaggttgaagcttggtatgtccaaggcaaatctcaaggaggagtgttagaattcatgagagtttgcctttgaaaatgtcttagttagactcagtctctgttttgctccataattttcagtttttctgttagtagaagtagtcatagcagctgagagtttttagcattttcagtttggttgtaagcctataaataggcattctcattggtgaaatattgtgtgcctttctccaactcagtactctaatattttctgcaagttttagttccttatttttctccagattttaacaaaagtcagatcatataagtcatatatatgaaatacaatatatgagatacaatatacataaggacaagactgatctgaaaacttgtgagacaaactccacctacatggagcctcatcaatgcaatccttttgccctttttctatgcatgttttggctactcatcatcacatctaaagcagattctggtgtaagtatctctctcgatttcttctgtcttttggcctcaattcactaaattacaatttgattttggtgtttgtttccagtgggatagtatgagccagaaggactctcacaaagatccagcagactgattaaaccatggaggagacttgtataacagaagatacgccagtactgaaaccgaaatcagccctg

SEQ ID NO: 12127 - DNA, 7767 bp, Vitis vinifera
  Intron number 16 from transcript GSVIVT01008876001 (locus GSVIVG01008876001) derived from phytozome v7.0 (chr-ID chr 18; pos 2980296 to 2988062 reverse strand)
cagcagctcgtgcaaattgaaggtgagcattagaaaagggaaattgcaaatgagttctttagtttgggttcagctacttttatgatttttacctataaaagttttggaccacagcggtggacacttaaactattcgagctacaggaactaaaaaaacttcagaataggagaaaaggagtaaccttttctttaggtgaacattaatcatcttcttaagacgaaagggtaagagattagattagaagaaagagtttttatcaaacaaatcaaacataactatgatagagaaattataccattgacttgttagtagagctgctaattacgagggtttattgggttgttgagctggaatgatcctacttggaagcagtgattaaaaaatcggtgtattatgggaaattttcgctgataaaatcagttatcggccatggctgacacaaaatctaggaaggaaactcagttggtctgagttttaaaatataaagtgttaagagagagagagaagaaaaccttgattctcattcatgtagtgtctacttacaattgagaaaatatatatatacaaggctaggagtcctaactaccatacatgtgacctatatttaaaaaaggaaagattgtacactataaattcattatattcaacactccccctcaaactggagcatatacgtcatatgcaccaagcttgttacaaatgtatttaatcctaggacttctgagagatttagtgaagatgtctgttagttgatcatttgaattaacaaaacttgtagcaacacatcctgatgcgatcttctctctaatgaagtgacagtcaatttcaatatgtttggtcctttcatgaaagattggattggatgcaatatgtaatgcggcctggttatcacagatgagtttcatctgttcatcctttccaaatctcaactctcgaagaagatgtctcaaccatatgagttcacatgttgccaaagccatagctcgatactcagcttcagcactagatctgaccactacatcttgtttcttactcttccaagatattagattacctccaataaaaacacagtaccctgaagtggaacgtctatctgtgggtgagctagcccaatctgcatctgtgtaaccaataacctgagtatgacctctgttctcgtacaacacaccttgacctggtgtacttttgatatatcgaagaatgcggataacgacatcccaatggctatcacatggtgactgtaggaattgactaactacactcacaggaaaaaaaatgtctggacgagtaatggtgagatagttcaatttacctacgagccgtcaatatctcccagggcctcctaaaggctccccctgtcctggtacaagtttgcattcggatccataggtgtgtctatcggtttacagtctaacataccagtttcttccaggatgtctaaagcatacttcctttgggaaaggaccacaccagaactggattgagctatctcaattcccaagaaatacttgagtttccccaagtctttggtctgaaagtgggtaaaaagatgttgctttagtttctgaatactattctgatcactgcctgtaatgacgatgttgtccacataaacaatcatataaatacactgccctaaggagttatgatgatagaaaactgaatggtctgctgtactgcgaagcatgccaaactcttgaacaacagaactaaaacggccaaaccatgctcgaggagattgtttcaagccatatagagaatggcgtaacctgcacactaaaccagactccccctgagcaacaaaaccaggaggttgctccatataaacttcctcggcaagatcaccatgaaggaagacatttttaatatccaactgataaagaggccaagaacacatagcagccatggagagaagcaagcggacagaagcaatcttggcaacaggggagaatgtgtcaccataatcagaaccataaacttgagtagagcctttagcaactaagcgggccttaaggcgatcaacctgacgatcaggaccaaccttaattgcatagacccaacgacagccaattgtagatttaccagagggtaaaacaacaagatctctcacttggctctgataccatgttaagagagagaaagtagaaaaccttgattctcattcatgtagtgtctacttacaattgataaaatatatatatacaaggctaggagtcctaaataccatacatgtgacctatgttaaaaaaaggaaagattgtacactataaattcattatattcaacataaagaaaggaagcactagggcctaaaaccaacttctcaacatggataatcatggcagtgaacatcagggcaagcttacccttgtgaacagtaggtgcacataaaatatatgtgctaattttgtctcttcaactatatatatgtatgtaagtatgaaaaaatgaaatataaaataaaattttagcaaataaattaattctaattatccgatttttaaatttcatgtaattgattgttgataatataaaaacatcacaaccatgataatctttttaacaagtttttttatatcttttgtatagatataaacttataaataagttataaacagttttaaatatcgtttcttttatatccaatatgtctaaattagatagatcatcattttaattgtaaatatgtttgcaagttgtgtatattttgttgttgaatatcataaattttttgatacatttataattttcttcgataaaacaactttaataaatgtattattacttatttgattatttcttgggtgtgtttttttcaatatttctatgagtttttgattaatttctatttcatcgataatttttaacaaaattttcgattgttatttccaatatttttataaaatgtaatcattgatatttatgtaatttccaatattttaatccttacttggaagatattgacaaatttaactttggtatttttttttttgcaataaaaaacaacatagtcattgcattgaaatggtaaatataaagaaggatgagtaatccttccaaaatatacaattgttgatgaagaagtaggagtatggtgctcaaaagaatttcattatttaaactataggcagaaaaaacagtgcatgcatactaaaacctctctctatgcatagggaggaaaaacgtctcaaacaaaagaaactactcattttgctcttggcttggctaactggttcacaacttgattgactaagcaaggaacccaagagaaagagcgtcctacctcactaacaatatatgtaattttgcaaagtctactctcaaacttccatgagcctctcttcttattacatgcctagcaagtaacaacaatagagtatctctttacactcagttggagagaaacaaaacttttgcttgcaacaagcctttccataagactagtatctccacatcaataactaaaccaactccaacaactatgccttcaacatttcccataattatttaggtggataattaaagtcaaggaagcttacaacttggtggttaatactgtggctaacaactttccgaaaagtaacatttgggtggataaagttccaactaaaattttgttttttgcttgggaggccacttggggtaggtgcttacgctagataggcttcagaaaagagggtggcaactcccaaaccgttgtttcttgtgtggctacgaagaggaaactgtaaatcacatcctcatacactgtatagtggcaaaagtcctatgggatatgatctttgctttgtttggtgttcagtgggtccttccagaaactgtaaaggaggtcttattgagctggaggggcccttttgtaggggaaaaaaggaaaaagatatggaagtctataccgttgtacattttttggattctttggaaggaaagaaataggctagcttttagggggggctgatagcaattcagaaattaaaaaattcttttgtttgtaatttatggtgttgggcgagattgtatagtggagagagttcgctgtctcttataggcttcttggagtgggtagcctctagataagggctagtggggtttttttgctttccttttggttgtgaggcttagctagtttgtatactccttgtatactttttggctttttggcctttcttcaatatattcagcgcttatctatcaaaagagaaaaaacatttcccataattataaaaagtgggtctttttagaagaggcgtcgtggaggcagaagtctagagaaatttggttgaaggaggggaatagaaatacaaggttctttcgtcaaatggttgatgctcatagaaggaggaatcagttgactaaagtaaaagtcaatgggaggtggttcactgaggacagtgaaattaaagaggaagtaagtagagctttccagggtctgttgtcaaatcctggaggatggaaaccttatatagatgggttgatttttgagaggtcggaaggattagatgtggaagggttggagaagcgttttacggaggaggaggtatttggtgcgttgtcaagtttctgtagggagaaagtgctaggccctgacggtttcccaatggctttctggtagtattcttgggactttgtaaaggtagaggtgatgaacttctttagagagttccatgattctgggtgctttgtaaggagtctgaatgcaatctttctagtgctgatccctaagaaagggggacggaggacttgaaggattttaggccaattagcttggtgggagggctggacaaatggttaaccaagatgctagctaataagttgaaggggtgttagctaaggtgatctcaacgtctcaaaatgtgtttgtggaaagatgacagattatggatgcagtgcttattgctaatgaagcaatagactcgattttgaaaagcaatagaggggcgattctttgcaaattggacattgagaaagcctatgatcatgtggagtggtattttcttttggcagtgttggagaagatggggtttgggaaaaagtggcgtagttgaataaagtgttgtttatccactgctagattctctattttggtgaatggaacccctactgaattttttcagatctcaaggggttaaggcaaggagatcccatttcgccttatttgttcgcaattgtgatggaggctttcagttgtctgttgaagagagcagtttttggaggctttttattgccttgctcgattcggggaagagggggtgaagaggtgaaagggtccaggtctctcacttgttgtttgctggctgttaatgttgtttgaggcaatttcggggttaagagtgaatctggataaaagtgagttgatttcggtgggtagggtagagaatgtgagagagctagctgaagagttcggttataaggtgggaagactgccttccacttaggaatgtcgttgggtgctccttttaaatctgcagctgcttgggatggaattgaagaaagaccccggaagagattggctatgtggaaacgtcaatacatttttaagggggggaggaccgccttaattcgtagtactttgtataatctgccgatctatttgatgtctgttttccaatttcctagggcaattagaatgagattggagtatattcaaagggattttttgtggagtggtgggactcttgaacaaaaacctcacttagtaaggtggtcgatcatttttttagataaaagaaaaggaaggttgggggttaagagtcttgggacattcaatagggctctccttggcaagtggagttggcactttgcaaatgaaagaaaggccctttggaacctagtgattagaaggaaataggagggtggagctcttgtgaggcttatggagttgggttgtggaaagcaattagaaagctggggcacctagtgaccccttcttttgactttgtggtgagtgatggaaggaatgtgagattttggaaagacaattggtgtggaaccactcttttgtgcgagtccttcccttgtttatttgctctagcaacttttaaagaggtctgaataaatgaagtttgaacagctgcagggaaaaggtggggaagttagagccttggtttcactaagattttcaatgattgggagatggaagaggtggaaaagttgttttgttgcttagatgggaaggatgttaatgtgggtgaggtggatggactcgaaggatgacatgttttcaataaagtctttgtattgagccttgcagtcggtttctcttgtttctttccttttgaagattatttggaacttttgtgtgcaacctaaattaagtttctttgcctgggaggtttcgtggagaaaagttctaactttggactatttgcaaaagaggggttgggcattggctaatagatgctttctatgccaattgtttgaggagtcgattgatcacctccttctccattgtgaagaaacaagggaagtgtggatgttgctcctttatttgtttggagtgtcttgggtgtttccctcttcggtaaaggaaaccttcttagggtggaggggttcttttgtgggtaaaaagaggaaggcaatgtggcaagtgggaccattatgtttgttttgggtcatttggaaggcaaggaataaaattgcctttgaagattgtgtactgtccatccaaaggttgaaagcttcttttgtgtatttactgtggtcggagaccaaattgtggataaaaggtggcccttcgaccttaatagattttataaaatgggtgggttcgcgatgagggagaagattttttgtttccttgttgtttttgggttccgctgtaagggggtgagtgtctttatactgtacttctttgggtcactattttagcgcctcttcgtaatacaattcttttgcttatttatcaaaaaaaaaaaaaaacatttcccataattatatctaagcaaacctcctatacctaattttctaggattatccagaggatactttcaccaaaggagttaaatcagtcaagcatagtcttcatacctgccacaattgttaaaggtagtggtgcaaaacaactcgagaaaagaaaagttggataagatgggaagtggcttatccaaacatttggatgtgagttcttttagcatgtcaagacagtaaacaatttgcaggaaactttgtttctcttgtactttgcccctaccactctgaaatagatatttgttattatgtttctttactagtttggatttatttatttcaataatttgtcaatcctgtggtgatgtaggaaattcttcaaatatagtttgtgtccaaatggggttgactgatgatctggccatgaggggggatgctatattcaaagagtttacaggggttttttgaggccttttgagtcagggaccggtggttgttttatttgaatggaggtttcttgtattttatttttttttacttttccattgtctccatctttctttctagtctttttattattattctgataaaatttacattccctacaattaaagcccacattcatcccagagttaggtttggccttagtttaaacagttagaaaaccttagtttcaggcttaaaaagtaaaatggtcttcccatggaatagaaaatggttttacatgcaccaaagctggaatgaacctacataaggttttctgattatgaaagttttcatatttatcaacttgcttattgaaatgtcccataaatggtgctctcctcaatttttctgttttggttgctatcatctgcagattt

SEQ ID NO: 12128 - DNA, 16301 bp, Vitis vinifera
  Intron number 2 from transcript GSVIVT01019196001 (locus G SVIVG01019196001) derived from phytozome v7.0 (chr-ID chr1 5; pos 3693996 to 3710296 reverse strand)
ctgtgtagagtgcatcaaatccggtcaaaaacagggtgacatgtgctaatcgtccctaaagtagcctatgcacgcggccaggacttgtgcccaagaggagacattaaactcggttgcacccatgcacgcgtggcgtcgtcattcttcacgctccctgaactggcagtaccttctggacgtcgccaggccgccaccacctgctccggctacgcgcgcgcctgcgccagccaccgtggcggcagcaccttttgaacgtcaccagaccgccgccacggctcccttcttccccgcgccgccgctgctcctcttttccccgcactgccatggctctcctcttcatcgtgccgccggtggagtcttcgcgggtggagaggcaaatggtgaagagaagggttgttttgcccatgatggttttgggcttgggtttgaacttggagcccaggcccaagcctatgaagagaagcccaagtttatgaaggctttaattgccttgggcttgcccattgatatcttattggactgggcttgatgatggggcttattagtgggtttaggcttatgggcttgggcttgatggatgcatattatcatttattattattattattaattattatcattattactattattattattattattattattattattattaattattattatcattgttattattattattattattattattattattatcattgttattatcattgttattaattattattattattattattattattattattgttattattgttattattattgttatcattgttactattattactattgttattatcattattcttgattattattattattattattatcattatcattattattattaattcaactctcaaaatcttattattattattattattaactcaattttcaaaatctatttattcttattattattaccattaatccaaactttcaaaatcctattattattattactaacccaactttcaaaaatctcattactattattattattaacccaactttcaaaatctcattattatcattattattaattcacactttcaacatctatttattattattattatcatcattaatccaaactttcaaaaatctcattattattattattattacctcaactttcaaaatctatttattattattattattatcattaatccaaactttcaaagtcctattattattattattaacccaactttcaaaaatctcattactattattattattaacccaactttcaaaatctcattattatcattattattaattcacactttcaacatctatttattattattattattattattatcattattccaaactttcaaagtcctattattattattattaacccaactttcaaaaatctcattactattattatgattaacccaactttcaaaatctcattattattattattattaattcacactttcaaaatattattattattattattattatcattaattcagactttcgaaatcttattattattattattattaattcaaactctcaagaccttattactatcattattataaattcaactttcaaaagtctatggtctcgcagttcaatttcctaaagtccgtttctcattttctttaacaaatttcaatttaatcaccggagctctaatcttcaaaatttaatttcaaatactccaattttcaaataagctccaataatccagttttcactcgaatagtttttaatcacatttcagttcctaaataatcttttgatcttcttgattttatataagcaatagtgattccttcatagttctaaaacatgggatttgtgagattaactcatgaacaataaatcgggctttgttgggggccctatgtttgaccccttttgatagtcaattatcatgcttactgtattttgcttgagcttcgttttgcactccgatatgtatgagctatgttttgtattcattaattgtgcactaatcccgtttcttgatagcgcattgtggctcgtggccgaggtacgcatccactccctttctagtcaatctctattgcgtgttttgattctcatattgtgcatgatttaggtgaatatccattgactttctcgttgattgccacgtcagtttcattgtattagtagagacctgactttagggatttagaggggtgttatggtttataccgtaccttcccaataagtaacctgacccccgagcccgatccggtttttcatagaccaccttttccaaaataaggagtcacgcttagggttttctttcttattttttttacccttttaaaaataaaacaaaaataagtgacggctccaagtcattttcttaatcaatcaaatcatttttcaaattaaaatcgagctcgccatcgagtgggaaacgcatgagccgaaatgcggggtccacaatttcatatttttccaagggtatttatttttatacatttaaaaataggaggtgataaaaaatataccaactcaagctattcaacaaatttgaaattaaaaaaaaaaaaaacattcaaatactaattgtaagtatctaaaaccatctaacccatactcttctttcttcatactttagttatcactttttattactttttccctcattctattcattaataatctcattttattatttaaagttttctacttttcaatataataataataattgattaattaaaaaaaatataaagctttaaaaataattttttgtctttaaaaataaaaaactaatttttaaaaatttctaactaattgtttattgttatttgtaaacaatttttaaaaataaaatgaaatagaaaacaatttttagagaataagttgaagttattttcactagtttttcaaataaatttaagaggacatgacaacatggatttaaattttttctaaaatattaaatttaaaaataaggtacaaaaaaattcccttcaccttcattttccttttccttaaggtggtcaatttgagtgaagtgaagtgaagtgaagtagtcaatttgagtgattttaccatcaatcttggtgaaacggtgtttcttgtgaataaagggtgaatttgcttgcattcaaaaatacccatttgaaatcccctgaattgggtgttgatctgagcttcattcataagctacgtacttgtattttctcagaaaatgttttctttgttgcttgtgtaagaagatttagaagtctttggctatgtttggtcccgaaaaatttgaggaaaaatgtgaggaaaagaaaatagagaggaaaaatggaagaaaagaaaaaataaaggaaaataaaaaatagattcaaaattaataatttatttttatatgttttttcaaactcatttcacttaatttactctattatataaagattaaataattttaaaatatataaatttctaactaattttaatttgaaatcaaatatgagaaaaccatttttctttacattttttttctttccttagtacttttcaagaaccaaacataacctttagcttcaatgaatactaaatgcattttatattatgtggagaacatgcccatttctatctatttgaatattatatatatatatatataaatattcctcatgaaaatgataaaaattaattgaataacctcaatttaatatacctaaaggggccttatggcctaaataaatttagccagtaggatttgacatattttttattttttatgcttttagaaaaatactttagctattatatgatcaattgggaaataaaaaaaaagagagagagagaaaagaacaagtaacaaaaaaaaatgtacaaaataacacagaaaattgcaaaagagtaaggaaagcttggactaaatgatggagggaagtaggggcttgagctcatgtagacccactacaattcaatgctatagggatacagataatgagaaataattgggagaggaaagggacgatctaaccaccaatatctaaacttattttaggaggcaaagaaaagtcattcaagattctgatttttcttttttgtttcttttcaaattttgttataattttggagtttatttgatagtattattaaataaaattttaaaataaataaataaataaatattttattttcatcttctaccataattctttcatggtataaaagtaattttaatactttcgtagttccaaaaatttttaagttatgaggttaataatattatttatattcacaaattttttatatttatttaataaaatattaaaaaatatttgttaaatccaaattaaaaggctaaattgaagaagaaaacaagaaactcctcttttgaatattctatcttctagtctagttaatgaggattattaactcaaatggagatatttaaattcataaatgataaatgagggaattaccattacattattattgtgaatttaatttaatatacgaaggataatgataaatataaatattaaaataaggaaagggaataaaatatgtatattcatatatcttcttgaatttaatttatagtgttatcctttcttccctatctttagaatgtttattttaaataataattaattttgtataaattttataaatgtcgaattcataaatccctttaatgatagtagttttaaataatttataggtcaaaagagttaaatcaaatattactttgagagacttcaatattctaattaatcaagagttttgaatttcatagtagtgataaaagaattttatatttaatattgttctcataatgatagtaaaaagatgaatattacaaggacaataattttttttttaaacttacaaaatttataataaatattttttaaacaccttaaaaaatattattattcttttttatccaatatatatatagctttaaggttataaacaattatttgaatattttctctattttatggacaatacatagatattgtcttaatatattattttgtaacatgatcatcttttaactaatggtgataattaatttttaattgaataatgttattataacttaataatttgaaaaatattcggatacccttttaaatctaaaatagatgtggacttgacatgatttaaattattaaagcacgatgtcattaagtcaagcaaatgtatcatattaagagatgtttatgtaattatatcataattttttttttcctcgtacatgatatcttttgtattaagttttttagatgaaaaataacaaaatcttttgttatgtaaagaggtataacaacacattaaaatctaaaagagaatataatgaaacacaaattagatgaaaattaccttaaatagggatataatagaaaacatgtaaatgcaagaaaaaacaagtttagataaaatttaaaataaaaaatcaaaaaaaataaattaaaagtaataatataaaaatcatagaatcttccaaactataattacaaaaaaaaaaaaatattttaaattaacttgataatttaaataatgattttttttaaaaaaaattacaaatgttacaaagataattttttatcatttttaattctatttaaatataattttttttaatctctgctgacattatgtttataaaggtaaaatagtaaaaatatatatttcattcggtttacttgtaataaacactttaaatgtgattaattttaattttatttcctatgttttaattttggtagaaaagatctacatgatagagtttggtaaaaaatattgataatttttcttcaacagttattatatgttgtttatattgtcttttaagtcatttgaaacaatgacactaatgtgttatccatttatattaatttgatttcacaaaaaaaaaggtaatacctaaatattatggttaattttcctttatataagatgtaatgtagtaagaaaaaatattgtttataaatatgattttttatcctttttaattctatttaaatatgatttttttaatctctgttgacattatgtttataaaggtaaaatagtaaaaatatatatttcattcggtttacttataataaacactttaaatgtgattaactttaattttatttcatatgttttaattttggtagggaagatctaaatgacatagtttggtaaaaaatattgataatttttcttcaacgattattatatgttgtttatattgtcttaagtcatttgaaacaatgacactaatgtgttatccatttatattaatttgatttcacaaaaaaaggtaatacctaaatattatggttaattttcctttatataagatgtaatgtagtaagaaaaaaatattgttaaaactacttaaatgaaatatgcaattacaaattttggatgataaaattaaaaaaaaatttatgtgaatgaatgtatgggggaaaagtgttcaatccttaggtgacaagaaaaaaaaaagttcagaattgattgaaatcttgcaaaaagggtagccttgtacacccttgtataattagtacatttgcctcgtacagttagtacatttgcctcgtacagttagtatatttgccttgtacagtgagtgtaacactcttatatagttagtataacactcttatacaatagtgcaaatttcatatacgatttgtaggtgacaaataaaataaagaaatgattcaaaattgattaaaatctttcacaaatggtagccttgtacacccttgtacacttagtacatttcccttgtacaattagtgtaagatcattgtacaatggtgcaatatatccctcttaagttgtgtgtccacgtaggtatattaaccttatttctaatggtttgactaacaaaatggtggatgaattaggataaaaatttttttcccaaacattattactaaggaaagtatcggaatttccatgtggaagttaaataaattgcatgacatggctatgcaatctatgggtgacaagaaaaatgaaaaaatgattcaaaattggttaaaatctttcttagatggtagccttgtacacccttgtacacttagtacatttcccttgtataatttgcgtaataccattatacaatggtgcaatatatttctcctaattcatgtgtccacgtaggtgtgttaaccatatttctaatggtttaactgagaaaatggtgaatgaattaaggttaatttcttttccccaaacatcattaccgaggaaagtatcagaattttcatgtgagagttaaataaagtgcatgacatgagtatgcaatttgtgggtgacaaggaaaataaaggagtgattcaaaataaattgaaatcttttataaatggtaatcttatatactgcttgtacacttagtacatttcccttgtacagttagtaaatacctcgtatagtgatacaaattttatattcccatagtgcatgtatgcctatatgtctattaaacatgattctagtagtttgattaaaaaaatgacgaaaaacttaaatccaatttttttatgaacatattacatttttgtgaaaaaaatatacaattgaccaatttctttatttaattgtgaacatattatattttaaaaataaaaaaagaataatcaataaatgaaatttaattctttttattaaataaggttttcaattttcatttttaaaaatagttttcatttttttaattaaatgtattttcaaaaagagacaatatagaaaataaaaattattttttaaaaaaaaaaactagaaaaaatattttaaaaccaaactcaaacataatttatataatttttaactacttgttttcatttaaaatgagtaaatatatcatttaaccattttatatgagaaaaattcaatacctactgtactatgtattgatataatccatttctaaatacgaaaacattttagttggatatttaaaataaaaactcttcatctattctctttctctctttttcttttttcttatttcaataatttttcaattaattcaaatcattaaaaaaattccttaataaacaaatttggaacattcatataacttattaccaaaagtctatgttcaaaaaattattaaaatatgaaaggaaaaagattataaaaaaaaactttaaactttttattttataatagtaaaaaaaataagctttaaaatactttttagtataaaagaaaaaaaatagtaaatatatttattttaaatcttgttttttaatcattaaattatttacttctaaaatgtaaaaaataatttttattcatttaaattaatatttttttagaaagtattttccaaaataaattttggatcattaatgtaattttgtttatttataatttaaaaatagaaaataatactgatttttcagttatttttaaaagagtttaaaaaataatgaaaaataaaaaaatgattaaataaaggagaattttatggatggggcatgtaaaaagtggtggtataaagacaaaaataatggatgtaagtcaaaaggacatttttatttattccaaccttatatccttataattaattatgaatatttgaaggaccttttattaattatcaagcataagcaagtataaaacacaattcccctaaaacacaattccctttgaattttgcattgggtgggaacttctttctatttttttgaaagccgcccacctccccacgttactttttgactcaagagcctccccaatccttaagtattgactataaaatttaaacattgaaatgtaaaattataaaataaaaatttgggattccgtgtccagaatggggaatttgttctctttatgggggttcttccatccctaccttgtccaatcttacatttacctgatttccttcatattccttgtatttcacaactcaaaccatgtcaagtcttaactgtaatcaaatatactctaagaagatcctctaattaaaacacagaaaccggttttttaaagatttggtctaagtgtatgttgataatatatttaattttttttggaaagtattttaaaaaataattatataaatatgaaaaaaaaaaactgaaaatataaaaattatttttaagaaaaatataaaaatagattaagagtattttaagttctcaaatatattttttatctaaaaaatattagaaaattgtttttaaaaactattctaaaaattgttgtttgagacctagttttgaaaacaatccttaatagacctttagttgcacattctgatttctatgtgatttgtatgatatagtaagttattataaataataacacttttattgcttataatttatatgaaaataaacgatatattttttatgagaagggggtgcactgaagtgattctttatacgtaattacaaatgaggcctctgagcacataaaccaataatggtgggtgagctttcagtattgggaggcaaagtttgcttttttcacgtgaggtctgtgaaaagtgattgaggttttgcagactcttagggtactcaaagaccctcttcagggacattggtagtgactctgtgcaagtcgatcctcaactctcttgtagcctcccagttcccacaaaccctgtcccaaaatggcttcctcaagcacccaaaaaccctcttcttcttcagctccaaccccaaaatgtaacttcgatgttttcttgagttttagaggggaagacacccgctacaattttacggatcatctattcgtaaatttggattggatgggtattggcacttttagagatgataagcttgaaagaggagaagaaatcgcacaagaacttttgggaactattgaaggatcaagattttccataattgttttctcagaaaagtatgctcattccaaatggtgtttggatgagtttgcaaagatcatggagtgcagaaaagaaatggatcaaatagtcttgccagttttctaccatgtggaaccttctgatgtgcggaaaaaaacagagagtttcgaagatgcatttgccgttcatgaaaaaaatgtagacaaggagacggtacaaaggtggagggctgccatgactgaagcaggcaatctaggaggttggcatgtgaaggatgggtaatttcaacttcctttgaactttgatttttgttataattaagtatttggattttgattgagttcttaattaattcgcttcttgtaactattgatttgaagttttgcgaagaggagttaaaaagaaagttttagaaacccagactgttaaaagggagctcacaaggagtataagattagtattaaataaaaactatcggatcatgttgatatatatgtatatatattcatgttgagatatattcatgcaaataatataccatatcttgcttccatcatgatccatgtggttgtgtgttgttgggaagcttgtgaaaattgtaactcaatgtccaaattaataccaaatttctaggagggtggccatgaccggagcaagctctctaagtggttggcatgtgctcgaggattatgagtaatttcaacttcctttagacttctgattttatatatatatcatgttgcttttatcatgaaggttgtggttatgtgttgttgggaagcttttaaaaatatgaactcactgccttagggtccaaattagttccaaatcttttgaagggatgtccttataatagctaacattgcttgatacaaattccaaaccatgtatttagaatgattatatatgctccttatatgcaatattttggctcacaagggatgttccatggttactatactcgctataaaaattttcatacaattccctatgccaatctagcgtcccatctcctcttctcttgtgttaagcctctctctcttttccttgaattttatagacaaatttttgagaagttgtctacaaccaattttgtttagttaaattcatctttttttcccttcaaatatttaagttgtttatttcttattggtgtctcaatgatgccaagtgttaaattgtttgtcttcatttatgtttaaatgctaaatgttgtttttgcatgtcaaaaacatctacaaaattaactataaatttattcctattttaatttaaaaactaatcatttggaaaaaaaaaaggacgaattcaacatatttggaaacatctcaaaacaaaagaatttattaccataataaaaattatatattagaaattatgtaattagttaaaaaattgataattggataataattatgatttctaattatgtttaattgttaagaaaatattagaaatttttttggcttgcacttgaaatatatgttttattattgagatgaattcattagtgcttaaattttaatctaaggagtatcaaatcctagctttttattatttgaagttaattgaaattattgattctaatagatatttagataagtgtagattatgttttgggattctaattaaattttttcattagaattgatggtagcttattttagtttcctaaattaatttttaatcaaaattttatgattttaccatatttattttcattcctaaactaggaatccatggaaatttatagaagttaattccattaagaattggaagatttatgagtaaaaaatagtggctatatgtggtaaaatttcagttttaattttagaattttgtgtgtttatttatttttattaatttcttatcaaaattatgtgatttttatgttggagttttatttttgagtaacaattcattaaaataatacatttaaattaattataagaaataaaagaaataaatgaatttaatattattttatataagaaatttgatttaataatcatagtaaagttaaagtttgtaaataaaaaagagaggaaaaacaacttttttccataaaaataaaaaaatttcacttttttcatcgatagtaaattgtcttaaaaaataatgagataaaaagtaaacagtggtaaaaaatattttcccatttttagaaaagacatttttagaactattttcttaatattaaattggtttcctaacttagctgagttaggtagcatatattaaagtatgcttcttttgttcattaatattgtgttttttttttctaatacttcttgaaaccaatgaattgattattaaaaataattctaaaaaatttcccttgtttggaataatctagagtgaatcatgagtaaggtggtgtttgtttttttcattgaataaaaaaaaaataaataaaaatatttaactttttttatctagctaaaacataactaaattaaacttattgacaataagtttactttagagcatgtttggtagtgattttaggaagtgtttataactcttttgatacttgaaaactaaaagtttttaaatgctaaaaaggttagaaacgcttccttaaattactaccaaatgaactcttaattatattggttaatgtcaataggttatttttaacttaatagaaaaagttaaatattttggttttttctattcaaccaaaaaaacaaacattatctaacttatttttaaaataaataagataaaataaactaacaatgcactggattggaatttcttaaggagaattatccaaaaaggtcacctacaaacaaaaagtctcattaagggtcgtcaagtttataaattttcctcaagtctataagtcatgcattgaaaatttgaccatcttgtaattctaatgatgcctattgtcttttactcttattcatcaagtttatatgaaggctaattgtatcattattattattattgaaacttccatcagtgtttccattttgagcaaagacacttctagtactgttttttaaaagtaaattggttttctaacttagcaggtaggtaccatataccaaaatatgcatcttcttttcattggtattgttttaaaataaataaataaataaaaaatattcaactattcccgaaactccccctctttcccaaaaataccttcttgtaatcatttttcaatcttattctcaatctttatgaagaaataaaacttgtaaataaaaaaaaaaatggtagcttgtcaccatacaaaatggtagttgtctctaacaatgccataagaccatagtttcttatcataagagggttataataacaggtggagccagtattggaccggaggcttatgccctccctcaaaatctatactctggtatgaagcctctcatccatcctaaagatattgactatggtaagaattgattttctttaaaaaaaattattttgcttattatcaactcaatagttaatctttaattgtttgaatagataaaaacacaaactaattttcaatggttttaaaaaaattatataccaaattttgcaagtaaagtacttttaatttaaattacacaaaaaaaattaaaaaattaatctacctttatttagttaactttttattaaaattatcataaatttcttttaattcacttatatttcaaataaaatttattataatatatattttgaaacttttttgataattttatttaaaaaaattgtttcaattgtaagattattgaaagttacttttcttatgtttttctttatcaaattttatagaatattaaaaaaattttgaaaattttctaatatttcatttattcaaaatttttgtctaatcatgcatttaatttattaagttagatttgcttaaaattttattataatatttacttatattatgtgattttagttaaccctatcaataacaaggtctacaagccttttaaaataaaaaattatgttaacatttatttaatttaaaaatttttaattaaaatgttgtcccctaaactaaatttctggctccaccactagttataatagtatcctacacaggttaacttcctaataaaccttccaagccatagagtagcatcagccaacacaaataatattttattctatttctctactctattctttggcatgtacacttgatataacattgacaaaattgtacataaatatctaatttagttcatgtggtttgatccattttagtttacattctatatgccttaattcagttatattaacaaaatcaagtaaacatcactaaatttactttatgtttgttatattttgcaacttaataactcatcaagtgttttattgtactttaaaattggtaggtatgagtcaaagtatattgaggaaatttttgaagtcatccgtaaaagattgggtcttaagcaattgcatgttggcgatgatatagttgggatggattctcgcttagaagaactaaaatcattgataaatagttagttacatgacatttgtgtggttgggatctatggaacaggtggaattggtaaaactaccattgccaagtttgtttataatgagatttaatgtgaattcaatggtgctagctttcttgaaaatgtcaaaaagagtttcaaaaagggttgtcaacttcaactacaacaataacttcttcatgatatagtggggcaaaaaatagagttgagtaatatcgatgatggaatcaatataataaagaatagacttggctcaaaaaaggttcttattgttattgatgatgtggatcgtagggagcaactagagtcattagttggaagtaggaattggtttggtgcaggaactacaattattataacaaccagagaccaacagttgctacgttattatggagcggatgtaacatatgaggtgaagaagttagatgatgcggaagctattcaactcttcaacaagcatgcctttgaacaaaattctcctaacaaagattatgtaaccctctcaaattgcatggcagcttatgcttagggcctccctttagcccttaaatttttgggtggttctcttcgtggcatgacaatagatgaatggaaaagtgcattggataaactgaaaaacaatcctaagaaggagattaatgatgtgcttagaataagctatgatatgcttgatggttcggaaaagaaggttttccttgacattgcatgtttttttgaaggggaagacaaagcttttgtgtcaaaaatattggatggctgcaatttatatgcaacatacaacataagagttctttttgataaatgtctaataactatttcatacaatatgatacaaatgcataacttgatacaacaaatgggtcgtgaaaaatatcctgaagacccaagcaaatggagtaggttgtgggacccaaatgatatttatgatgcattttatgggaaaaggtaagaattaaatgcacggacttagttatttaaatattaatgatgcattttttaatggttacttatataattttagttggggtttttaccttttaatttttttcttaatcttcattcttgtttttcaagggatgaaaaatattgaaaccatatctctagacttgtctaaatttaaaaaaatgtaattcgctctagaagcgtttgccaagatgaagagagtgttttccaagatgaaaaaacttgggttgctgaaagtctattacaatgatcatcatagtatgctgaggaaggagaataaactgtgtcttcctaaagactttaaatttccttcaaatttaagatatcttcaatgggaaggtttggagtctttacctttgaattttcatggagagaatcttattgcaatcaatttgaagtctagcaacataaaagaactttgggaaagggataacgtataatcattattcaattttttttcttttttatactaattttctagttaatggaagttttttaatggaaaaaaatatctttagtcacagtaccttgcagaattaaagttccttgatctgagtgactcacaacaactcatgaaaataccaaaattctcaagcatgccaaaattggagacactgaatcttaaagtttaatgtacaagttttagcaatcttcatttatctgttggcacatttcatgagatgaaatttttgaggaagattaattttagggggactggaatcaaagaactaccaagcaacattggatatttggaatgtcttgaatttcttgacatctcaaattgattgaactttgagaaatttccagagatccaagggaatatgaaatgcttaaagggactttatttagacaacactgctattaaggaactcctaggctcttcaaactctttctgtcgatggttgctcaaatcttgagaagtttcctgagatccaaaagaaaatgaggaatctacaggatcttttgcggggcgtacttctataaaagaactactgtgctcaataggtcatctcatcggactt

SEQ ID NO: 12129 - DNA, 14388 bp, Vitis vinifera
  Intron number 1 from transcript GSVIVT01019145001 (locus G SVIVG01019145001) derived from phytozome v7.0 (chr-ID chr4 ; pos 16187055 to 16201442)
gccttggtgagttgctttttttatttgtttaatgagaaaaatgcatgaaagggaagaggagaagtgaaattgtttttctgacttatttgctgggaaaatattggaacgggaaaatgctctccttttattggttatcctgttgggttgctcaggaaaagtcggaaaagggaagataaggaaatcttatttaatttttttttttataggtaaagcaattgtattaaaagcgctttaagtatacacgatgaatacaaggctaaaaatggttcttgggtctctgtagaaaaatggtttgtttactgtgacggaaaaaaatggttcttgggagggaaatattgttccttttttttttttttttttgcttttactgaatttctaacatttcattggcaaacatagggaatttatttttgaattggatgtattggcttgatgttttaagagaagaaatctatgttcaattttacccaagctgcgtatgaacttaggaagctaaaaagatgctaagaaggcagtttatgaagctaaatttaaggtgcatgatcacttgtatcctaatttaggtataagggagaagaaagatgtttacaatattattaagacattttacggaaaaaaaaaagggattataccatattgtgtcaggagaaggtgcttattagattcttttaattaaggaggatgagattaggaagggtgggggggttgttgttgtagaacattcaatgaagaccatgtaatgaattcaagtcttgagtacttagcaactccacggagggaattatggattgcttctggaaagttataatatttgatagaaaataagataatgattgaatgagcaacagttgaatctgacagagtacctccactagatgtgtatgagtgaattgtgtgtggtttagtcaattaatttgcttgacaatatttgaggactaagaatatagtaatattgtaatagaagtgatgctcaaagcttcgcctactaccatgatatcaaattcaagagtcatatggtgaaactttgggattcagaaatgaaatggtaatagaaaatcagtctacccccttggcagggaggttgattatgacctatcatttatgttataggggggtatgggtgtcgagtgtaggtccatgtctagatctcggattctttgcatcccaaaatctttgggcacgatgattcaactgaaaaggatcttaactattggtgcagttacttggatataacattaattaaaaataaattaacactaaatataagtacattgataagtacaagtcatctataattttgtggggctaccagttgatggttttgaggaggaaatcttggtgtttttaagaaggttggagctttgtaagaaagggaaggctgtgaggcaagggttaaaaaaaggtctcttagctggctccaagttagggagggaacttcaaaagcttgaatgctttgttaaatgtaagtctgatttgattaatgggaggagaaggggaaaaagtatttgggaatgagccaaagtatgtcagtgaagctatgcattctattgtgggatgttagaggaattaatgagagagataagtgtagagtcattaagtcactgactctcatgcatttgaaaaatcttgtttgccttaaagaaacaaaggtaaaccagatgtcagtttccttggtgaggagcttgtgtgggggtaggtgcctataatggggggcaatggattctagggatcaagtagggggggtttttggttttctgggataacagggtgctacaactcattgagatggaggttagggccttttttgtttcatgttggttcaaaaataatgaggataactatgtttggatgtgaagcttttaaaggtgaacctcatcaagtttttcctgctccatttgttcattctcagagcactcagatggtgttgaatgattggcttcacaaggaacagctaatccaaattctgaatatatcgaaatatattgtttattctacatagcaagccgttgttctttggttagtccatgatagcttgagattaggagagtgtttggagatcaatatcgtaaggtacttaagagcatttaacttgatggagaaagtataattattaaataatgcctatgtaaatgacgaagtttgttgaagtggagaaaaaggctttctaggtaaagtttgaaggttccaatggggggacttgaatctcaataacagagaggagtcgagggtttgttgtctcagtaggatttggaaaggaggaattggaatagttgtcggagcatttgaagaaaactgtggagttggaggcttctgggggttttattcgaaagattaggggcaagactaggactcacttgatggagatttgtttcaatagtagagggtgattcatgaaaattacagaaattgttacaaaaaggaaaccattaatccttgttgttccctagggtgttgaaggcaatgggtgggaagcccttaggaagccgatttctttagtgcaagatttttatgatcaagttggaagagtttcgaaggagacgattgaagattttcaagtgagtaagggcatttatagaggatgtcggtcctatgcagatgtggttgcagaggaaggacctaggaatggagctctcttgccagttggaaaatgggccagagctgtaatttgtgaaagcaaagaaaaagttcaagattgggttcatgtaggaaaagctattgcgaggatgatgggtacgaaaggaatggtgtctgtaacggtgtctgtaacccctatttccacttataaggggtgtttcttcgtggattctgcaaggagagctgaatggttccaagagcaaggaagtttattagtgagacttcgtctattattttgaggagatggtcgccaagagaaaatacggttgtatttggaaaattcagaaggggttggttagaactaaaaggtcttccttttcatttgtgggacaaagatcagttgaaatacattctgaagaagtgggggagggtaatgaaggtggcacgagactctctgaagcttgtagacttgtcgaaggtgaagttgtgggtggagatgcttccaaatgtcgtgctacctgcgttgctagaggtggaagatggggcttggtcattcatagtcgtagttttagtcaccggagaagatgaagaagacgaccttttcaagtcatgggcctcctgctcgtccaatttttattcaagcccacgagattgtagcactgttgtcctcaacgctccagtgtgcaaaatcttctacaaaggaggtcctgttgtttgtacactctcaaggttcagtcaaagctagggtcggcggggacgaggctttctcagatgaggatggtcgggcctttgagagaaagcccaatctcttcccaaccgtagtccactattttccacaatagtggactgtaacttaaaaggcccgtcgtggttgggccaaagaataggaggaatgaacccctctattaagatgggtttgttacgaagggaagaagatgctgcaatgagaaaggcgaaagctttctgaggttcagacgagaggctctgcgaagaaggaagagaagtttggttcaaagaagttgtggactatccttttcctccaagttttgatcgccgacaaggacttcaaagttgcatcgagcctcttttgctcgggaagtcatcattagatagcgaagagtgcccaaaggaagaggatttcggggcgggatctcaggtggaacgaagattcagagcgagtcctctctttcactgtcaatcgtcaaggaatcgaaagcggtgttcgggggaagggacttcgtcgtcaagaggcgaagcggctttgcgcaaaccctatttcgaagaagacaaaggaggatttttgggttgagtggggtttgatcttcgtggttcatcagtcatggatttgccttctaatccagaaatcagaggtaaagggctcaactttaaggggaattgtggaatgtcggtagtggaaaacatggaggtatgcctgtcttcaccttctcagtcacccaagtcttcttttctcccttcttttggtttggcacttcctttgccgagtccttctagtccagatcttcctagttcagtctttcattcttagtctcctatggaaaattgagtaatttttgaatttttttctaaaaaatacgttgttggcacttttcatcaaaaatctgttggcaatcctattcgtgatgcagtggaggcccaatttgcttattcaaaccagatgtccgagagttttaaccccattaagtctaaacccaatttgcctaaggaggtttccaacctggttacagttagccagggtgatactgtggtctccccattgggcgagttccaaatagaaggtctgtcccccaggaaaatggctaaagtgagtgaggttttaagttctttggatattaaggtttattccaggaggaagagcagatgctccacaggtatgtgagacctgttggaactggtttggtggtttaggatctgtgaggtttctccatgaaaataatcagttggaataccaggggtttgggatcaaggaaaaagcaaagggtggttaaagattttctaaggttagagaatccggatgttgtgatgattcaggaaacaaaaaaggtggagtgtgacagaaggtttgtgggtagtgtttggattatcagaaataaggaatggactgctcttccggcgtgtggggctttaggtgggattttgattatttgggattctaaaaaactgcacagtgaggaggtggtaataggatccttctcgatcttagttaagtttgctttggatggatgcggacctctttgcctgtacgcagtttatagcccaaacaacccctcacttatgaaggatttttgggtggagcttttagacatttttggcctattttttccattagggtgtgtgggtggtgattttaacgtcataaggagaagtttagaaaaattgggtggttctagtttaacttcaagcatgaaggactttgatagttttataagagaatgtaaattgcttgatccacctttacggaacacatcattcacttggtcaaacatgcaagagtctcccgtgtgtaagaggttggatcgttttccttactcaaatgagtgggggcatttctttcctcaaagccttcaagaagctcttcctagaaggacatcggatcattggccgatagttttggataccaacccattcaagtggggcccaataccttttaggtttgagaatatgtggttgcaacatcttagtttcaaggaaatgggtgggaaggtcacaagttcatgaggagattacaatttgttaaagccaaattgaaagagtggaataaggtttcttttggagagataaatgaaaggaaaaaaagcttcctcaatgatatagctaactttgatgccattgagcaagtagggggtctcacttctgaacttttagttcaaacagccttaagtaaagggaagctagaggaattaattttgagggaagaaattcattggagacaaaaagttagggtgaaatgggttgaggaaggggattgtaactcaaagttttttcataaagtgactaatggtaggcgaaataggaagtttatcaaggtgttggaaaatgaaagtggcttagtgttgaataattccgagagcatcacaaaggatattttactttactttgaaaagctctacgcgagtcctactggagagtcttggagtgttgaaggtttagattggtcccctatatcggaagagagtgcatctaggttggactcccctttcattgaagaagagatttctaaggccattttttagttggataaagataaggcgtcggggcttgatggctttaccattgcagtatttcaagattgttgggatgtgatcaaggaggatttagtgagagtgtttacggagtttcacagaagtgagattatcaatcaaagcactaatgcctccttcatagttttgctacccaaaaaaagcttgacaaagaaaatctcagactttagacctattagcttgatcactagtctctacgagataatagccaaagtgctatctgggcgtctaaaaggggtactacatgaaaccatccattctactcaaggcgcttttgttaaagggggacaaatattggatgcggttcttgtagccaatgagatagtggatgagaaatgacgatcaggaaaggaaggagtcgtcttcaaaattgactttgaaaaggcttacgaccatgtgagttgggattttttggatcatgtgttggagaaaaaggggtttagtcctagatggaggaaatggatgagtggttgtttgtccacggtatcttatgcagtcttagtgaatggaaacactaaagggtggatcaaggcatctaaaggcttaagacaagacgaccctttatcccattttttgtttactttagtcgcagatgtactgagtaggatgttattgagagcagaggaaagaaattcgttggagggtttcagggtgggtagaaacagaacaagggtgtcccatttgcaatttgaaaattataccatttgcaaattataccattttcttttctaacactagggaggaagaattgtagactctcaaaagtctattgctagtgtttgggcatatttctaggctcaaggttaaccttgacaagagtaatatttatgacatcagtcttgatcagaatcatctttctaggttggctgagttgcttgattgcaaggcttctggttagcctataccctatctgggtcttcctttgggagggaatcccaaggcttgtggcttttgggatccagtgattgagaggatctcgagaagattagatgggtgacaaaaggtttttttattttttggaggaaggataactcttatccaatcttgcctcacccacatgccctgttacttccttttcttgtttaagatacccacttcagtggctgcaaaaattgagagattacaaagggattttttatggtcagggattggggaaggtaaaagagatcatctagttagttgggatgtagtgtgtaatccgaaggcaaaagggggattgggatttgggaagatttctctaaggaatctcgctctcttagggaaatggttgtggaggtaccctagagagggttcaactctatgtcatcaggtcattttaagcatttatggatcacactctaatggttgggatgctaacactatagtcagatggtcacatcgttgtccttggaaggctattgcacaagtctttcaggagtttttcaagtttactcggtttgtggtaggagatgggcaaagaattcggttatgggaagatttgtggtggggggaccaacctttgggattccaataaccaagactatttagactagtctcggataaaaatattcctatttcttcaattcttggttttactcgtcctttctcttggaacattaatttccgtcgtaacctttccgattctgagatagaagatttagaaggcctcatgtggtcatttgatggtttgcatctatcaccttcggtttcagatgcgagatcctgacttttatcttcttcagggttttttttagtaaaatctttctttctagccttattccaattttttggttctcctccatcttttcctactaagtttgtttggaattctcaagtccctttcaaagtcaagtcctttgtctggttagtggcacacaagaaggtaaatactaatgacttgttacaattgagaagaccctacaaagttcttagtcttgatatttgtaatctgtgcatgaagcatggagaatcagcagatcatcttttcctacattgctctttgatgatggggttgtggcacagattatttcagttagccaagatggattgggttcccccgaggagcatctttgacatgttgtccatcaattataatggttttggtttgtctaaaagagggatagttttgtggcaagctgcgagcatcgctttaatttaggttgtgtggtgagaaagaaatgcgaggatttttgaggataaagcaaggaatttagagtatctttgggattctattcatttccttgcttctctttgggctttttgttccaaggtttttaaggggcccccccttaatgtgttacaacttgattggttagcggtgtgcaattcccaaagggttggtctaatctagagagtttgtttgttattactgtgtattttcttgtttttttattcttgtagtttagttttctttggtgggagaatttttcatccttatcttgtacttcttttttctatcaatatatccctttgtcgtttcctatcaaaaataaaaaataaaaaaataactttgtttggatgttcaccgacgtttatggtccagttttaaatgaggagagggagtgtttttggaatgagttgagtgatattagaggtctttggaatgacccttggtgtgtgggaggggacttcaatgttgtgagattttcaagggaaaggaggaattgctttagaagttcgggctccatgaggctcttccaagaagttatcgaggatctggagctaaaagacctccctttaattggtggatcttttacttggtgtggtggtttaaataaaaggttggctttcaagttgggccgtcttttggtttctaatgattgggaggatcatttcaacgacttgtttcaaagcattctaccaaaaccggtcttagatcatacgccaatcttgcttcatgaaagagaggataaggataggaaaaacttctttagatttgaaacatgtggttgaaagtagatggtttcaaagagttgatcagaaactggtggaaaggttatagtgcacagggcttttttagtcagattttggtggttaagcttaaggctttgaagtaggatcttaaagtttggaacaagggggtttttggcaatgtctctactcagaaactaattgcctcgtctctattggggcaatgggatgtgttgaatataatgtattacaaggaaagattatacactataaatacattatattcaacactccccctcaagctagagcatatacgtcatatgcaccaagcttgttacaaatatatttaatcctaggacctctgagagatttagtgaagatgtctgttagttgatcatttgaattaacaaaacttgtagcaatacatcctgatgcgatcttctctctaatgaaatgatagtcaacttcaatatgtttggtcctttcatgaaagactggattggatgcaatatgtaatgcggcctggttatcatagatgagttttatctgttcatcctttccaaatctcaactctcgaagaagatgtctcaaccatatgagttcacatgttgccaaagccatagctcgatactcggcttcagcgctggatctggccactacatcttgtttcttataggatgcaaaagaaagggaaaggcctctcatagaggaggaaagggaggttagaagggaccgtggtggaggattttaaaaagtgggcagttttggaggagatctcttggagacaaaaataagagaactttggctaaaaaagggagataaaaacactaagtttttccataaaatggccaatgcttgaagaaggagaaattttatggctaagattaggttgagcaatgaattgttactggagaatatgagattaaagagggggtggctaatgcttttcgtacgagccttttgggttgggggagtggagatcgagtattggtgggatgacttttgattctttgccaagtgttgatgttgatggcttggagacccctttctccaaggaggagatcctctttggtttatctaatctaagtggggataaagtccttggtccggatggttttaccatgaccttcttgaagttttgttaggattttgggaaaagggatgtggtggggttttttgtagaattccatgatgtagggtcctttgagaggagtttaaatgccacatttatagttttggttcctaagaaaggcggtaggcttctacaagcttctagcaaaggtcttagtcaataaacttaaaaaagtggtaggtaagttagtttcaaacttttagcttgcttttgtggcagagagacaaatattggatgtggttttgattgaaaatgaagccattgattttagaattaaaggcaatttgaaaggggttatttgtaagcttgatattgaaaaggcctgtgatcatgtagatcggaactttgtttttgcaatactagaaaaaaatgggggtttggctccaagtggattggttggattagatggtgtatttccacaatacgtttctttgttttggtcaatggatccctattggggttctttcaaagttctagaggattgagacaaggtgatcctatgtccccttatttgttcatcttggcaatggaggctctttgggggtgttgttgtttggcgggggcttcttagttaggggaagagaggcacagattggtgatctcccatttgttatttgttaacaacaccttcattttttgtgatgctagtaaggagaactgagagtacctaggatgaatgtttatgtggtttgaggctttatcaaggctaaggatcaatatggaaaaaagtgagatgatccctattagggatgttgcaagggttctaaggtgcaagtgggtgctctcctagccacctacttaagccttctcttgggagccccttgcaagttatccaagatttggaaagtggtggaagaaagagtccagaaaaggcttcctttgtggaagagtcaatacctctcaaaaggtggaagacttactttgatgaaaaacaccctatgcaacttgccaatttattttatgtcattttctatcatccctaagagggtagttgttagattggaaaagatttaaagggattttctttggagagtgagggctttagatcagaagccgtatctagtgaattgggctactatgtgcatggaaaaacaaaaaaggggcctaggcattagaagtttgtccgtctttaataagactcttatggggaaatggtctaggagatttgcgagcaaaaggaactccctttggaaacgggtaattgtaggcaagtatggacaaactacgccggggggtactaaagatgtgagagaaggacatggagttgggtgtggaaggctattagaggtggctggaggacctcaagtgtaaaaatagatataagattgaatctggtaatagggtgaaattttggaaggacaaaatggtgtggggacacctttgagggagtcttttccaaaactcttttctatagcttcttcaaaaaatgcttggatggtagatgtttgggacaacggtaaccgggatcctagatttgggaggcaattgcatgattgggaattagaagaggttaaagtcttttttaggatgttgtatgagtactccattattttgggtaccgaggatattaaggtgtggttggttacaaataatggtagtttctcagttaagtctttttactcttctttggcatttaggagagcataggtgtttccgttttacataatttggaactcgtgggtgtcattgagaatcagttttttgctttggatgcaacttggggcaggattttgacattggatcaactcatatggaggggttggaggattcctaacagatgttgtatgtgtaaagcagaagcaaaaattgttgatcatatttttcttcattgtttgaaggtgcagtctttgtggcatttgatttttgctctctttggggttcaatgggtgatgcattccatagttaagggtgttctcttgagttggtgcaggatctttgttggtaaaaagagaaagaaagcttggaaggctgctctgttgtgtttgttttggaccatttggagggagaaaaataggagagcctttgataattgtgaaaccacggatcaattgatcaaaaatttgtttttgtactttctttgggattggattagattgtacagtggggttggctccttgtcgttggtagactttgtggattgactaagctctgtgtaaagtgtggttgcaattttttgtgtttttcaactgtttttgatagttgggtctctttgtatataccttgtatacattttttcctttaatacatttttatatttacctattaaaaaaaaatcatctataatactacatagttaattgttattggagaatatatttattatatcctttttattttagtaacatgctaattgttattttacttttatgttgttattaatgatgagcttgtttatcatgtcttttatttcaatagttgagaaagatccttaagacaatattatacaactaaactttaattagtttaaaatttaaaaaattatttttttttattggaaaaaatttaaaaaattatcgctagatcttttgagattttaattttgatatttatctttagatttttctatgctatcaattattatatttatctttaaattttatctattataattttaaaaaattaggaaagagataaagtgtaaggattgattcccaatcatgtagatattgtctattttgagcccaaaggaccttcatgactttaaaacacacctacatgggtaagaggagcctttacctctatagtcttaggaattttttcctttatccccccccctccccccctcccctttgtagacacgatgtcctcattgtgacctacaagattgcatgatcaaacaaacaggcatctcttgcgaggccaaacaaacagacatcccttatagggttgaggtttgactttgatactatttgcaatgatctgctcccattcgtgtagatattgtacactctaagcccaaaggacacacatgactttaaagcatatctatatggttaagaggaacccatacatatataatttcaggaacttttctcatattcaaagtaggatgttacatgaagagtggaataaatgtatcaaaagcaatataaatctaatttaaaaaaaattaaagaaagagataatgcaactaaatagccatgtccaatgcaatatatccgtatatgacgtggatatcacacccaaacctgtgttgtattgtgttgacgtatatcaaagactatcattctttgttaaacaatatttggacaaattttgagagaggaagaaagaccttagttcgaggcctttcttttaggtgccccatgtatatgttttgtgtacctcaatgtattattttttggtgtcaatttatacatacctttctttgcctatgaaaaacatttataatatgtgttttcctagaaaaaattagcataggacaggatctcaagggagatagcatgatgggtttttagaaaagaaaaggagtatagactaaacaattttgggtgattcactaatgtatatttctagatctaaaaaaccagataatttaggtgattcatcaacatatatgaggaagcaataattagcataatacaagttggaggagcaacaagtgaacttttttcaaggattaacatcaaaggataaatgtttgatgttaatccttgatatatacattaacaaaaatacaaaaaataaataaaaaaggagagagaaaatctttggtattgtcatcaatgaaagtagttggaattgtcaagaagatattccatgctttatattgtttgtaggcaatggaattttagcttttgaaacaagaataggagttaattcaaaattatgactatggagcattaatttttttttttttttttaatatatgtattaatagagaaaagagacataagaaggatgggaaatccccctcatgaagtacaagcttgatcaaaagaactaagtaaacctccactaacccaaggagggctatacaaaaggaacaaaaggcctatacaagtaaaagaatcctaaccctataaacccaaccctagggtgtacaataatttagaatctaaaatttttagttaagctcaactagggatgtataaaatataattttagtgaaaataggaatagagttgatggtacaattgagattgatgattaagagatccttgaagcaataattttgttaccaaaggttgatgagaatgttacccatagaaactgtctttttggttggtagcgaaccttgacatggaattagagcttttctttttgttaggttgggtagaagttctaaaatttggctaaacattaaaaaataaataaattttggacaatgttcacttctgataatcacatgaatggtgcatagaagtgtaacatatcctcatgtttcttccatattatgcattcatgacttgaacttatatgatgtttaatattctcaatttcattttagcttctttttctgttttaattgacctaacaggtggataataattgcttcctctactttggctctca

SEQ ID NO: 12130 - DNA, 8714 bp, Vitis vinifera
  Intron number 2 from transcript GSVIVT01032663001 (locus G SVIVG01032663001) derived from phytozome v7.0 (chr-ID chr1 3; pos 1701193 to 1709906 reverse strand)
gtgtcaagcgtcttcgcacagtaagctaccaatgattattactttggctatattagatacaaatgagtttttttcctttgcaattttgcctttgtgatatattctatggatttttaattcttcatttgtggttgcttgatgaaacgtggcaactcctggtttcattctctaacagattattctcacttgatttaaataatctgtttgctgcaagtctgctgttttctgaacatttcattgctcattcggtgtgattatttgtaatggtcgaatgccatttttggaggttataagcttgattaaaacaatatacaagtagcacttcaagaatttccttctattatatgaaaggttcatatttcttagttaagggtggcagatttgcatttgaacctagatatgtttggtgtttttgttcccctttttgataggcaagtaggttatatattaaaagtggtgtccattcattgtatatcctctgtgtacttcagagtgctgttttagcgctttttgtttataatacactttcatttactcatcaaaaaaaaaaaaagtagtgtacccaaaaaagggagaggggggcgacattggtttacaagaagtgtacacggagcaaactgacctcccctgatcctcctcccaccaccccaccaaaaggaaaaaaaagaaaaaagggaagcattttcaatttgacatgctctttcaatgtcagctagattgctttattccgtaaaaatggcaacttaggtttactcgatatacacattaagcactaaaagctaaaacattattataataggcaacaatcccaatcactccccaccatccaaaacacatcttacccccaccatgagcctttcaatcacttaagtagagaatttagcaggatctcttccaatgcccgcttagactgctgcagtgcattaaaaaacacttaataacttttgagtatatatgcactggatattttccttcaaagagagaatattgtgtattctgattgtggaataacttgcctgtgttgaacaccatcatcaactttgtctagtgcatattccaacttaccacctctccatgttccaagttttggctgtagtagcctttggagtagagaaaatctaaacagatatcctatcattagtagttagtgagaataggaaaggtgatttgatttgattggatatgtttaaagtttttcatggctggtagatgctgtctatataaagagagcgaacaccacattctaattcactgtaagaggacaaaggtgttatggatgtttcttatagcaatctttggtctgaaacgggtgtctctagagatgttgacaaatctgctcctcgaatggaaggttaagggattggataagaaaagacgccatgtttggcaaatggctttcctgtgtttattccaagctatccataccacccttaaaaccttcaaagcatcttctattccattaccccattacccaatacctatttcttcttccttcctcttctcttcatttctttcaaaccgattttttctttctctgccactaagggaataaaaccatttgcaactaagtggaataaaaccacctttctagttccaaaaaatccagattccatttctaaatgacctttctcctcaagttccagcctgcctctccctttcaaatcgatctagaccatctcctagtcaaactcaaatattggtattgtaacgggcttggctaaggtggatacgaattggccgagtcgtaccggtcttaaccgatactttgaaccttgctaagaaaagaagctaactctagtaggtgccaatgacacctaagcctctctcataggaaaagagcactttatcatattaagggagctatagaaagatttatcagagcagtttctaagaaagaagctaactctagtaggcaccaataacactcaagcctctctcataggaaagaagcactccatcatattcagggagctatagaaagatttatcatagaagtttctaagaaagaagctaactctagtaggcaccaataacactcaagcctctctcataggaaagaagcgctccatcatattcagggagctatagaaagatttatcagagaagtttctattttttccaacttatttgggcaatctatactcaaaactacaaactggataaggtaaagaaaatcttgaaccattttttttaacaaacaaaagaatgatttattaaaagtgctgctcaaataggggtggcctaggtatacaggaagtacacaaagattgccaaagggtgaaagatgaaaaggaattacactagtgtggcccccacaatccacaaaatcatatacagatgagcatctcactcccacaccaaatctggatcagggaaagaatttttgaacagtagaatcctttaacaattgaatgtacttctccatgccttcaaaagttctaaagtttctctcatacaaaatagttcataacaaacataatgggactagcctccaagctttttctgtgcatttttccccaaaaaaacccatgccatcctagcaaggcatctttttcagtataaggcaatacccatgagggccataacatattaaagagtgagaaatgagaataataggtgccaaagactatgagctacaccacaatgcataagagtatgattggtcaattcttcatctctcatgtgcatataagaccagttagctttagcccttgctatcctccttgattggtttaaagttataattttaccccaaattgcctcccaaacaaatgacccacctttggaggagtccgaaaccccaaacttgtttgacaggaaaaggatctctagtgatggactctaaagaactatagtaggattttacatgaaagtttcctcatttaatttccaaatcaatttgtcctcacactctatttgaaccattgtgttctagatcttcttgagaaaatcttctaccatatctacttcccaatcttgaacgtttctgaaaaaacaagggctccaatgcccaacacctcccacttcgtcccaaaatttcaccatccaagcatctgtagaattgacaatggagtacaaagcaggaaacaaagctttcagaagaattgccacatcataggtcatgccaaaacctaatcctcctaccaccccttacttcaaatttggttctggcttgaaactctatccaccctctccttatggttttccacaactccccctgtaccttccctcccttcataagaacaccaccctcccatcctgccaaacttggcatatatcacccaactccactacctatcctctgtcctgaaaatttcctgaaaagtgagtggaccgatgcatactccctcttcacatatcagctacccaagattttttggtagaagtgataccaagtaatgatgggaaaaaagtccttcaaagggtgaatcctataccatgtgtcaaactagaactttgtcccagtgccatcactaacaatacttgttgctagtggcaccacaaatcttcttggtttagcttgatggtaactatgaaaacttggtgtgttttcaggagacaaaaatgaaggagatgtctgatagaattgtaagaagtttggggattggcagaaacttggggtgggtttccttagatgcaaggggctcggcaggtggggtgctagtgatgtgggataagaatgttttggaaggtttggaggctgaagtaggctctttttctatttcttgccggtttgaaaactgtgaggagggttttgtgtgggtcttctctggtttatatggaccgtgtaacggtaaggagaggagggagatgtgggaggagctagccgctgtcaaggggttgtggggtgatccgtggtgtatagtaggggacttcaatgcagtgaggtttccaattgaaaagagtaatggaagacagatgtcaaccatgatgagggatttttcaggctttatagaggagtttgaattagttgatcctcccctgggaggcggaactttcacttggagtggaggggaaggaggttccttaaaggctcgtttagaccgctttctattttcaggagattgggaggaaaggatgatgggggcaatgcaagttcttcttccaagacctgtttctgaccactggccgatcttgttagactgtggagggatgagaacaggtaaaagcccgtttaggtttgaaaatatgtggctaagggtggaaggtttcatggataaggttaaagattggtggcagtcctacagctttagggggaaacctagcttcgtgcttgcaaagaagcttcaggctttgaaatatgatttgaagaggtggaataaagaggctgttggcaatgtgacggctaggaaggatgctgccttggaggaactaaactcatgggaccacttagagttgtggtcctctctctgaggaagatagacatagccaacggatagttagagatgaattcagccactgtgccatccttgaagaaatatcttggaggcagaagtcaagggctctttggctaaaggagggagatagtaatactaagttttttcaccgtatggccaatgcaaggaggaggggaaattttatcagcagtttgactgttaggggtgttcggttgagtaaagaggaggagcttagagaagggattggatcttattttaaatccttgtttgaggaacctcgggtaagaagaccagatgtggagtcaagtctgtttaaaacgcttgatgcgttggataatgagactttggaggggcatttttcggaagaagaggtctacaaagctatatcagagttggggggagataaggctccagggccggatggttttacgttggcattctggaagtcttgttggccgatcgtgggaggggaagtgatgcaggtttttgaggagttccatgtgcagaataatgtttttcgcagccataatgcaacttttttagttcttatcccgaaaaaaggaggagccagtgatgtgcaggattttagacccatcagtttattggggagtctttataaaattattgccaaagttttgacaaataggctgaaaagagttatgggaaaactagtttcgtacagtcagaacgcttttgtggaaggaagacagatattagatgcggttttggtagctaatgaggcgatagactcaagaaagcgaagtgccagtgcggggttagtgtgcaaactggacattgaaaaggcttatgatcacgttaattggaagttccttctttcagtcttggagaaaatggggtttgggcccaagtggcgtagttggatacttttctgcatatcaactgtgaggatggcagttttggtgaatggcactcctacagagtttttttcaacttatagaggcctaagacagggagacccgctctctccttatctatttgtactaattatggaagcttttagtagcttaatctctaaagctgaggagaaaggtttcattagaggtttcagggtaatggggagaaatggagaagggacttcggtttcccatctattgttcgccgacgacactctccttttttgcgaggataataggaaccagttgattttttggaagtgggttgttatttgttttgaaatggtttcaggcctaaaaattaatctgaagaaaagtgaaattatcccagttgggggagtggaggatgtggacagagcagttgcggtttttgggtgtaaagtagggaatctccctactacttatctaggcttacctcttggagcccttcataattcttgtagagtgtgggatggggtagaggaaagatttaagagaaaattggctacatggaaaaaacaatacctgtctaagggaggtcatcttacccttatcaaaagcaccatctcaaatctccccatctattttatgtcactttttgtaataccaaggaaagtgagaattagattggagaaaattcaaagggagttcttgtggggagatgtggaggggagaagaaggatccacttggttagatggacagctatttgcaaagataagaagtatggagggttggggttaaggcacttgaaggaatttaatcatgctttgcttggaaaatggctttggagattttctttagaaagggagagtctttggaggaaagtcattgttggtaaatttggagagggggaagggggttggaccactagagaggtaagggaatcctatgggatgagcctctggaaagacattagaaagggttgggaggagttcttcctcaaaaccagtattggtattggaaatggtagatgtaccagattttggtgggactattgggctggagagtctaagctgaaagatctctttcctttgctcttcagaattgcttcccataattcagctttagtggctgatctttgggggagacaaggagatgggggcgggggatgggaggtgcactttagaagaccttttcatgattgggaattgggggaggtgagtcgttttctaagtcacatttctgcaataaagatccaagaaggggaggactctttaatttggaagattgagaggaaaggaaagttcagtgttaaatcctattatcggtccttgaaggtggagaacaaccccttatttccagcaaaggaggtatggggttcgcgtgcccctttaagaactcgtttctttgcttgggaagcggtgtggggtgaaatttctactgttgatatgttaatgaggagaggttggtctatggtcaatagatgcgttctttgtaaagagaatgaggaatcaacggatcatattctaattcattgtggtaagacaagggagctttggactgtggtgctttcttcttttggggtggtgtgggtgttcccgaattcagtgagaaatttgcttattgaatggaaaattaagggcctagaaaagaagaggagtgtagtttggaaaatggtgcctatttgtttgttttggtgtatttggggagagcggaatagaagaatgtttcaagaagaagagaagtcagatatgagcttgaagaatctcttccttcgggctcttcttgaatggtctcaacaagtcatggacgtggactttttatcttttatgaatttgttgggtggttgaattgtttggccttttttggcttttctaggtttttgttcttttcctttgttgccttgggtgaggccttctttgtatactgccggtgtacttagggagcgcccccttttttggcgtgttctaatatgatttcgtctcttggtttatcaaaaaaaaaaaactatgaaaactttttgaaattgagtgggaataagttcaactccccttttgtgcaataattggctctaccactgattgttgcgtaagataaaaaatcattccatccttaatagattgctttctttgagggtcaatccctaaatttatttagaataacattccttcgcaaattgtattgctccttggcatacctgcaaagctatttcccaaataaagccttgtcaagctcaaatgtcctttggatacctaacctccctttcttttatctgaaacaaaaaacagactacctcacaggatgactgcacttctctaacatgctggtcccccataagaaatcttgttgaatatttgccggcctcatccttagtatgctagggactaaaaaagggggaaaaaaaagcacataaaacaaataggaagatattttttatcaaagtaagccaccctcacttagaaagatatggcctcttccaacaagttaatcttgaatcccaaattgtacagatttaaatgacactcctagtggtaaccctaaataagcttccccaccttacaactagaatagccactagcatgtccaagttgattacctgctctaccgggattatctcactcttctcaagattgattttgaaggtcaaacagcctcacagcaagacaagatccatcccatatacaataactgatcagcatccgccttaatgcaaaggggccatctctggttctttgatttctttgcattggagttgggggttctttttctttgctggaatcgtgtacattgcacatagaggcattttaaatatgttgatatctcatttggggggtggggatgggttgttgtgcttctttgtttatctatatagtggattatctgagggagatgaatgctgtgtgtttgaggacaataagagatccatggatcacatatatgcaagtatgtattatctacagaatccttaggctcaatatggtagttgctcctgtgtaacctggatcaggtgggtattagtggccttttcagagaccatagggttgggattctctgggctttcttgaatctatatagttttgggttcctcatattaacttgagacgtctttacttttttctggtcaaagctttatagccatgctttggtttgaatccaccagcataaaacactgcttttatcatgttccacatcttcatttgtagtgcttgagaatccatgcctgtgttttgagacttagatgcagccatttacttctacttattgtcgattttgtgaaattgtatattttatctttttttttcttatatacatataatttctcctgaacatctgttagtcctgccattcatgaagttgttttgagttttcaggagggtcttctctttgcctttctacccgtgataaatcaatttgattccttaaacttcctgtttttgctccttttcaggtcaggcatccaaatattttatcatttctgcacag

SEQ ID NO: 12131 - DNA, 3439 bp, Vitis vinifera
  Intron number 12 from transcript GSVIVT01029847001 (locus GSVIVG01029847001) derived from phytozome v7.0 (chr-ID chr 8; pos 362007 to 365445 reverse strand)
tagtcctggtaaatctgacaactactttgttatgtcttcttgttatctttttgaaacatacaatatttttcttccttattatttattttattatttttggcttctatcatttgatgtgtgcctttttttcttttccattttatttgacaaatctttgttttcttaaaacaacaaaatatcatatatggattcttctttatgtgaaggttcatgtcaccccatactcatttagatctgatttggcattctatatgttatatttaaattctatgtcatccaaggagttgcaagcatggtaagtgtcgtcacttacaaaagctagccaagaagctggcttgttgccgcctgtaagtgtgatatggccttatttattgaaaagcattaaggatcttgatttggtattcctggcctagaggccatatgctcaatgaaatcaagtgttcacctgcttagaccttaatgacaaattaggaatttcaccttccaaatcgatttgcttatgctgcattttgattgctctggcaggtccttctctgaggtcctataagtagtcagggaaataaaggtttccccttgatgatcctgactcctgagtaatgctaactgctgatgtttccttcttttgcacataaagccaccaaaattaatcttgatacaaggaaagtatggggggtaacacttcactttcatagggtgcctaacatttcctaatttaatttggagctctgacaggatccaaggtggagctttaaatggtggtggtgcaaacatttgtctcctttgaaaaaaaaaaaaaaaatctttttccctttttccatctagttggagctctttatgactgtaaagctcattctataaatcagttttatttgttctagttcttgcatttttatagctaaaacccatagttgacatctgaaagagcattattgtgtatgctttttctatttgtattcatcacatatccaatcctgtatagcaagttttttttgttttctttagaagcgaaacactaatttttttattttttatttttgataagtaaacacagagaatgtataaactagaaaaagggagcctggaggataacccaaggcatacaggaaatatatagtagggaccataaggcaaagaagaacaaaaaaggaggaaatacaaaaaacctcactcgccctcacctagaacccaaccaatcaaaaaagtcgattaaaagtaaaggtccagcatctacatacaactttgtccaagaccaaaaactacacaaaagaatacttcaacctatgaactgaaaactcttcattgtcgaacgctatcctatttatttccttccacaccacccaaaaaaggcataaaggagccagcttccaagctttttttgcgcttcttgccaacaaaggacccgtaccatccaaggagagtcttccttacagggcaagggagaaaccaagtcaccccaaagagagcaaataataactcccacaaaaccctaatcttcgtgtagtggattaagatgtgattagtagattgatcttcagctggacaaaagaaacatctattagctagggtccagcccctccatttaagctgatccaatgttaaaactttcccccacgaggcttcccaagcaaaaaaaaacccacttcgggaggaacataaggacaccaaatgatgttccttggaaaccagattgtatttcctggctctattgcactgtaaagagacttaactgtgaaaatcccactttttgtctttttccaaaccaccctatcctccaattctgcgttaaccttctcttgaattgtcatgagcaaccgttccaccaagactacctcccaatcattgaaagccttagaaaagcgagaactccaactcccctcctcaactgaagggtcctaaaccttcgccacccactcctcttttgaaactaccaaagcaaacaaagaaaggaaagcgtagtataaagccttatcaccacaccaagaatccttccaaaatctaactcttctagcattacccatggaaaacacaatgttgttgctcaataaagaaccttccttcctaatctccttctacaaccccactccaaaaccctctcttccttcacgggtataccacccccctcttccactccatacttcctactaatgacttgtttccaaagagcttccctttctaccatgaagcagtaactccattcacccaaaagggttctattaagtatagaaaagcatccaacgcccaaaccaaccctacttttctctaagcatacaaccactcactcaatgaggtgagtctttcgcttcaaagcccccccaccccaaaggaaatccctttggatttgctcaagtctcaatctaaccgatctaggcatacatagaatagacatatagtaaataggcatgttggacaaagtgcttcgaatgaaagagagtctccctcctttagatatatattgcctcttccacatagctaatctcctccgaaaaatctcctctgccctgtcccaaaccaccgctgatttgtgaggggcacccaaagaagcaaaacaataaatagatccataaattacaagaatgaagtacaaaatactatttaattagtttaatcaaaattgtagtgttgcacaaggtcaatgtaggtgttcatcaatcagaatcatgttcaaaccaaacaaaatatgacattttaatgcatgtgttcatgaagttcacaaattgtaaattttagttcttagctccaactagtcaactaatatattatcatgccaaagttccatgtttctcgaagtcccaaccaatatgataaaaactggaattatgatcatgtatagtacttctatagacttttcaaatatacactcatgtttcatcttaagttttaattttcatagttcaccaccattccctaaacggaggaaaactctgaaatggaaaaataaatatattaagaaaaacttttcattcttctcaacatttatatcactcaactaatatatgttccatttgaatgacacctcccaatatttattagaacaataatcgcacatctgtttttatttttccatgcttgcgttggacatatacaatatttattagtacaataattatatttctgtttttattcttccatgcttgccttggacaatgcatattcaatatttattagaacaataattacactgcctttcatttttgttatctgtttctaatcattgatatatcttttaaaaagtaatgtagcattatattgaacttagtgaagcatgcttccgcaagtgcatattatgtatcatgtaagtcaaattatacatgcataatgtgctataaataaggcaataggtaatcattttatgtgaaaaaagtataatatttattgtattgggtatcgtaagtttttaaccctactatatcttatgtgctttgtaggggattcaactgca

SEQ ID NO: 12132 - DNA, 7047 bp, Vitis vinifera
  Intron number 3 from transcript GSVIVT01001440001 (locus G SVIVG01001440001) derived from phytozome v7.0 (chr-ID chr1 3; pos 21029754 to 21036800)
gtggtcatgatttagctgaattgccatgatttgagttctcttaatttcatttcttctagctaggtaacctttaaattttgttcaactagtaagatttctcatgaaaatattttctcagataatagttgtatggttgcaccaatcaatggaacatttttgctaggagttagggtttggtccacttgtgtcatggaaattttatagaaataaatggtaatgaaaatggatgatattgtccatttttactttctagtttaattacaaagatgttatatcaaacaattaagtttactcattagtgagcgtttcacattttataaataaggtgacaaatgatcaccaaattaaagcttatttataaattttcatttactcatcttaaagacgagtaatgaaagtcatttttaaagtctatataagacttcctataactcgtcaagggatatctcaagtaagaaaagcctatttttagtctttctctagttttttaatttttttctagttttctcaattcttctttatacaatatttatagtttgtttctcgttttagaacacaatataagtacaaattgttttaaagttatatgtgaaattgggtcataagataaacaaagatattgtattgtattagagaccgtgcaaatttcatataaatgaaattaaattccatataaataatgttttatattctagcaaattcaaaagaactttctttagtcttaaaaatatgtagaaaaatgaacacttcattaatattgttttagtttcaaactttatagataaatgaggatgaatgtacttaattaattattataaagagggggatggagagatagtggtttaaattgggtgttggtgtttttgagaaattcgaagaattaaaataatagattttgaagttaaaataatattaatgaaacacccatattcaaaaacattgtaattacttgaatagcatattttagagttaaactaattttaataagtcaaatataactacttttattaaaaaaaatattaattataaaatatttaataaaaattagagtttgtttgacaataattttaaaaagtgtttttagcatttttaacacttaaaaaaatttattattcaagtgttaaaaaagttaaaaacattttctaaaattactggtaaatgtactcttaatctaagttattgttatttcttgttttgattttttaaaaaattattttcatctttttatttatttaatccattggaattttagaaattgagaaattagatatgttatactatgagggacaaacatccaattttttcatcaaatccatagaaataaaataatattataataattaaaattataaaactcttttcaattcataaaaaaaaatataaaagaactagaaatacattaattaaatatcttgtgaaatgcatttgaatgtatttgcaagctagaaagctgcttgtatacaacttggccctcatagaaaaactgtcatcaacatctactatcgatacattttccaaggataatttcacatttgcaagccaacggaatgcttgattagcatgctgccccatgtacttcttgataccccattcaatttttcaaattttataggttctataaattctatacacttcccatcctagtgatgaagtgacagactgccttaatgttagagacccaaaaaataattttgaattaaggtagaaatttggcaagaaaggcaaaatagaaggaagagaaaagggcaaattttcataaaaaaataagacaaggaaagggaagaagaatggggggcaggtctcataaaagtccattgcctttgtaaaatccaaatgggtttgtcaagacctttttgaattatattactagaagtcaagtcatcacgaaatccatcctttttttttttttgtctttaagtaaagtttaagtcaaaaagatgaattcatggaggatgcttcaatgagttgtgatagattttggaggcatgaataatgtcaaaaacttatttgtacttgaaaatacatatattgtatgaaaagtatgattactaacattattataatttcacctcttgtgatattgaattttgtataaatatgggaatttataaaaattctttttagagacaatgaatctttcgaaagtgcttacccaaaaagagatataccatttcttacaacatgttaaaagttattatgaaaaggctaaaaataataaagtttgatccttcttggatggtcaataaagtctagaaagaaacataataaaatggattgtgatgttaggaattcaaagtttctaattaaaattaatccttgaattcaaataaatcccaaagtaatagtcctgcatctaataagtttagactggaatttgcaaattagatgctcatagtatttccttttagcaccatgtttctcaagtctatactctcgatggcaactcaaaataacttgatttgttaattataaattatttgacccttatttacaatagaatcaaaatacttgttaaaaacattatatatcacaaaaaaaaaaaagttagtacaacatcaaagtaaatatatgcatgttcacatatgtatcgttctttatgtaaggaattaatagggtaggaccatagatcccgaagatcctcaaaaggcgtatggatacttatttattttattattcaatgtacataatgactgaaatcacttaaaataaattgttttccttgtttaaatcaagataccacctacataaacattgattgaaccaagatgctacatcaaaaaactaaaatcaacattgaaaatcaaagaaatgactaataaacacttaagacacatataagaatgacaaaaactatttctataaaaatgaactataacaatatcatacaataatattttcatccatacaactatcattttttgaaagttatcaacacattccataggacacaaattttgtctaaaagtgttttatcaggacatgttaagatgcaagtcctatttagatatggtctcttttaaaaagcatttttcatattatatagcatgtgtcaagacatcaatgttgtctagatattgtttagatgttatgttatctaaatattgtctttaaaagatatctacacattttagagtagtcaacccttatgagtgtcaactagaaatccctacattaggtggtgtgtttgcacattctaaaatattcaccttgagctttcgccctatgaaatatatctacacattttataggagtagtcacttcttatgcataccgaaaacatttttgctagttggatagtagacaacacatccataatctcatgcgggtatgacatacttcttgtccaccacatgattcattttaagtccattagttgtcttgactttaaaatacatttaaatattatgtgaaagtacctttttatgagggttataagcttttatcttatagaaaatgtgagttatcatattacacgtatgactaaaatacaatccaacaactattttctatagtaatgctcatgttagatatgctagactttgaacattttttagacaatgtggatcctctcatactcttctatccctttcctaaatccttttttatcccaagtttactttaagtgacttaatttattttataatcaacccattcatcaataaatcactaaagctactttccaagtaataccttgtttagtattaaaaggcttcaaactttcaaaacttctatttgtttctctaaacaaatggtagacacttcataagacgaatcttcttttccaaagaattgtcccttccatatatatgaaataaattgagaagatagtaagggcaactttgaataaaagttggtctctatccttagataaatattgtcttctctaagaagttaatttctaatgatcctttcttctactaagtacctaattaacaccaacctaaaaggagaatctaaaggtaaacccaagtacatagatgcatgttagatgccctacccttcaatcaactattgaaactaagaatttcatgttctcacgccctacttcagaaataaaattttctattcattttaagacctagaaccatctcaaagaaaagaaggttcacctcacacataacaattaatcatcaccatttcctatcaaaggaaagaatttagcaaataataaataaaaaaaatttatacccctttagcattatttccttagtcataaagcctcaaaggaagccattattgatggctctttgaattatataactcaaggcttctacacaaacaaatatgaggaaaatggattgccttatctcgaaactactaagattggtgaaaaatcttttcttttttcaatgtagagaatttgattgtagtgttgataaacttaatccacctatacttctacttgaaactaatttctgcaacaccaataacaaaaaaaaaaaaaaaaaaatcttacgacataacctttttaattatttaaaggacaagtaatttcaacatgaacactcttcactataagcaatattatattgaaaatcagactttccaaaagttattctagaaattaaatgctactttattattgttttttttttttatatgttctccaagaccgtacctattagcttatatgaggtcctagataaattattaagctatggcgatccttgatgccttttgcatcacatttcttaagcactagcacaaaacacattgcattcaagacttcatggtactaaacctaaatcaactttattcaacccatctttcggaatgctaatacatcaatgtagaccttctaatcatgaggattgatatactattggtagaaaaaaatatatatatttgcattatttttgtagaccttgggtaaccactcatcattcatctttaaattttcaactattgaaactaagaatttcatgttctcacgccctacttcagaaataaaattttctattcattttaagacctagaaccatctcaaagaaaagaaggttcacctcacacataacaattaatcattaccatttcctatcaaagaaagaatttagcaaagaatatataaaaaatttataccccttcaacattatttccttattcataaagcctcaaaggaagccattattgatggctctttgaattacataactcaaggcttttacacaaacaagtatgagaaaaatggattgccttgtcttgaaactactaagattggtgaaaaaccttttcttttttcaatatagagaatttgattgtagtgttgataaacttaatccacttataacaaatatatatatatatcaaaagtctcattgtctacaagcaatattatattaaaaatcaaactttccaaaagttattctaggaattaaatgctactttattattgtttttttttttttttggtaatatgttctccacgatcccatataaattattaagatatggtgatccttgatgccttttgcatcacatttcttaagcactagtacaaaacacattgcattcaggactttgtggtactaaacctaaatcaactttattcaacccatctttttgaatgctaatacatcaatgtagaccttctaatcatgaggattgatatactattggtagaaaaaaaattatttgcattatttttgtagaccttgggtaaccactcgtcattcatctttaaattcgacaagatttttccattcttgatatccttggaagctaatttcattttttttagcccttcacttatcattcccattgtggaattatgtgtgggaatgctagatgatgaattatggtatatgatatatgcaataggtaatcttatcttatttaattttattctctttttgtttaaaaaaaattgttatattggctagcttggtagaatctcaagtcatgcacttgctccttgctcaagttatagaaaaaaaaaaaaattaaaattgagataaattactataagaaaccttaatcttttcaatcttcaatgttatttaatgtagaattcaattttcatcatgttttcttatattaattattctccctataaatacttattatagaaaatgctttgctggttcatggtatgcttccaaactttcttcaatcttccctttttatattttatttttattattttaaaaaaaggtatatattaaataactatcaaattaaatagaatagcaaaaattttatatcggcaatccaacaagttccaagtcaaattgagttttaaacaattgaaattaagacttttataattttactagttaagtcatttatttaataaataagtttagcgttggtttacatatattttctattttctgtttttaaaataaaaaatagtaatatcttctatataaaatatagtaattcttataaaaaaattatgtaagttgcttttacgtaattattatttttttaaattctcgaggtaaagaagttttttttaatatttcaatattttaaataatttgtaaaatcattatcttttaaaaataagtgtcacttacattttatataagaattactatatataattaaaaaatgtttgtccattttttttttaaggattactatatcttagaataaggaagttaacacatttttttttcaatcgactaatttgtttcctttgtaaataatttgtttaatatgaatctaaaaaatttcctaattatctaaaattataacttagaatataactaatttactaataaattatttacaaaatgaaacatattatttaaaaaaataaataaattagtaatagaaagagaatatgttaacttccttaaaaacaaaaaatagttttatattattaagaatataaaatagtttaattgtttttagttatttttatttgttaaaaaataattatacaaatatgaaaaattattaaaaataaaattttacacataaaatttatttttaaaacatattaaaaaaacataaaaatatgattaaaatatttcaaattcccaaatacatatttattctaaaaaaaatattaaagaatcgtttttaaaaattgttttttag

SEQ ID NO: 12133 - DNA, 3130 bp, Vitis vinifera
  Intron number 3 from transcript GSVIVT01008799001 (locus G SVIVG01008799001) derived from phytozome v7.0 (chr-ID chr1 8; pos 2213325 to 2216454 reverse strand)
gctttacaccttctgtaagtgaagggatttccatgttcaggaaactatgaatcttgacttaaaaccatgtggtgttcaatagaaattggcatcaaatacctgtcttttcttcctgtggttaattttgtaggaaatagtaaatgcaccaaactgttttaccttgctgaaatacttatgcagaccttgagtttcatcattttggatgtaaatgcctttggtacctggtttctaatatgaagcttatttcttatgatggcacaccttaatttgggaataaatgatttgctggagccaataacattgacccggaattatccaatcttgttatttctgtacattttacttccaagcttgatctgatattcctagtattttctttagtgctttcattgtgatttcttatttccatcattgttttttatgcacataggaatatcatcagacaagctagtctgccctttctttatatataggtttcctgctgattctaaattttctcatgtgtagacacatatctttagcagcaatggggttcacgccttgtagttttatattgcacatttcattttctttcctttttaaaagattagataaatgcattatttttgttgattgagtacattggtatgcgttgaaatttaattttataataacaaatataaccaatgtgcttgaatccatagctcggttactcatttttgttttgtataagagtgcatccacacttgtttatgcatacttgggcaggagaaaagtatcgctgacatgtacaagttgggacaaagttgcatgagactttttgatttatcatgcctctaagaacaaggactatggcatttaaggaatatgaagaccagtaggcaatgagaaagacacattctctaataaaatatgcccaatttcaattaggaatttattagtacctaaaaaccaaattctcagaattatattaaactttaaaatgattggaattaccaattttgatcaaaattaccaataaatgtaaatcagttaattggtaatctactaaatttattcagacttagaagacaaaaaaacattataatctccaagacaagtaatttccaaaacctattctaactcaaaggggaaaaaataataatgtcaaaactaataactctgtaacacatatagactcaaaaagaaaaatatgtaataattccctaaacatatttaggcttttgaatttggtcaatctttagtcccataagtttctcactctaaatcactcttgtttcttttaagcatttaatgttctagagcttatgctttgctatagttttaagaattgaattaaaacaagctacatattttgttcgagtttgtcatggaattattactttctgcatagatgcatggtaaatcaaattgtgattccttggcaactggtgatcattgagacgactggacatcattcttaactattttaacccaaacttcagcctgaccaattgctttttgtgggatgtctaggccactcttcatgtgcattctcatggacctggccccaagacctactcatatctggatgccttttgttgcctctatgttttgtctagggtttatcttagcctatctattgattatttggtactttgattgctgcaagttgttgatgttgagaatcattagattagatgtgttagataaccaattttcctaaaagcttaagcttataagatttgggtccacaatgtatataatgtgctctttaacacctttcatcacttgcagccttatactcgtacatggagagacacatagatacgtagggaaacaaccactattaaacttttttgggcttgcatgtaagctcaataaattggggatataaatatttttgtgatgaggctcgaacacagacctcctgccaaacaaggctctaatgccatgttgttatcatgaagtcatcttgttgccattcatcaaaacttttagattcttggcgatgagtatcttctaggggatgttttagttttccctgtgcttgcatctacactctcacaacttcaacctataataaataattaggtccctttaacttaattgaagtaatatgaactctaagtctctaacactatctccagatttatgatcacttctagacgtcatacttgcacttaaaatgggaactattgctcttaaaattgaaacaaagggatgttaggaaacttttggcactaacacaacttgcatcacaaaacacaaccaatcacataggtactagtactggagctcaccgtagcaaaataattgtggtgtagactgtagtattgtagcagatgactgtagcaaaatcattgtagcacatactgttgcaaaatcactgtgctacatattgtagcatgacactgtagctttttttttttgcgtccacaagccacaatgcatatcatgtagtttaacaaatgtagaagtactttattgtgtggaggcaacttatggctttagtaggaagagcaatacaataattggagaaaaatataccatatatactggttaattttatatttgactaattaattgtcaagagaaagtgatgggtaacttctcaatcaaaggagaaatattccatggggccttgatctacatatcagaatgcagatatctaagtttacagctgttggaatagcatttgatgtatctttatttctaagcttcaaagtttaggatggctttcaagggtggttggaaactctcttgacaaggagaggagtagccttctgtttaagtgttacctaccaatctggttaatttggtgtctaagatgactgtatacaacttcacttttctgaatttgttggatttgtggaaaggtctattttcaagctttatgagtttcaaatagaaagataagatggatatataattatctagtggagctgtttaagtttaaggttcatggtatggaaattgggaaatttactaacttaccaatgcaagtttgtagcatcattgaaaatcacttaatcttggtgaacaaccacatcaaatacaaatcttgatgagactttctgagcctactcagggttggcagtgtacctcaaaaatgagaaattggtttctgtgtgaacatatttgcaggttccaacaggagaggttctaactt

SEQ ID NO: 12134 - DNA, 4637 bp, Vitis vinifera
  Intron number 3 from transcript GSVIVT01030280001 (locus G SVIVG01030280001) derived from phytozome v7.0 (chr-ID chr8 ; pos 9539154 to 9543790 reverse strand)
tcagaaggacctactgttgccggggcctgatccaggtaagactcatgcaccagagccttttgttgcgtgggagactgaggacttgaggaagataaatggcgtggttaggatatcagagacggataaggcactggaagaggaatcaacgaggtatggaaaggggctggggtcttgggggaaaatggttctggggatttctcatctcaactctcttaattttgatcggactccgggagtggagtctttcggtcattctggggattggaatgagggggttcgggttgacaatacaatgtggctaacggtatatgagggctgtgttgagaggagcaatggatgcagggaggtgggagcaaaggaaagcagcaatgctatggaaagggggattattgaggtcggtgccatatgtgatactcaaacagcgagaggaatgcaggaggataaatgggaggagagtgatctggcaaaattcagtcaattcctgggattccctacggagggattggagaaggaaatactgaagtttctgtctcaaatcagtaagagaagggagaaaatccatagtaaagagctattggaaaaatctaagtttgaaagggagttaaaaagactggaatgctccattaattatgagggggggattaaacagaaaggctcggtacagggcaaagggcgctagattatgattgtccaatgaagatgaaaattctgagttggaatgtgaggggagcaaatgatagctctaaaagaaaagtaattaagacgtttataaggaatcagagggtggacgtaatctgtattcaggagactaaaattcaagcgatgtcggataacattgcgagaagcataggctccggcagattccttgagtggaaggctgtgaatgcggaaggagcttcgggaggaattctgatgtgctgggataaaaggaccttggaggttctagattgggaagagggccagtttaccttatcttgtagattccggaatgtagaaaatggggcgatttggatttttacgggggtgtacgacctgttctccaagatggaaagggaggctttatgggatgagttgggggcgattagagggctgtgggaagacccgtggtgtatagggggggactttaacataaccttgtttccgagggaaaggagcagccagaggagaatgaattcagcaatgaggaaatttgcggaaatagtggatgacctggggctgatggatctcccacttcaagggggagaatttacttggaatgggggacaaaacaatcaggtctgggcaaggttggacaggttccttgtttcccctagttggactgaccaatacaatgggattagtcaatgtaggctgtcccgtccggtctccgatcatttcccatttatgctagggggggggggggggggataagacgaggcccaactccattcagatttgaaaatatgtggcttaaggttgagggtttcaaagatttagtgcgcagctggtggcaaggaattgaggttaggggcagtggtagttacaagttggctattaagatgaaggaagtcaaacagaaattgaaagtttggaataaagaagtttttgggaagctggagaccaataaatcctcagccctgcagcaggtggagttttgggatagggaggaaagtgggagaattctgactgtggaggaaacagagcttaagaaagaagcaaaggataattataggaaatgggtgattatggaagagactcattggagacagctttctaaggaaatatggctgaaggagggggatagaaacacgggcttttttcatcgtatggcaagcgctcaccgtagaaataatcatttggagagaataaagatcaatggggagtggctgttagaggagcaggaaatcagggaaggaattgctagcacgttccaaagtttgctttcagaagatatggggtggaaggcggagatagggggccttcggttagaccagatcagccaacaagaggctgagaccttagagaggccctttacagaggaggaaatctatgtagctctgatggagatgaatggggataaagcccctggtccggacggctttacaatggcattttggcaaagttgctgggagttcattaaagaggaaattttggaaatgttcaaagacttctatgaccacagttctttcctcaagagtcttaataataccttcttggtgctgatccccaagaagagtggggccaaggaccttagagatttcagaccgattagtctcttgggagggctgtacatgttattggctaaagtgctagctaacagactgaagaaagtagttggtaaggtggtatccacttctcagaatgcctttgtgaagggaagacaaatccttgatgcgtctttagttgcaaatgaagtaatagacacgtggcagagacaaaaggaaaagggcattatatgcaagttggatatagagaaagcctatgactgcatcaattggaagttcttgatgaaggtgttacaaaagatgggattcgggtctaaatgggtggggtggatgtggagttgcctatcgtcagctaaattttcagtgttggtgaatggagtgcctgcaggtttcttccctaacactaaaggccttagacaaggggatccgttgtctccttacctcttcatcatggggatggaagtgcttgatgtgcttatcaggagagctgtggagggggggttcttatcaggatgcaacataaggggtggaagtggtccttctttgaacatctctcacttgttttttgctgatgacacaattatcttctgtgaggccaaaaaggatcacctaacttacttggggtggattttattctggtttgaagcggcttcaggcttaaagattaacttagccaagagtgaaatcattccagttggtgaggtggtggaggtggaggagttggctgttgagcttggctgtagggtggggactcttccttctcagtatttgggtcttcctttaggggccccaaatagagcgccttatatatgggatggggtggaggaaagagtgaggaggagactagttctttggaaacggcaatacatttctaaaggaggaagagtcaccttaataaaaagtacattggctagcatgccaatctaccaaatgtccattttcagaatgccaaaggttgttgttagaaggattgagaaagtgcaaagggattttctgtggggagagggaaacatggagagaaaagtgcatttggttaaatgggaggtggtttgtacagacaaagagaaaggtgggctaggccttagaaagctagctttgttgaacaaagctttacttgacaagtggatatggaggtatgcatgtgaaaaaaatattttgtggagacaagtgattaaggtgaagtatgggcaggagggtcttgattggaggcccaaaaagggaaatggggcggttggtgtaggggtttggaaggagatttggaaagaatcagattggtgttgggataacataacattccgtgtaggaaagggcaacttgatttgcttttggacagatgtgtggtgctcagaatcttcattggctcaatgtttccctcatctctttggtatggctgcgcatcagagtttgacggttgaggaaatgtgggatcaaaattcgggtcaaggaaactggaacctatacttcttgagggacttcaatgattgggagattgagttggttggggagttcctccacattttgaggggttttaaaccttctttggaggaagattcagttatatggagaaaaggaagaagtggtcagtttagggttaaggaagcttacagtttgttgacaaattctgaggttatgggatttccccataaaagcatttgggtggcaagagtgccaactaaagttgctttttttgcgtgggaggcggcatgggggaaggtgctaactttggatagtcttcaaagaagaggatttcaacttccaaatcggtgtttcttgtgtgaatgtgaagaagaaagtgtaaatcatatccttatatattgtacagtggttagagctttatgggatattgtctttggtttagttgatgtaaaatgggtttttccgggaactgtaaaggaggtcttagctagttggaggggctcgtttgtgggaaagaaaaggaaaaagatatgggatgccattccgttgtgcattttttggacggtatggaaggagaggaatagattagcttttagggggggggggtttgaatgttcaaaagttaaagaattcttttgtttgtaacttgtggagttgggccaaattgtatgtaggtgaggaggcgttctcccttataggctttttagagtggatagcctccacttaatgggaggtgatcctttgttttgttttttgaggcctatgctgttttgtatacttcctgtatgctgtgcagcgttttgccttttttaatgcatatcttttacttatcaaaaaaaaaaaaatagagagcctaaatacataaatttaaggaacttctcacacttggagtaaaacatgatagttacttaaatctttacaatctgagagataccactagtttacagttgattcatctatgtttgtgttgtagtagacaaaatttatcaacctcaacatgttgtgcaggccaagatc

SEQ ID NO: 12135 - DNA, 11919 bp, Vitis vinifera
  Intron number 8 from transcript GSVIVT01032296001 (locus G SVIVG01032296001) derived from phytozome v7.0 (chr-ID chr1 1; pos 14672394 to 14684312 reverse strand)
gaaaaagtttttagcatttgaaaagtaagaattaatgccacaatatccttttaaatttacaagtgatgcatttatatagccttgaatgttttaagcaggtgctgaatatatttaagaggtatgtaatcttgattaattcagtgttccattcaggctttattactaggagtttttgtcatttagagatgacatgccttgattttttttcccttgatgagaaattcctcaaattcattcttttacaatgttcttttcaaaatttcaaggattatgattattcccaaaccgttgaaatgccctattacttttataagagatatggaattccacgagtgctttctaataattcatctatccacttgtaactgtagtttccaaagaaattagataaccttatggccatgtttggtacttgggaatggggaatgagaatgaatattttgtttccgatcctatttctctttgaatagaaatgaatttggtaattccaatttttgtatttgaacgcacctatgaatgtaaagttggaacgatcatttgtttttatttcaatatttggtaataatgagaatgataataaaaatacaaaataaaaaaatgataataatacccttacaagtagttttttttttaaaaaaaaaaaaatattttagaagaacatcttttgagtgttgttttttttgctaaataataaggctaagaaaaataatatttacttaataaataaaaattgatcataaaaagttacatgatcatgtaattgagaaaagaccttcagggaaggatggggtagtcttcaaaatagattttgagaaggcatatgatcatatggattggggctttttctggatcacatagtagagggaaaagggtttagcacaagatggaggtcttggatgagggatttcttgttctcaataagttttgtagtcttgatgaatggaaatgtcaaatgatgggttaaggcgaccaaaggtttaagacaaggagatcctctttccccattcctttttactttaactgttgatgtattaagtaggatgatgctaagagctgaggagagcagtcttttagagagattactagtggggtagggataagattataacatctcatttacaatttgcaaatgataccatctttttctttagagcttctgtggaagatctgtaaaaacttaaagtaatcctattggtttttgggaacttgtcagggctaatgatatatttaaacaaagggaaatacgttgttttctatggcgaagcgttttgaagtggagaagaagggctttgaggttaagtttgaaggttcccatgggggaacttcgattttaataacagagaggagtcgaggttacttcttctcagtgggttttggaaaggaggagttggaatggttgtcggagcagttgaaggcggctgtggagatggatgtttccatgtgttttattcgaaagtttaggggcaagactaggactcatttgttggagatttgcttcaatagaagagggagattcatgaaaatgacagaattagttactaaaagaaaaccctcaactgtggttgttcccaagggtgttaaaaggtagtgggtgggaagcccttaggaaggtgatttcttcagtgtaggattttactgctcatgctgtaagtgtttcaaaggaggtgtactaagatcttcaggcaggtgagggcatttacaggggatgtcgatcctatgcagatgttgttgcaaaggggggaccaaggaatagagctttattgctagttggaaaatgggccaaagttgtaatttgtgaaagtcaaggaagagttcatgattaggtttatgttggaaaggcgattgcgaggatgatgggtttgaaaggaatggtatctgtaacccctatctccacttacaaggggtgtttctttatggattctatagggagagccgaatggctccaagaacaggggaggatgacagtgacaggagagtctgttttctaaggaggtggtcgcctagagaatatattgtagtacttggaaaattcagaaggggttggaaactaaggggtctctcttttcatttgtgggacgacaatcaattgagctacattttgaaggattgggggaaggtaatggaagtggtgcaggactctttgaagtttgtagatttgtcgaaggtaaagttgtgggtggagatgcatccaaatgtcgtgctgcttgcgttgctagaggtggaagatgaggactggcctttcacgattgcagtttcagtcattagagaagaagaaggaattcgccttttgatgattcagtcaactcgtagcaggggcgggttggttttagcaggaggaagcttctccctcaggcccagaaaggttgaggggacacatggtgcctcaagagagtgagggatatagctgtatgcccctttctcgctcccgttctccgttttcaaattcaaatttggctggagattcaaaaaggaagaagggtctaggaatgggagtcaaataggcctaagggtgggaagcttttctaggcccactaaggctagtgccattttaaaggcctagtcttcatttagggccaatctagagcaagcccatgtgaagaagaaggttttgggctccctgttccagttgttaatcaagcgacagaagaaggtaaagctaggtcttccaatggtgatattgcagcgccttcgtcgtaaaattttcaggtttcagactttttttgtaaaggacgttctttctattgtgctctctcaagaattgtcaaagaggaaaggtcttgtagtcgtagcgaggcatagaggaaaaagttggcctccgcaccttaaggtgtcatcgtttagtcttcaaccagggcattaatcttcctgctccaaaaatttcccaagcttttaccatggagacagaagaggacgaagggctctcacactacaatttgtcaaacaatgtgtgtcttcctaactcagaatccttagagaaagaccaacctttggtcggggcttttgttccaagctctcttcccatctcttttgtttctacagttcattttgttcggtgccaacccctttcattgaatccgttggagtcaagccttgcttctcaggatgttcctggtgacaagtctagccttcttgttggtgtgcctattttggaaggtgtggcgtcccctagagaagcctttaacaaaaaacttaaaggttgttttttccatatgaaaccacttagtagcccagaggagcattgagtctcaggtccaagtttgtctccagcttcagaacctcccactatcccgttggaaggcttttagattgagggcctcacgcctcgaaagatggtaaaggttcatttggtgttggagagtttgaggatcaaaattgtgaaagaaagtgaagaaagtgtggtggtggagagtaagactactctttctacggacaaggtctatttcagatgaaagatcaaaattgtttgtggaatccaaggggaggcctaagttagttgtggtttttgctgggcgcttttctgtttgcatgaagatcattagttggaatacaagagggataggctccaaaaaggaaaggagaattgtcaaaagctttttaagctctcaaaatctagatattgtgatgcttttgaaaacaaagagataaatttgggagaggacgtttgtgggtagtgtttggaaaggaagaaatagagagtgggtttttcttcctgcttgcggggcttcggggggtattgatcctgtggtattcaaataagttcaagtgtacatagaaggtgttagggtctttctttgtaactgtgaagttgaattttggtgaagaaggttccttttggttaactaagtatggttcaaataagcctttgtggaggagggatttctggatggagctacaagacctatatggtctaacttttccaatatggtgtgtagggggggacttcaatgtaataaggaggatctatgagaaattgggtgcttctaggttaacttcgaatatgaggtgttttgacgagtttataagggagagtggtttgtttgatccccctcttagaaatgtggcttttacttggtcaaacatgcaagatgttcctatttgcaagaagctggatagattcttgttctcatgtgagtgggaccattttttctctcaaactcttcaagaggcgcttcctagatggacctcagatcataacccaatttgtttggaaactaatcctttaaagtggggcccgtctcctttcaggtttgagaatatgtggttgctccatcctgagtttaaggaaaattttagtgcttggtgacaagagtgtttggttgaaggttgggaaggtcataagttcatgaagaaattaaagtttgttaaatcaatgttaaaagattggaataaagtggcctttggagatttaagagagaggaaaaattccattctttcggacttaggtagaattgatctttttgaacaagaagggaatttgaatcatgagttgttattagaaaggagcctttgttaaaggaagaaaaattttagatgctgtgttgatagccaatgaagtggtggatgagaaaagtaggtcgaggaggaaggggtggttttcaaaattgactttgagaaggcctatgatcatgtggattggggctttttgaaccatgtgctacaaaggaaggggtttagcccaaaatggagatcttagatgaggggatgtttgccttcaattagttttgcaattctagttaatggaaatgcaaagggctgggttaagactattagaggtttgagacaaagaaaccctctttctccctttctttttaccttagtatcagatgttctaagcaagatgatgatcagagcagaggaaactgggttaattgagggtttcattgtgggcaaggataggactaaagtgtctttactacactttgtagatgacaccatttttttctctaaagcctctcttgaacgtcttcaaaaccttaagctaatccttttggtttttgggcaagtatcaggattgaaaatcaatttagaaaaaagcaccctttcaagtattaatacaagccaggagttgttgtctagtttgactttgattcttgattgcagagtgtcagagtggcctctgtcttatctgggtcttccataaggagggaacccaaagtcagttggcttttcagatccagtggttgagagaatatcgagaaagttggatgggtggaaaaaggcttttttgtcttttgggtggggggggtaggggaggattactttaattcagtcaagtttgtctcacatcccaagctacttcctctcctttttcaaaattccaatatcaataacctcaaagatagagaagttgcaaagggatttcctttggtctggggtgggtgaaaggaaaaaagatcatcttattaggtgggatgttatttgtaggccaaaggagttgggaggtttgggtttcgagaagacttctttgagaaatattgctctcttagggaaatgactttggaggtttcctagggaaaggagtggtatttggcataaggttattgcgagtatttatgggaaacatcctaatggatgggaagccaacatggtggttagatggtcacatagatgtccttggaaggctattgctcaagttttccaagatttctccccatatatccatctagtggtgggaaatggggagagaatccatttttgggaagatctatggtagggtactcaacctttatgttctcaattccctggtctttatagagttatttctatgaaaaaccttatcgcctcagttgtccttggtaattcctatccactttcttggaattttaatttttatcgtaatctcactgatacaaaaattgaactcattagagactcatgtcctcccttagttcagtgtatttttctccttctatggtggattcaagaacttggtctttgtcctcattaggcttgtttactgttaaatcttttttcttagccttatcaaatttcttaaatcctatcttgttccttctggccaagtttttgtggaaatttaaagccccttcaaaggttaagacccttgcttggttagtagtacatgggaaggtaaacaccaatgacaagctgcaattgagaagaccttacaaatccctttgtcctcaatggtgcattctatgcaaaggaaatggagaatcggttgacccttttctcttcattgtactttaactattgggctttggcacaaacccttctttttagtagggttggattgggttccaccacggagtattgaggacatgatgattattgcatttagaggtttggggaattcacttagaggcaagacactttggcaaatcacttgcctcactttgttgtggattgtgtggcaagaaagaaacgttaggacttttgaagataaaggaagattagaaggaatgttatgggatttacttctcttctattcctctttttgggcctcttgtactgtgagttcctctgagtgttttacaactcaattggactgcagtttgtgattcaaaagtttgagatagttgaggatttctttgtatattgttttctatagtggggtgctttcttctttgttcagtttctgtttttgagagaaggactcctcatccttctcttactactatagaggcttcttttgtatatttactactattaatacatatttcttcgtttctaataataaaaaaaatgatctatttagacaagtgcactctatctagaattaacataaatcaaggtttgattaccaagttggcatcaatgcttaaatgcaaagccacagattgacctttaactcacttgggtcttccattaagggggaatccaaaggtagttgcgttttgagatccaatgattgatagggtctagaggagactagatggatggaagaaagacatttttatctctagcgggtagaattactctaattcagatatgtttatcccatatccttaactatttcttagctcctttccagattccagtgttactagcatttaagattgagaaattgcaaagacattttctttggttaggaattaagaagggtaaaaaagattatctcattaggtaggacattgtgtgtaaggctaagtgagtatggaggtctaggacttgggttgatctatctgaggaattgtgctctcttagggaaatgactgcaaaggttctatagggaaagttttggcgtttggtatcgagttattctagacatttatgggacatatcttgatggatgagactagaacattatagttagatggtcacataggcatccttggaaggccattacataggtgttccattttttttttttcaagttatacttgttttgtggtgcatgatgggatgggaattcacttttgagaggattagtggtagaaggatcaaccttcatattcacaattttcatgtctttatagagttgtcagattaaaaaatcttaccatttcaatcatccttggtcactcttctttttcttggaatcttaattttcatctcaaccttatcaatttgaagattgaggaccttgaaagactcacgtcatcccttacttgtgtgcatttgttttcatccatcccagatgtgagagcatggtcattgacccttcaggattgttcacagtccaatcattcttcatggctttgtctaatacataagattttgttcttttctccttgacgaaatttatttggaaatctaaagttccatttaaggttaaggcctttgcttggttggtgacacatgagacagtaaataccaacgacatgttacacttgagaaggcctttcaaatccctggcatgattgatatgtttaatgtaagaggaatggaaaatctattgatcatttctttctgcactgtttgataactttgaggctttaacactatttattcagacaagttaggattgattggatcccacttaggagcatatgtgataatataggggcttgggaagctccaataaaggtaagatcctttggcaaatagcttgtcacatattgttttggattgtgtgatgagagaaaaatgttagaattttttaagatgagtaaaagacgagaggggttgtgggatttgacttctattcctctttttgggccttgtgcatcacggctttaaatgacaccctcttagtgttatccaactaaattggcttttgatgtgtaaataaaaaatgtttgaacatccttcaaaggagttgtgtttgttgtttaaaccttttatatagactctttgtacagtagaggaggtcaatcataatatgatcaggtttttttgtaatcgtggggaggactccttatccttctcatgttttcattaatataatgatacacatctctagtttttgattaaaaaagtcatacaaacataatagaaatgaaaagggataacatattaattttaatatatactatatcatttcttgcatcaagagaatcaaatattttttgttgagaatcaattgaaatcccatttgttggggataaaatgagatgtccattcctatgtactaaacatggcttatgttcaaaactaaaccatattgttgtaaagggaataccatatagtgcaaatactttgaaatagtaacttttcttggataaagtcctatggatttgggtttaatcttcccttttatttaatataatggttagatgggactaacccactttggtcaactttacacacaaaacacatagcataataggttgttagttaggtcttaatatgttgttttattaatccactagttgacacatctctctagatttagttgggagtggagaaatgcaacaaccacacaattcttttcatttggaactaagaacttaaaatgggataaacttatatgcacttcaattcaacacaattcataaccttgataatgaagtagggtgtagttccttgttaggctttttagataatgagtctcgaggattatcttgagagtcgcaaaagtggctgggtaagtttgtgaagacttatagacaaaaagagccaagacttgagaaggtaaataccaatgacatgctatagctgagaagatctttcaaagctcgtagccctgattggtgcatcctttgtaggagtagagagatgattgatcatctcttcttgcattgttcgattactttgggattgtcgcataggattttttcacaggctgggatggcatgggtttagccaaacaatttttgcaatatgatggtgattttcttcaagtgttttgtgggaattctattagtggcaagcctctttggaggatcgtgtgtctctctctgttgtggattgtgtggagagaaattggtgcagtagaaggtttgtttcaaaccgaaacaaaaaaacactccaacaaacacgaagatcacaataggatatgaaaattagggaatagttctgaaaaaatatattgaactcctaataattaccataagcctttaaataatgtttgtaatgcaaaaataaaggaaataattgaaataggaaaccaaggtaattggaaactaggaaagaaataggaaactaatgatgaacttaaaatagaaactaatgatgattgtgtgctgcatcaatcccctccactagaagaaaactaatccgggggacatgtgtgcggcttcttgacataatgaaattcgggtccgttatgttggtgaattgcggtttatctttcttagtaaccaaattgttttttgacaatcaagactatagcatcaagacgatcttcttgtcaaaccatcagaagatgaaagtattatatcgactcttataagtggcatcaacatcatagtaccacggcctccctaataaactatgacaagcgtccatatctaccatgtcacatacgaattcatctttgtaatacttcccgatcgacaaaggaaccttacaaacttctagcatttttggacccttcttaatccatgcaatcttgtatggagaaggatgcttctcagtcttcaaatttaatattttcaccaaagccttggaaacaacattctcgctactaccattgtcaatgatcatgttgcacactttattacgaatagcacatcgagttcgaaatattttctatcgttgagagttgttcggcttctttaaggcaagcgaaagttgttggacaatgcacaccacttcttctcctacatctccttctgcaaactcaacaccgttatagatatcttcttcaagaacctattcctcttcactgctaccttcttttacaaagttaacaaatcgtctattgaggaattgtttgaaagatgacctggttagttgcactagaaacattttccaaggtttggacgcatacaagggtcattactgacttgttgttgctattggttttggccttaactattagattgaacaggggctaaagttccacttcaattttgcaccgaattttcagttgaagtgacatctttattgctatcatcgttgatgcctaaagttgttgaatccttttggagcagaagaaggttcttgggttgattgccgcaagttattctgcacaccatggacctattgatctgattttccactttcatcgccaaatttacaacatctgtcatggtccaaaccccttgaaaagccagtcgatcttgaataactagttttaagcctaaaatataatgagcaattaattgatcctccgtcgcaaacaaattgactcgggcatgtaattgatcaaatacctctgtgcattcgttcacgatgaggttggcttgccgacaattttgatattgttggtataaaaattgttcataattcgaagggagaaattgtctttgtaacaacggtttcgtcttgggccaagtactatttccttgttcttcaggattatattgaagttgttcccaccatgcagaaactttacctttcaacttattcaccacaagctttacttgagtttcttttgaaatattcaaattgtcggaaaaattttcaatggtgtgcacctttgccacacatccttgcatctgccttaaccaacttggcactctaatgggccaagttgaattttagtccaagagaaagaggcttcaatgtccttagagatctggaggattcccctcaacctgtggcacaatgctatgcccgtctaatttctaggctaattctagagagaccagccaatcctcttccactatgagatttaagccttacaataaggttgattctcggtttgaatagccatcacaatctcagctggggtgggaaaaaatccaaaaagtactatcggtgttttaataggcccctcaatgcccatctttacgttggcccttgagcaagtgttgacacactgcataagattgatgaatatgcattccaatgataagtcataacttgtttgggccatacagactttgttgtgaacatagattttgacagcagaatgtagttggactcttatgtcaatctgaatggacataaacaccctgcacaccagccaacttatgagtttattttgaactaatttcatcataagagtttcttttttctttctttttttattttatttttttatgttgaattattttcatcatagagttaaacaagggtcatatctggataggactattgtttgttgattgagaatgaacatgaataagttagttttctgattctcctttctagttttgccacccaattcatctgagttttcttatttaggaaaatttcttttatttgttatttattatttcctttgtagcatttttttaccttaaaaaatatgaattcaaatgccttttatttgtgatgatgtgcatcttatgttcctttactgcaagttaatcgttttaatgaagttttcttgagattttttactttagtataatttcattatctttattttcagaggaaaccctcaaaggatagacagtaattcgtcca

SEQ ID NO: 12136 - DNA, 10540 bp, Vitis vinifera
  Intron number 11 from transcript GSVIVT01010214001 (locus GSVIVG01010214001) derived from phytozome v7.0 (chr-ID chr 1; pos 17638899 to 17649438 reverse strand)
acttgttgagtcagctggagccatttattcaccaggtataactctagcccagttttctctcgatacaagtgttaaattgggtgggatactctattatagctgatgggcaggaagtatcaactacccatggcctgtgccatatttattatggcaaattttatggttcaactggtgctcaacttgttttacaatttaagtgtgacaattatgttattgaattgactttcttcaatgctccgtcatttttcaagcttctgaaataaagttattatgtagatcctaataactagatattccaattccaaagtgggtatctgcttaatgggtaacgtatgcccatgtgtctaggaaggatttccaattgaccatgttcttaaggtttcatagacatgtgtaaaacagtgtattaccattaactttgcatttaggaatagtaatggatgagatgttaacattttggttagatggtcacacagatgtccttggaaagctagtacacaagtttttcaagacttttccccatacgcttgctttgtgatgaggaatggggagagaatccgattctaggaagatttatggtggggagatcaatccttgtgttcacaatttttaggtctttgtagagatgtttcaatgagaaatctcatcatcttaatcgtccttggtaattcctattcatcttcttggaattttaacttctaatgcaatgccacttattgagaaattgaacttctcaaaagactcatgtcttcacttagtgtacttgtatctttctaccacatattcaagagcttggtctttaccctcctttgatttattcttagtgaaatcctttttcatagtcttgtccaagtccttaaatccgatctcattccttccaactaattttatttggaaatcaaaagccccttcaaaggtcaaggcctttgcttagttagtgatgcacaagaaggaaaataccaatgacatgttataggtgagaagaccctatacaaagggagtgcagaatcaattgagcatctttttctacattgcccgataacattggggctttggcataagctctttagggtggctaatatggaatggtttccttctaggagtattgaagaaatgatgattatcttatttagaggattagggacttcaatcagaggcaaaactctttggcatattgcttgcttcactatattgtggattgtgtggtaagagagaaatgttaagattttttaggaaaagtgtagaacagaagggatgttgtgggatattcttcacttctactccttttggacctcttatatggccacttttagaggaattccactttatgttattcaacttagttgccttttggtttgtaattaggaagaggtggataacattgagagagttttgatttcagtttttaggatattttgtacatgcctttatgttgaggaggatagtcttactctgattaggttttatattttgtgggaagaacctctcatccttcttttgaaccttactattatcaatattgttttgtttctgattaaaaaaaaaatactataatgaaaactttttactaaatgcatattgaagctaggctttagataccatgacaaatttttttccacaacaaaagatccttttttttctgcatttttggtatttgctcctttttgtgtattatcttgctttcttttactccctttttttgtgtctaaggagaaaaggcaataacaacctacaaagtcttgaatcaaagatgttcatccaactcaagttcaattttgatggttgtgatttgaggaaccttgattagttggggacaagagggctaataaagaccataatgatattgtggttaaagctttttcaaaacttacaatagaaggcttatccattaaggcaaaattttagcctttttagagggcttgtagcaaggaaaggctttaacctttctaacctataggtggaagggggctttgccatattgatatcttgggtgactaaattagaaagagggatttgaaggtgtaatgggtggctccatcaaatattagatgtgacatgcatcttgatctattctttctcttggtgtcattatttaaccgataatgttgctgatattttaacaaagagaggagcaatgctctgggttcattttgttagagatttattacccccttgaggagtgtcaagtcgcttctcctttatagtttcatgcggtgctctagcgatatatagttctccttactcatggagaagtttcctccaactcttcttttgattagattttgtaaattttgcaaggatttcccatcctccatttatacttttgaatccatatcaataaatatgcttctttatgattaaaaaaagataaaatgctcatctgtgtcattgaagccttaagatgaagccctcaatccttgccatctcccaatcattcagattccttgaaaagcgagggttccaatgccctctcttgccttactgatcccaaacatctgctgcccaagcatactttgtcaaaactatggaatacaaagatgggaaagactctcttggagatgaatcacaatgatttatcttttgaaaacttcatccttctcccattacccatgctaaatgaggttatgttgttaatattatcctaacctatcctgatggcctttcaccaagtcgcatagtttcctaagacactaagttgcctcctcctctccacactttccaacaataacctgcttcctgagggaatcattctctaaagccaaccttcgaatccacttacctaatagcttttttttttatgattgagagtttaataatatcaaggcctccactatgtttttccctacaagcggttgcttatctcacccaatgtggtttctttaaatgatctccctccccataaaaggtctcttggaatcttctcaattctcatgctcactttcttaggcaacacaaacaaagtcatatggtaaatgggcaagcttgatagagtgctcttgataagagtaagattgccaccttttgaaagatattgccttttccatatagccaacgtcttgtgaactctctctgccactcaatgccaaccagtccttgatttataggggcctactagaggtagacccaaatacacgataggggagttccccctttctacagccaaagtcagccaccaactcctccacattgggaacactacctactagaagtaactcacctttctccaaattgatctattggaaatggtttcaaaccacatgaagatctaacttagatagagcacttgttatttattgtatgattataaaagattttctaataagtgtgtgagacccactaaaagtgcaacgtattaatacaaatcttcctagacatgctaattaaaagttttcttataatagcatttattttgtaaatccaccaattacaaaattatagtttttcatggtaaccaagtgcatggactatcaaatggggagagattctttatagcatgtgaataattcctcttaagaaaggggatagaatatttttcaatttttaattttgagatttcatgaattaaacatgctgagggtttacatttgctttgattagaaataaaattttcaagtaactttaaattcagttgttcatgaaattcatttctttatgcccttataaaaaaaaataaagaacaaggaaaaagacttcacattttttttttggtcaaaaacaagaattgtgttaatatcgtgtaaagatttcatgagagggatgaagaatccttaccacaaatatgcaaacctaatctaaagcattaaaaacttctattatacaaggagatttgtacaaaaagaatgcactagaggaacctctcctaaaaaaaaaaacagctaggctcctctcaatggtagcccagccctaatggtgtacatattgcaagccaactgagctgaatgacgtttaaaggataacttgaaaaaaaaagaaagactttacatgaaggtagcgtaggacaaaggtaatagtaattcgatttttagcactgtagaattattgtgctaggtaatacctgcaagcttgctaaaagtctatatgatttaatagaattattgtgttagataaattattgtattatgaaaggaaaagtatttttaatagttctttaggcagataaagattctttgtagttgaaattttatacaagaaggatcaatataaagaaaacaaaggtttttttatttgatgattaatgtagaagtgaaatttcaatttaaacattataaaattattaaaacattttatcacattttgattttaagtcattagttaggtctttcttacttattgccttaagctatattaggtgatattcaattgatttttacttttaagtgattagtcacttatattattgttgaaataatgccaaagttaggattttaatttagaaaagtattttaggaataaaaaaggagagatcatttaggatatttccttatgattcagtttcctaattttaggagagaattaagctagattgattttttcttattcagtcatttgtgtatatatatgtgtatggtgtgtaccgaataaaatcaataaaggagttcagaaattcttcatggtatcagagctagttttctgaaaccctaatcccttctggccacctcttattcaggccatcattcattccggccaaatctctctagccatctcttaatccgaccatctctctctctggccatctctcattccggtcatcagtccctattctcagaggcaagggagaaaacgctttccggtcggtcgaatcgtcgtcagaaaacattcaccgccggcaacttttccggcgaactttccggcaacggtttttttctacaccgcaaggagcgcctggaggagatctccaatttgtcccaaagcaccggaaccagaaacccatccacgcgccgtccacgcgcgtttttccggccggcgactgcatctcacgcgccggcgcgtgagccactttccggcgacgcgcttcctcctccaagctcgcctgacgccgaccagccacccttcttacctgcatccgagccctgcacgtgcctcttttggggttcttttgcttccgtgggcccttcgatcagtttttccgccgtcctccggctattttttctcaactccaatccctgcacgtgccttgggaagtgttcttctacctttccggtccatgacaaaatacggaatggcatcatcacaagtatccaacgtcacgtcaccagaatcagggggcagatctgaaattccaaaccttagtggcaatgattcctctcctattctcatcacaggacacaaattaaatggccataactatttacagtggtcacaatctgtgttgctgttcatttgcggtaaaggaaaggatgagtacctcactggagaagcagccatgtcagaaactacagaaccgggtttcaggaagtggaagattgaaaacagcatgatcatgtcatggcttatcaattccatgaacaatgacataggagaaaatttcttgctgtttgggactgcaaaggacatatgggatgcagccaaagaaacttactcaagttctgaaaatatttcagaactttttcaggttgaatcagccctacatgacttccgccaaggagagcagtcagttacttagtattataacacactcacaaggtattggcagcaacttgacttattcgagactcactcatggaaatgttcggatgatgcagcaacatacagacaaattgtggaacaaaagagactgttcaagttcttcctaggactaaacagggaattggatgatgttagaggccgaatcatgggcattaaaccccttccaagtctcagggaggctttttcagaggttaggtgtgaagaaagtagaaagaaagtgatgatgggatccaaagagcaacctgccccaacattggatggctctgcccttgctgctcggtcatctaatagtagtggtggagatcgtcagaaacgagataggccttggtgtgattattgtaagaaaccaggtcattataaggaggcttgctggaagcttcatggcaaaccgactgattggaaaccaaagccacggtctgacagagatggcagagcacacgtggctgccaactctgagagcacatttgttcccgagccgagtccattcaacaaagagcagatggagatgctacagaaactattaagccaagttggcagtggcagtactaccgggatagccctcactgctagtcgaggaggaatgaagccgtggatagtggacacaagtgcttctgatcacatgacaggagatgctgccattcttcaaaattacaagccaagtaatggtcattcatccgtccatattgctgatggttcaaagtcaaaaattgtcgggacagaatctataaaacttactaaagacttatatcttgactctgtcctccatgttccaaacttggattgtaatcttttgtccattagcaaattggctaatgatctccaatgtgttactaaattctatccaaactcgtgtgtttttcaggacttgaaatcggggaagatgattggcagtgctgaactgtgttccgggctctacctcctctcatgtggccaattctcaaaccaagtctctcaagcaagttgcgtacagtctcagagtatgttagagtctttcaattctgtgtcaaattctaaggtcaataaagatagtgagattataatgttacactatcgccttggtcatcctagctttgtttaccttgcaaaattgtttcccaaattatttatcaataaaaatccagcatcttatcactgtgaaatttgtcagtttgcaaagcatactcgaacagtatatcctcaaatcccatacaaaccttcgactgttttctctctagttcatagtgatgtgtggggtccctcccggataaaaaatatttctggcactcgatggtttgtgacattcgttgatgatcatactcgggtaacatgggttttccttatgaaagaaaagtcagaggtcgggcacatttttcaaaccttcaatcttatggttcaaaaccaattcaattccaaaattcaagtcctcaagtcagataatgcaaaggaatactttactagtagtctcagtacttatcttcaaaatcacggcattatccacataagttcttgcgttgacaccccacaacaaaatggggtggctgaacgcaagaatagacatctcttggaggttgcccggtgccttatgttttcctctaatgttccaaactatttctggggggaagctattctcacagctacctatttgattaaccgtatgccatccagagtgcttacctttcaatccccacgtcaacttttcttaaaacaatttcctcacacccgtgccgcctcttctgatttaccactcaaagtatttggttgcacggcattcgttcatgtgtatcctcaaaatcgtagcaaatttgctcctcgagcaaataagtgcattttcctagggtattctccaacccaaaaagggtacaaatgctattctccaaccaacaaaagattttacaccaccatggacgtctctttctttgaacatgtcttcttctatcccaaatttcatgttcagggggagagcatgaatgaacatcaagtttgggagtctcgtcttgagggtgtaccttcttttcactcaaagtcaccaaatccttcccaattcgcgcccactgagttgtccacacccatgccgtcatcagtccagccagcccagcacacaaatgttccttctcccgtgaccatccagtctcccatgcctattcaacctatagccccacaacttgctaatgagaagttacaagtttacatcaggaggaggaaaagacaggaattagagcatggatcacagtcaacatgtggccaatatattgactccaattcaagtcttcctgaagagaacataggtgaggatagggctggagaggtgttaattcccagcattgatgattctactctgccgattgcattgaggaagggtgttaggagatgtacagatcatccaattgggaattatgttacgtatgaagggctatcaccatcttacagagcatttgctacttctcttgatgatactcaggttcccaacacaatacaagaggcattaaaaatttcagaatggaagaaggcagtacaagatgagattgatgcacttgagaagaatgggacgtggactatcacagatttgccggttgggaagaggcctgtggggtgcaagtggattttcaccataaaatacaaagcagatggatcagtcgagagattcaaggctcgtttggtagctagagggtttacacaatcctatgggatagactatcaggagacttttgctcctgttgcaaaactgaacactatcaggattcttctctcattggctgtcaatcaagattggtgcttgcaacaactggacataaaaaatgcgtttctaaatggtgacctagaagaggaagtctacatggaaataccacctggtttcgaagaaagtatggcaaagaatcaggtttgcaaactccaaaaatccttgtacggccttaaacaatctccccgagcctggtttgatagattcacaaaagcagtcctgaagctgggctacaaacaaggtcaggctgatcatactctatttgtcaagaagtctcatgccgggaaaatggccatattgatagtctatgtcgatgatattattctatctgggaatgatatggaggaattacagaatttgaaaaagtatttgtcagaagagtttgaagttaaagaccttggaaatttgaaatatttccttggtatggaagtggctagatcaaggaagggaattgtagtctctcaaagaaaatacatactcgatcttcttaaggagaccggtatgcttggatgcaaaccaattgatactcctatggatagtcagaagaaacttggtatcgagaaagaaagtacaccagtagacagggggagatatcagtggcttgtcgggcgcttgatttatctctcacatactcggccagatattggctttgcagtgagtgctgtaagtcaattcatgcacagccccactgaggaacacatggaagcagtctacaggattcttagatatttaaaaatgacaccagggaaaggtctattcttcagaaagacagagaaccgtgacactgaagtatactcagatgcggattgggcaggaaacatcattgacaggcggtccacttctggatattgttcttttgtctggggaaatcttgttacctggagaagtaagaagcaatcagttgtagccagaagtagtgcagaagctgagtacagagctcttgcacagggaatctgtgaagggattttgataaaaagggttcttagtgaactgggacaaacgagttcatctccaattctgatgatgtgtgataattaggcagctataagcatagcaaagaaccccgtgcatcatgacaggaccaagcatgttgagattgacagacacttcatcacagagaaggtgactagtgagacggttaaatggaactatgttcctaccaagcaccaaaccgcagacatcctcaccaaagctttacctaggcctaacttcgaagacttaacttgcaagctgggattatatgatatatattctccagcttgagggggagtgttgaaataatgccaaagttaggattttaatttaggaaattattttaggaataaaaaaggagagatcatttaggatatttccttacgattcagtttcctaattttaggagagaattaagctagattgattttttcttattcagtcatttgtgtatatatatgtgtatggtgtgtaccaaataaaatcaataaaggagttcagaaattcttcaattattaaagtagcttaatgaagctcgcaatttttccccttgttagcacttaaatataactatgaaacatcgcttaagttttgatttttttttacttcttttatttattgttgttgttaaatgcttctattgtttgcttagatttattttaggtgttcatgatttatttttgtttttttccacttgttagcacttaaatataactatgaaacattgcctaagttttgatatttttttttttcttcttgtttgcttagatttattttaggtggtgatgatttatttttgtttatcaatcaaaatccatatacttatctattaaggtgtgatgtttttttccacttgttaacacttaaatataactatgaaacattgcctaagtttttattttttatttttattttcttattgtttgcttagatttattttaggtgttgatgatttatttttgatcaaaatccatatacttatccgttaaggtgtatgcttgtcacacctacatttgctcaaggcataaaatttttgtttttattagctttagcaagtactctcttatcattgtcatgactaagtcttcaaactttggttgcttaaggaaaaaacatatggttcccatttgtaaatttgttgtttttcttgaaataaggtattgacat

SEQ ID NO: 12137 - DNA, 6245 bp, Vitis vinifera
  Intron number 2 from transcript GSVIVT01017573001 (locus G SVIVG01017573001) derived from phytozome v7.0 (chr-ID chr9 ; pos 10827695 to 10833939 reverse strand)
ggataaccaggtttgtctttgtatcttcctgttttttgtttttggttttttatatttgcatgtgtccacattggcatattgaatatttaagtttaattgataagtatgttacatggatgccgtgtgggtgtccgatgcagttgtgtgtctcagtctctaatcctttagacctatgcattttagatttttttgaacttggtcaaaaaatatttctaggttgggtactgaccctaggatatatggtaataaaagaaaaaaaaaatatcaattacaaatcaattgaactccccttcttagcatggatctgatacacacaaccgtaccatgtcatgttaacaaggttacaatggttgaagttggagagtcttaacaatgtcatagatgataaaacattctttgttttcttctgatcagaaagaaatgctatcagaagtatttaataatattacatcggctggacactagaacattctgaatatcatccttgtgaataatgtttaaatagaaatcccctatccaaattctagaagaatataattaaacatctgttttagccattacataggccaacctattagcctttgtatagatattattacattacatttagacaaatatcaaaaccaaaaataatcaatctgatgtgtgatatatccttcattaacatgcaaaaacataaaaagtagcttaagagtattcctaaatgcattaacctcaacttgagagtcaccttcaaaataagttcttccttgattaataacaaacaatagtctctcttgtataactgtagttttctgactataacagaagtatcactaatgaatttggcggttgtgaacttcatacctttattattatcctgtaaaagccccagtaaaagtctcttccttatgtgctcattcttaagttctgcttggttgctgagaaaaatattacaaaatgaagaaattaaaaaaatttcctattatttaattttttattgttttggactaaggaaacaaaaattattcactgaagagagcctaatgtcataggatgcttcaaatgagcctcctcatgggtttatatagagcccaagaagcctatggagactcctggaagccatctacattaagccattggagggaagagtgttgaaggttctagagatgcctaaagatgtccacacatctttgcactatggtggaaggcatgagaggagtccaaggttttctagagaattctaaagatctcttgtacatagggttgtacgtagaatagtgtagggtattctagaatcttcttgatttgtaaggtatcctccaaagattccagagagttctattggtgcctataaataggtgaggacctcatttggccaaggcaccacccaaatcacttcctaaccaagcaagtgagtcttcaaagcacttgtaaaggcttccttgagtaatgagagcttctattctctaaaagttgcctactacgccttctataacttccgagtcccgagtgtcttagcctagcaagctaagcattgggagtaaggctgacttagcaagatcaagcgtcttgacttgtctaagtgccgcacgagcttagtaaacgactaagtccgtgacactaaggagtaattttagaggcctttttttgaaacacaataagaaaatgcgacattttaggcaatagtaaattgggacttgtttgggaatgttttcgaaaacagttctcaaaaatagtttttgagaataattttcaaatatggttttctgatattttctaggataaaagtttgtttgagaacttgaaatgttctcaacctatttttaatttcttattgttttggacttaggtaacaaacaatatccattgaagagagcctaaggagtagtttaaaaaatgatttgggctacctggttttagaagccattttttgaaaacacaatcagaaaatagggcgttttagagaatagtaaattgggacttttttggaaatgttttcgaaatcagttctcaaaaacagtttttgagaataattttcaaatatggttctttgatattttctagaataaaattttgttttgtaacttggaatgttctcaacttattttttatatttccaaatgttttaaaaaaaaattacttttatatgatgaaataaatattgttgtacttgaattgtattagaatacaatatgttcatcctatttatacacaattgggaagtagattcccctaaaatctctcccaaatcaggaatcatattcacctacaacctatcatcctataatctcttccataaatcatattctagttctaccaaagaaagaaaaggaaagaaataagtataaaattatttagaattttccagcatatgtaatactttatttttaatcattttccatatgtttacaattattttttaaaataatctttaaaaaataaatgaaaacaattaaaatatgttcttaaaaaacaccttgtttttataacaattctcaaaagcttgttttgggaacaattgacagtcaaatgtgttttcatgttttgtcttcttcaatgagaagattttcggaagtgattgatgaattggatttgagggatcttccccttcaggggggtccattcacctggagtggaggtctgaacaatcaagctatgaccaggttagaccgcttcttggtgtcggaggattgggaggatcactttaagggggcggtgcagtgtactctccctaggcctgtgtccgaccacttccctattctattggatgggggaggggttagaagaggacctgttccttttcggtttgaaaatatgtggcttaaggaggagggatttaaagatctgttgaaggggtggtggcagagtctaagctttaatggctcgtttagcttcatccttgttgagaagttgaaggctttgaaggctattctaaagtcgtggaataaggatgttttcgggcaggtgggtgtcaataagaaagtggccctggacaaggtaaatttctgggatggtcaggagaagcttcgccccttatctttggaggaattggaagctagaaaggtagcaaagggggacttcgaaaaatgggctctaatggaggaggtttcttggagacaaaaatcaagagaagtttggctaagggagggggatagaaacacaggttttttttcacaaaatggctaactcccatagaaggagaaactgcctgtctaagattaaagttgacggagtatgactaacagaggagcaggagataaagaggggtgtggttagagctttcaaggaccagttgactgacccggggggctggcacccttctatggaaggtctggactttaatagaattggtgatgaggatgcagctagactggaggaggtgttttcagaggaagaggtcctcaaggctctttcagacctgaacggggacaaggctccgggtccagacggctttcccattaggttttggcaattttgctgggatgttgtcaaagaagagattatgggttttctgttagagtttcatgagcgcggcagattcgttaggagcctaaatttgaccttcctggtcctaatcccaaaaaaacctggagccgaggaccttagagacttcagaccgatcagtttggtgggcggattgtataaactgttggcaaaagtgttagccaacagacttaagaaggtagtgggcaaagtggtgtcttcagctcaaaacgcttttgttgaaggaaggcagattcttgatgctgcccttattgccaatgaggcaatagattctctgttgaaacgaaacgagagtgggttgttatgtaaattggatttagagaaggcatacgatcacataaactggaattttttgctgtttgtatcgcaaagcatgggatttggggagaagtggattgggtggatatcctggtgcatctctacagcaacgttttcagtattgatcaatggcaccccggaaggctacttcaacagttcaagggggctgcgtcagggggaccccctatctccttacctatttgtgataggaatggaggtccttagcaggctgatccatagagcagtggagggagggttcctatcaggctgtaaggttgatggaaggggtgggaatggggctttagtctctcatttgctgtttgccgacgacacattagtgttttgtgaagcttctgaagatcagatggtccacttaagctggttgctgatgtggtttgaagccatatcaggtttgagaatcaacttggacaaaagcgaaattttaccggttggtagagtggagaatttggaaaatttggctcttgaggctggctgtaaagtgggtaggctgccttcttcttatttggggatccctttgggggtgaaccacaagtctgtggctgtttgggatggggtggaagagagatttcggaaatggctggccttgtggaagaggcaatttatttccaaaggagggagaattactctaattcggagtacattgtcaagtatgcctatatacttgatgtctttactccgaatgccaagagtggtgagtctaaggttggagaaaattcaaagggatttcttgtggggagggggtgctttagagaggaagcctcacttagttaattgggataccgtttgcatggataaaaggaaggggggtttgggagttagacgcctttccatccttaatagggcccttctttgcaagtggaattggcggtttgcgattgaaagggagaacttttggaggcatgtcattagtaggaagttcggggaggaagaaggggttggagttctagagaagttagggagagttatggagtaggattttggaaggaaataaggaaggaaggtgcccttatgcaaaataaagtcgcttttttagtggggaatggtagaagggtaaaattttggaaagatatatggtgggggaacttccccttatgcaattcttttccctccttgtatgtttttgcttcctctaaggaggcttgggtagaggagttttgggacacttcgggagtggaaggggcttggagtcctagattttctaggcctttcaatgattgggaggtggaggaggtggagaggcttcttttgacaatccgaggtgcaaggcttagtcctcttatggaagatagaatgatgtggaaagtgactttgaatgggagtttttcagttaaatctctctataatgatctatcttcaagaagagctggtcttttccctcatggtttgatatggaaccctagtgtgccttccaaagtgagtttctttgcttgggaggcttcttggggtaaggtgcttactatggatcagcttaaaaagaggggatgggctgttgctaacagatgttttatgtgctgtgaggaagaggagtcaattgatcatattcttatacattgctccaaggcaagagctttatgggatttattgtttgccctttttggagtgtgttgggtcctcccttattcggctagagagacccttattgaatggaggggctttatgttgggcaagaagcatagaaaggtgtggaaggcagccccgttgtgcctcttttgggcggttcggatggaaagaaacaggattgctttcgataatgaggacttttcggttcataggttgaaaaattcttttgtttgtaatctttgggtgtggacaaaatcaattgtaaatgaaggtcctctcactttacctagttttcttgattggctaggcgctagatgagggttgggtttgttttttctcttctcttgggtgtgccttaagggtccttttgtatactccctgtatgctttgggctttccttttggtgcccttttctaatatatttctgcttttgcctatcaaaaaaaaaaaaaacaaaaaaattgaacttaaaaacaattcctaaaacatagcctcgtgctttgttttctataggctatcgacaaaggtaagatggagataacatgcaaaaaacaatatattaatattgtgtgttcttagtttcagaagcctatcctggaaatttttctcagggaacataattaaataagccctaagaccaaagattttattgaatcttttgttttctttatgttttcttttccagcctctaaattagtgttccttaaatgtgtgtgttgtgaaattcactttgtttcatctgctcttgattattgcatttatttatttatttttcataatttttggtttgttatctgtgctgtttttaagttgaacttgtataatcaattgcatcttgtataaataatttcacaggtacg

SEQ ID NO: 12138 - DNA, 13305 bp, Vitis vinifera
  Intron number 3 from transcript GSVIVT01025657001 (locus G SVIVG01025657001) derived from phytozome v7.0 (chr-ID chr8 ; pos 13225736 to 13239040)
atatcaagagcttaattacttggccttcacagagagttaataatggaggacagatgcgcatagcatcagggatttcaaagacaaaatagtggagggatgtttatacattacagcccaagcatatgttgatattatttcattataattatactatgtaaataatagagtacttgtgagacaagggcaactacatcatatatttgtgaatattgatatgcataaatatcattgtactttcaaggtttgtgaatcttcagagaacatatttgctgcagtgtagacattaaagtgcttcctataattaggtttattaagttactaatttgacccaaaagcttaaactgttctgtaatgaaccaacaccctccctcatatgtgggcccatactcatacatgtggaggtaaaccatacatcacagataacaaagaaacagaagtggggataaacaaacagaaaaatctgaacacaagacctcgagtgaactaaagctttggtaccatgttaaaaactaatttgacatctgatacaatgttagatgaccaatttgatcaaaaagcttaagttgttgggtaaagagttaaaaatgtaaaccatacaaagccctctttcacatacagatccatacccgtacttggagtggtaaatcacaaatcatggatcacagaaaaaaaagaaaaaaaaaaaaaaaaaaaagagggtggaataaacagattgagacactcgaacttgagacatctagttcactaaagcactactactatattaagttaccaaattaaaccaaaagcagaatatgttaggtcaaggaccaacaatgtataatgttagttcatatgttctcatgcttttaattataattgacaaccaatatttaggactattatatcttaaaaattgagaacagacgtatgtatgacaaactagatggaacatccccgtaatttacccacatatataaagacaataagtttatttgtgaatttgaaatgttaagtatcctcctaattattttcaatgcttgtatacccaatcttcacaaccaggcacttctttcagcaatagtacctagacatgacccttttttggttgtcataaacaaaaattggtttcctttccctgaattttactcctatatttcaaaatttatcttttgttaaaaaagggattctatagatattcatatccagaaagttgctacttcattgggcatcttctattgggtggtaataattggttcatttttcatgggactgttggtggggtatcagtgctagaggcttgactgaggtttaacctgcactcgtgtttatccaagaacgaaagaaagaaaaaaaagcataataatgaaaaataatcaataaggaaggtttcacctgcaatggtgcagctggactcttacaacttcccagttgaacatctttgagacaaagggtcattttgacaggctggagcatcaagagagagaagggactgtctgaatggatgaaggtagggaagtgaggctaggattggcatgcagaaaatttggagcaaacaagaaaccccttaatggagaattcagggagaaaataaggttttatcataactccgaggaagattttttggtattcagtttgttctaagaatggaaaatggtattccatcatattctggaggacaggaaaatcactaggtgagaggcaattgctcccaaaccagatttttcaacaaatatggagagggtaatcatggtaacccttcccagtgaaaaatcaatagagatgaacaaagacttgtctgcttgtatttagaaataatatacagcagggtaagacatgagatgagactgggtgctattgacagtgagatatcctgtaagagggaggattgtccatttatgaataatcctatatagaatagacaataaaagtacaactgtacagaatagactataaaagtacaaaaataaatctgggaatattacatgatatataacaaaaggaaatcaagtcaatttatggaaataaattgactaattctattagagaaagagaccatcaacaaatcaatgaataatcctatttaattcccatttagattgtaagacaacttgatagaaccaaaatccttggtaatgaatttgtgatcttcaaaaaacacaaacaaatggagtaaacagaaaatgctatggaaaagcagatttctttcattgccttaacatggttacaataaaatgcttgcgaaggtggaaataaaagctcactaactcaaaggccttttcttggtattccctcgcacacactgggttttgtgtcaggaatcatctttgcattaattgtattcccccaagtgttttccactatacctaacaacatgcttgctgaagatcgtgatcccctacaacaagcttccagctgctaattaatccaagggtttaacacagtgaaatctgcaacagttcttaccttcttttaaatctatgtcttctattcttctattttaatttatttttttcctatataggtgtttgccatatttgagactttaattgtcaagctgaaggaacatgactgtgagtgtccccaaatgaagatcttgttgctgcaaaaagatcacaaacttgctaatgcttttaggacaaggaatgaagaaaccaagtgtgcctcactgttacaagcgtaagttaaaatgcttgaaaaactagtagaaaaactgaaaaagagctttgttgatcaactatagaagaatgtcttaataatctaagagaatgaaaagttatgaagggaagctaaggagcaaactcaaaaagttgaagccaactaaatcactattgttggaagttggaactacaagctacttccactagacaattggaagagaaagtgaatgtgtcttgaaatcttggttatgatttaggctataaggtactttcactagacaattggaagatttcattagaagccaaaggattatgaacctaaggagaccatatcttcgtttatcagtatatgatgagggaaagtagcaagaatgataaacaaacctaaggagcaagtccaaatccaggtggttcttcaaaaccctcaacccaagtacactaggcaactctaggcattccattcctaggcttcaagagtatggttcaagcttctttattaaggagggtgtagctaaaggattatgaacggatactattttttccccattagatcctaaggggaagaaagttcctaggtcttcagtgagatcaagagatggtagtgctattagtttttagagatagaggcctactcattattcttatgctaggccacaaacaaatttgagcccactttcctcacccatagtatgagtattagcaaccttttgttcaccaacccatgattgctcggactagcattcaatcctaactatcatatttgagacccaactacctaaggcatatgctcgagacctaggaggtggtacactccacttggcatgtccttgacccaacctttccaaaagcgctagaaagccaaacttttgacttctttagcactatatattgcctcagccactaccactacatttccgtctaaatatgtactatgcttatcattaaacacaaggtcatgatacaaattattacattgtgctccacaataaaatcaaagacctaattgatgcagaggtgatcaacttatgaacccttagtatgacaccaaacccttgcctactcatactaatcatgtaatgataactcccctactagccttcattagatggactttggtaatgttaatgactttgtacaagagaaggtcaaccaaactgcaatctactttgtgcatctattgaggcaaaccaatcaggcccttttttatgatgtcattgatactatcaaatcctaacctcatcaaattagatgatgattatgtcggtggttacaattttgttactaccggtattcatgttgttcaaccaattgagaggccactatttgtttagacttcagactctgcaaacttaagtgaccctgtttcgactccctgctatagatcaattaccctattcatgttggctccaaacccttacaatgatggtacaaacatatagcttctgacgcataacagttgagtagctcaacaacaacccacatagtataaaccacttgttgaagagataatgggagcacaaatcaggtaaaaggatgatgagatcatatggtaacttaagaggacctaggccaacctctacatttgggccttcttgcataagatggttaaaaatactttattttttcaatccaatcgctcttttgattttagaaaaactcacaagggggtattagtgagaaatctaatccaatacagattgcttcctccacttctcccagtgagctagttcacatggttactatagatcaagctacctgaatagcattctcagataacgatttgcctaaaaatagatttgatcacacccatcttctttatattatagtggttattcaaagcaaagggtcctattgatgtggttagacaacaagccaacccttgatgtttgcccattatctgtcactattgttttgggattcaaacttacagacttcagttcatcaatccatcttgtgtgaacctatgaaaaagccattcgggaggtgagtggtacgttgatgttagggatacgggctagtctagtaacattccccaccttattctaggtattgaaggtgcccagatccttcaacctactacttagataaccttggatacatgaggctcatgcaattccatcttcccttcatcagaaggtgaagttcatacaaggaggctgagtcattaccatacatgcaagtggagatgtttcattgtcctcaatacatgatgacttgtttcttactacatttacatttgataagatctggacgttggagttaatggagccttattgtgatttaccattttcttttcatgatcatggtagtcaagtagtggctgaaatgttgagggatatgatctatttgcctggtttaggattgggtcgttgacagcaaggtattgcaaagtttattaaggtagtcaactaggatgtaccatttcgcatcaaatatacacctccagagtgagatctcattcaagtatcacaaatcccaagctagggcattagcacaacattgagatgagtcattcgaccatcctatcaagcttatgggagcaaatgggtaaattattttgttaaagtgggaagcatagcattgaggcggcctatagtgggccatgttgatagtttagttgctagagatgggtcagagatagaggagatgttccaacaagtgtaagtggatgatggtctaagagtttcattgaaacaaagtggtattcttacattcccatgttgtgatcgcatgatttccctttactttccaattgatatcaatgcgtataaggacctacttaagtcaatcatttagatagataaggatgttgccagagatgagaaccatgatgagttaaatattataggcatgaaataggtgggagtcttggagagaccaaacatgactagatcaaccaatatccttaacttgatgatgatgaccatgacagttacagagacatcgcagccaagtgcaaagcttgtctggttagagtttgttaatgagtctatactgagttttaatgagtctatgcgttaagggagagggttttttgtgctttcttagtggcttgggttcttttgtaagggagtgagttgttctacactgtatctatttaagtcgcttctttagtgcctcttttgcaatacacatattacttacagatcaaaaaaataaataaatgttgagtatggtttggtgtctcaagttgatgatgtaccccctttctttcatatatgatacaagttcatttgagtatttgtttgtcttgtgatggcatgtgcaccacttcatatatgaggtagtaatcatctagcactgacataatgaattaaaggaaaagtttgggtctcgcacctcaaatggtgagtcccttaactttgtcaagggtcacactaacttttaaaaccgcacccaccatgaaagatacaaagaccattggcttaagattagaggaccaacttagagagctctagattgggacttcaatgtcataagatgagagcacaaaccttattcaccttttgagatcctactttgacatatttgcatggtcttatgagaacatgtctggccttgactccaccattgctcagcatcatttaccccttttccctcatgctaagccaatcaagtagaaattgtggagaatgaactccaagtggagcttacaagtgaaaaaagagattatgaagtagttcaatgttggatttttcacaatattggagtattccaagtggttggtcaatgcaattcttgtacctaagaaagatggtcgagtcaaggtttgtgtagacttcaaagatctgaaaagggctagcactaaagatgattccctattcctcatattggcatgatagtggacaacactgcatgatagtggatactcaagtcataatcatattataatggcttcaaaggacatggagaaaacatcatttcatcactaagtggagcacatacttttacaagctcatgccttcatgatatgatgcattgagatatagaggtgtatgttgatgacatgacaatgaagtctaaggataaaggaggccatttagcaacattagagagattcttttagaggacctagatattctaattgaggttgaatcctaactgcacatttggtgtggcttctaggcaactactaggggtacatatcgatgatagaggcattaaggcaaatttagataggatcaaagtcatccttgacatgcttgtgccaaagacaaagaaggagataaagggatttttgggaagattatagtatatcaacaaattcatagcttagttaactaaaatattttttttttgataggtaaaaaaaatttcatatataaatagagacgccaaaaaggcgactcaaggtatacaatacctatacacccacctccaataaggccagaaagaacctaaatggcccaaaaaaacaaccttaattagagcccaaccaatcaataaaattagttatagttagagggcattcaactataaacaacttagtctcagaccaaaaaaactgaataaaagagtatttcagtttctgtattgacaacatatcatccttgaaagccaatctatttctcgccttccaaaccatccaaaaaatgtgaagaggagcagctctccacaccttcttgcactttttgcccacaaaagaatcatgtcagcttagaagagtctctctaactgaagaaggcaacacccaagacacttcaaataaagtaaaagagtaaatcccataaaacccttgtttttgaacaatgtaggaaaagatggtctatggtctcctctttttcaagacacataaagcatctatttgccaaagctcatcttcttttctggaccatatccaaggctaaggttttgccccacgtagcctcccacgcaaagaaactaatcttgggctgcacattcacattccaaatgcagttagaaggaaacaaagatagacagcccgcttttaagggcaaagtagagagacttgaccgagaattttccactctttgtttcagtccatgacaccatatcatccacatcttcaagtactctcttaccatgtagccgctccgaaagtctttccacctcctctacctctcaatcattgaaggctcttgaaaaacaggggttccaacccccctcaaccaaagggtcccaaatatctgccacccacgcttccttatcaatagtcaaagcaaataagaaagggaaagacacacacaaaggggaatccccacaccatctatccctccaaaaactcaccctctacccattaccaacaatcaaaaccatcctatcacccaccaactcccaatccatccttattcctttccacagccccataccatgagcctctctcacatcccgagagcaccaaccccctctatcttccccatacttccctctaaaatatgtgagccaatttttcagattattgaagagaggtcggttaactattagggatgatgcttgttaaagagcatttgagaggatctatacatatttattatcaccaccagttgtcatccctctccctgtacacccattattgttatatttatttattactcatgttgccttggtatatatgcttgctcaacatgacaacacaatgaaagagagagccatatattacttaagtaagaaaatgctagattacgagcaaagatatgtgatgatagagaaaataggtttgacattggtttgggctaccaagagattaagacattatttagccaagcattgaatgtgccttatttctcggcttgatcctttgagatatcttgtttgataatgatgcagcacatgatcatcattagtttctatttttcatttcctacatcattagtttctatttcctacattattagtttctattttagattggtttctatttctacattattagtttctattttaggttcatcattagttttctattattttcctagttttcctagtttccaattaccttggtttcctatttcaatcatttcctttatttttgcattacaaactttatttaaaggcttattgtaattgtaagaagttcaatataatttttcagaattattccccaatttttagatcctattgtgaattttgtgtttgtccttagagtgttttttttttgtttcgttttgaaacaaaccttctgctgcaccaaaattggcatcacaacaaggatttttacctcgatctgatggctaatgacatttctagtggaaaacgaattatcgataacgaacaatggttcaaaaaaatcgagcaacgaccttagtttccaaagactcaaggcttcttttgtttattttctttggtcggagacgaagaggtctataaaagatggtccctcgaccttagttgattttgttgggtgggtggcttcccgttaagggtgtggatagggtggctcttcgttccttggcaggctgctagggagcgtggggtgtttttctttctttttcttttctccttcttgtactttttgccactgcttcggtggtttttaatacaatctctttatttatcaaaaaaaaaaaatcgagcaacgactcaaagggattgacgagactcttcgcaacctcacgtagatggtggttgcgttgactattgaagggaaacatgaacccatggagcgacgaccaaaccaatgtagcaactggcaagaggacggctacgacaaccgacgtcagccacaaatcaggttggaaatcaatggtggaagagcaattcgtgcaggtccagtcgtaaatcgtgagccctatccattatgagtgtatgagcatcagaatcaaggagctcctaggcgccgtgatgacgacaacctccaacgaggggtcttttatgaccttttcgagatggtgatgattttcgacttccacaactgatgaatattcaacaaaggcaacaacgagggttggatcattcatctagagaagaagatgattttcgtttcaattatcgagctaacaattaaggtcaaaataaccaagaatttaagatgaagatggatttaccaagttttgacggtcgactacacattaaatattttctcgattaggttcatactatagaaaactttttcgactatttgaatatttcagaagaaaatcaagtaaagtttgtggcatataagttgaaaagcagagcttctacatggtgagaataacttcaatataatcgttaacaacaaggaaaacaacgtgtccgtacttgacccaagatgaaacggttattacaaggacgatttctccctccggattatgaacaatttttataccaacaatatcaaaattgtcagcaagccaaccggactataaatgaatacacgaagaaattttatcgattaaatgctcaagttaatttgtctgaaacggaggatcaattaattgttcgttatattgggggcctaaagctagtcattcaagatcgactagctcttcaaggggtttgaaccatgaccgatgcaattaatttagtgatgaaagtggaaaatcaaatcaatagatctacagtgcacacttagagtaactttcaacgaccaagccaagaagcttcttctgctccaaaggggtcaccaacttcaagcaacaacgataatagcaataaagatgccccttcaactcaaaattcgacacagaatcaaagtggaacttcaacctctatttgatctaattctcaaggtcgaaactagcaacaacaacaaatcaataatcacctctgtacgtgtttaaatctaggaaagtgtttccggtgcaactaatcagttcatctttcaaataattgcccaaacagacaatttgttaaatttgtagaagaaagtggtggtgaagaggaacaggttcttgaagaagatatctatgagggtgctgagtttgcagaaagagatgtcggacaagaagtagcgtgcatggtctaacgacttttgcttgccccaaagaaggccaacaactctcaacgacataaaatattccagactcgacgcactattcgtaataaagtgtgcaacatgatcattgactatgacaatagcgagaatgttgtttccaaggctttggtgaaaacactaaatttgaagattgagaaacacccttcttgatacaagattgcatggattaagaagggtcaagaagttcaagtgctagaagtttgcaaagttcctttgtcaatcaaaatgtatcacaaagatgagattgtatgtgacgtggtagatacgaatatttgtcatattttattggggaggtcgtagcactatgatgttgatgccacttataagggtcaagataatacttttgttttttggtggtttgacaagaagattgttttgatgccacaatctcaatcgtcagaaaacaattcagttactaagaaagataagtcgttattcaccaacataacgaacctagatttctttaagcaaattaaggagctgcacgcacgtcctccgaatgagttttctttgcaaccacaaaactcgaggatgagttttcttcaagtggaggggaatgatgcagcacacgatcatcattagtttctattttttgttgcctacatcattagtttccattttagattagtttatatttccattagtttctatttcctacattattagtttctattttagattggtttctattttctacattattagtttctattttaggttcatcattagtttcctatttttttcctagttttcaattatcttggtttcctatttcaatcatttcttttatttttacattacaaacattatttaaaggcttattgtaattgttagagaggagttcaatataattttttagaattgatccttaattttcaaatcctattttgatatttgtgtttgtccttgagtgtttttttgtttcgttttgaaacaaaccttccactgtaccagataaacccactttaatagggaggttgatgaggtggctagtattgttatctaagtttaatgtctaacatgtgacacaaaagtccattaaggaaagcattgttgcaaaaagatgataaagcaattgatgatgattttcctaatgagaacataactataatgataggatgaaaggatggaggatgtactttgatggagtttctaatagctcaagtcataaagttagtgtctcattgatttctccctaaggggaccacattcctagatcatcgaggttgtcattttcaaagggttatgctaccaacaataacatagcagagtacgaagttcgcatcgatgggctacaaacaacattagaattggaagttaagagagttgaaggagtttggtgacttcaaccttgtgttaaggcaaatccaaggtgataagaagaatagagatgtcaagttgagggtctaccacgcatatttggagttattgagttttgatgatataacatacaaacatctacctcgagtgtagaatcaatttgttgatgtgctaaccatgttaccttctatggtggagatcctgattgctatagtaatgcatcttttgttaattgagacaatgacaaccccttcatgttattgctcaattggtgagacaaatgaggtttcaaaggagttgaattatgacagttatcgatttttgaggcatggcacataccaaacatccactatagctaaggataggaaagctttgagatagttagtagttagatttgtgatctacagtggtgtactatgcaagagatcagtcaatggcatattgttatctagatggatctattacaaagtgagttatgcatgatgttcattccaaagtttataggccccacatgggaggagatttgttggcatgaaagattatgccaatagggtacttttagatgactatgaagatagactgcaactggttgtttagagatgtcaagagtgtcgaatgcatggagatcttattcatgttccaccctaaagagttatatgcattgacttcatcttagccattttcaatgtgggttattaacatcatcgagaagatcacaccaagggtgtcttatagtcaagagtacatcttgattgctattgattattttattaagtgggtggaggcagaataccatgctagattgtcatttatgagtggctagtttcattaaatcatgcatcatatgcaatttcgaggtcccccatcatgtgatatctgagacaagtacacattttagagtagaggttgatacttatggcatccaacaccacaaatcatcagcatatagacccccatgaggaaaccaagaagaacataaagaaaattttgaggaatatgttgagtcatctagagattggtcataaaagttccctaatgcattatgggtgtatcatacaacatctttcaagacattcaatgatgttacaacatactccttggtttatgggatggaggtagttttgccaataaagatcgagttgtgttcattcaaagttacactaaagcatcaaatttcagaggcagggtataggtttaagctagatttgatgagttgaacatatttaatgagaggaaattgatagttgttaaccatgttcacacctatcaaaagtagatagcacgtgcctttaacaaatgggcaaaagcctagatggttaaaagtatttgagattattaaaggattagtaggtaaccccaaaggcaagtttaaacctaattagagacaatcatacattatcaaagaattga

SEQ ID NO: 12139 - DNA, 4960 bp, Vitis vinifera
  Intron number 3 from transcript GSVIVT01029180001 (locus G SVIVG01029180001) derived from phytozome v7.0 (chr-ID chr1 1; pos 18895199 to 18900158 reverse strand)
aggtttgtttctgagtcctctttttagatttgtataattattattttctttcttttctctcttcatatgttgctatctcaacaacctcattattgatatggctgccatcgtattagccttttgctttgttttttcttaatgaaagaattgcaaaattttttatcataaattacaagaaaatttcatgtataccaaccataattgttcaaggtgagcctcttttttttattttatttcagtttattgcaaggcttttgattggcctcttccctatttgggtcttccattggggggaacacaaaggcttgtgatttttgggatccggtgattgagagagttgtgcaaagattagatgggtggaaaatcattgggtggaaggataactcttagtttgcttcctctaactgtgtccaccatatccccattaatctctgttgaaattaatggcccaaaggagttaacctcttctaattcccaaccaggaacattggtgatggacctgggattctagtaacttcatgcctctgattgactcagattctccacccttgtagcttgtctataatccctattctaactcaccttcagagtaacttctcaacaccacattttattccaagattttacctaagcccatcccccactttgttgcatttgtatgtagagacctcttacatattactcttcaacaactccatccctcgtgttcccatgcctttctaaaattccacaatctcttgcttccctcactcctcgatggtgctcttctccacaaactgtcccatttcacaatgaacctccatggctatttccttggcaatggtttgttaatgactgagatctttaatactttaactgctccacttcttggagaaaacaccaactctcaatcagccaggtgcatcttatcccctcctcaaacctaccgcacagaaatcctgacattttttcccaatctttctcactagaactgggataataaaaatggatatgaagtatattggtggactagattgagtactggtacgagttactcttgctcacttaaaaagataccgccttttcaaccttttgagcctaacctttatttgaccccaagtttgttgaaggaagagttcccaccttgaattctgacattaatgccaagcattgggtatcctgtaggagccctgcagaaaataagtttaatcttccccaaaattcagcttcaaccctaaaactgccttaaaagcagaaaaacctgaatatgagatatctcaggttttcaaggaatctacttcaataccaaaaagtaacattagcaacatttgcatccaactaaaactgaggtaaactcctgatcctcttctcttggctgcatttgggatctgttcacaacattcccttccactgccttttttaaccaatgtgctgaagtatccatcagcatatccagaccttagtgccctagagcacccataaaaaacctgtgggagatccactgattattaccaagaatataattggtgagatgagccagatgatcaaacccacccatttgtccctaaaatccgtgggaaatgaataagtacataattaaattctaatggaaatgatcataaacccttttgtatatctatattttaatgtcaaaatattattttgcatccggatccacattttaggttctgacatctctccacaagcattctaggaactggaaattcctaccaccatcccaagcttctcaactaaaatctttgctagaaatatatatatatatatacctcttcccaagtttataggcctggaatcttgcaatttcttcatccactccctttatgttaccacaacgatggaataaaggtggcttttatactgttatgaaaattcagtcacatgaaataaggacccattcttgtcagattccctataacaacctcccaactctaccggcaagacactactgccaacgcatgtgatgctaaatccttatccttcctaaatcttttagtgctatcatcagttcttcacctaaacccctctcaatccgcccccttgtctttgtactgaggttggggatagtaaggtcatctagcctaaatttccatcccattggttccaaatacacttctttgaaaagctaagttgctcactactagtctcctcttccctaatcctttactctctgtcaatttttgacttcctaatataattgcttctccattatgtagtttatatgggcccctcttcccaccaaagagctgtgaaccttgtctccaattgatattacagtttcatcaatctcctatattcctttttattcttcattactttgggcatctcatctccctggaaggggtagaggtggtgaaggggctcatgtgtcctacttattgttcaccgatgacactttggttttctgtggggcttctcaggatcagatgaagcatttaagttgaactctaatgtggtttgaggccattttggggttgagaattaatttggataaaagtgagttaatcccagtaggatgtgtggaaaacgtggaggctttggctgcaaaacttggttgtaaggtcggaagtctcccctcctcttatttgggattgcctttgggagctccttttaagtccttcgctgcttgggatggagtggaggagaggtttcggaagagattgacaatgtggaagagacaatacatctctaaaggagggagactcactttgatttggagtactttggctagcttgctcatttatttcatgtttgtgcttactttacctaggacggtcagattgaggttggagcagattcaaagagattttttgtggggaggtgggctcttgcggaaacctcattttgtaagatggatgcttgtttgcttagacaaaagaaaaaggggtttgggggtgaagtgtctttcttctcttaataaggtgcttttgtgcaaatggaattggaggtttacaaatgagagaggggccttttagaatcaagtgatttggggaaagtatggggaggagcaaggaggttggtgctccaaagaagtgagggatgggtatggtgtggggttgtggaaaacaattaagagggagtgacatgttgtgagcaatagactctcctttgtggtggacaatggtcaaagagtgagattttggaaggatagatggtgtggagattcacctttttgtgttacttttcctactttatttgctctagctgcttccaaggacgcttgggtaaaagatgtgtggagtttcattgagggaggggggagttggagcccgcatttctctagaccattcaatgattgagagatggatgaggtgcacagatttttattgggcttcaatgggaagagtgttcggtaggatgtcgaagctagggtgctttagatagagactaaatgtgggaagttctttgttaagtctctctacgaagccttagaatcaggcccttcagtctctttcccatcaaatgtcatttggaaatcttgtgtgcaacccaaagtgagtttttttgggtcggaagcaacttgggggaaggttcttactttggaccaacttcaaaaaaaaaggatgacctttagcaaatagatgctacctttgccaaatgcacgaggaatcgatagatcatatcctcctccattgtgccaagacaaggactctttgagcgttgtttttcactctctttggggtgcagtgggtgctgctagcctctgttaagatgacgctcttggggcgggatgggtcttttgtgggaaaaaagagaagggaagtttggagagcagaccctttatgtattttttggacggtttggaaggtaagaaacagaattgcgtttgaaaatgatttgctgtccattcaaagacttaagagctcttttgtttattttatatgatcagagatgaaattgttcataaaagatggtccttcgactttagttggtttcattgattgggtgggatatcgatgagggtggtttttttggctcctctgcttttgacggctgtttttatgtcccaaccagggaggagggtgcatctcttttgtatttttttgagttgctattttagcgtctcttttcaatacaatttcttttcttccacttaaaaaaaaaaaaaaaaaaaaaaaaatctccctggaaggcccatttccctttccctctatgtcccaattcttaatttctttttgccttgtaactgttacactaccataaacttctcttttccatttgtcaacatttttgtcagcttccaccttctttgccaacctaaaactttaaagtaccagtggacttttagctttcacaccaagctgttctattgacaaaatcatctgccttgagccacattcttcaaacacacacaaccttattcccattcttaatccatcaatgtcaagcaagtttggggcagttcggagcatgagctgatgtcattctggaaagaattcataaggacatatctacagaacgattttctcattctgatgtgatctgacagcaattgatcctggaagcattaagtcagcacaagcacataacttattcattgtgtttcattttctttgatttttgattgttgttatctagatttgcacattctagttccttgatttttgctcttacagtgtccaatatgaactcatttgtcaaagtatattcaatttgtctttttcttattattattattattatttttttcattttatcagctgatctacaaggtgttttttagtactctaatctgagagcagaaattggtatttatgtcattttcttctctgttacaggtttaactctctacaactacatgtttatttatggtgctttatatgctgtttaatttcagtatatttataattaaaatgttcctttccttggattggcagcatttttacagtttcgataactgccggtttcatcagttattgggtccaaggaaaggcaatgacgggggatttattttggcagggtg

SEQ ID NO: 12140 - DNA, 1040 bp, Vitis vinifera
  Intron number 20 from transcript GSVIVT01035565001 (locus GSVIVG01035565001) derived from phytozome v7.0 (chr-ID chr 4; pos 2354906 to 2355945)
ctggtacaatcatctctctttccattcttgacaatatcaaaatgtgaattgtggaacacaatctttgatcaagtcacaaaaaatccagcataaaatttgtattttgcaatacccaaaagatactagctccatcaattgtctgtcattttaacattaaatatcaaaatgccttggcacttcagttttcatgtgtctagcatgtgataacttaaatggatgtggaaaactaacacattgtgaggataatcataaatcccagaaaaatgaaagcatttaacataaaataaccagctattatatataaatgagtatttgctattatagtaaaaaaaaactcctattgatccaagttaaatcacattgtagtcctccatggtataaacttcattaaacatcctcacttttcatattttgcatttatcagtactaagcatatatgtaagtcactgcaaattgatgggttcctttgtcatcttagcatcacctaggcattgctcagttgtccccataacccagagttgcatagtcaccttcacctaaatgtggattaatctgaatcctttatcactgaaaaaggttatggcttattgggagtatgatttgtagctctacaatttctgtctcctagtaggataagtggaaccaagatttggcttttactggtaaaatgctgtaacacaatactgtttgtgttgtcctgttaatgggcattgcattttttctcttctgtattcatcacttatgtgctgtataaaataatctatatgattcattgggttgagtcctctgattggtggcatcaccttctcttactgttctgcagtgctagtgcctgtgacctataccagttattgcactttgttgcagtgccctgagtgctcaagatgttttaaactttatgtcaatggtcattgttacaaatatcatccataatttgacagaatccattacttcagccacatggttcagttgtttgctggaaacttatttcctaggaattttcaggtttcttctgcagtccccgaaggcaagggtgtttc

SEQ ID NO: 12141 - DNA, 6963 bp, Vitis vinifera
  Intron number 25 from transcript GSVIVT01036596001 (locus GSVIVG01036596001) derived from phytozome v7.0 (chr-ID chr 13; pos 18869749 to 18876711)
acaaggtattcggttcaactttcaaatattctctagctcatcgcttattttcattttttgttgccatcaagtggagggactttgaaaaatcatttgcattttgaattaggaaaaacttttttaattagtaaaataaagatggtagaaagtaaataaaattctataaataaataccatacaaatatcctcataactatcaataagttttttatttgaatatgtgaacaactccatgtctttatgagatggtagcttttgataaaacgatgggcaggtgtccaaaatgataaagtaggttagttacaaagccacccttcctagtatgctataaagttagcccgcacctagttaccttctctatttcgaaacaaaaacagttatcttcattcatttttatagataaatacaaggaggaggagcaatccttcaaagctgtacaagaaactgttagaatgtaaccaagtgtcaagccccacaaaaactagcctcatcctgacaaagataaaaccaaggtatacaaaaaagaaatattgcacagtcaagggggaagaaattctccaacaaaggaggcttaaagcatagctccttgtttggctaattggtctgtgacttggttagttgaatgaggaacccaagaaaaggagcaacctaactcactagcaacctctgtgattttgtgcttccaattgtcaaactatcattaaactctttccttattaatcacccaagatattacagtggcaaaatctccctctacatataggttggaaaggccttaagctttagcctacaataaacctccaataatgtcaatatctttgcctcaatagccaacccctatcttgcctgcttagattaggctttcaacattgtaccacaattatctctaatcacacctttaatacctatctgaccagggttgcccaaggaatatccatcaaaatttaactttattgaacctattggaggggtgaccaaccaattataaatttcttcttcgacctttttgagaagcaaatattattccatcgtctttgttatgcttctaggaggaacccatacaatatcggttatgcgaaaaaatctttgccaaagttctaatgtagcgaggcaatcaagaaagagatgattgacttacttactattcttcaaacacgtaacaaaatgatctctagttaccttctcaatcaataaaatatttgaaaatttagacaccattaaatgccagttgtgtttttaaaaatatttttattgtgtgggtgcaattaatcacaaacttgccctttatttttctctttgaagatggaaacttgagatgtaaagttttgattgcacttgtgaataatgggaacttgaaacaaatttactagctttactattggcacttggtgtttaagtgcaaacaggctaactcatgcattccattctaagcacatatccaagagttttccaagtttactcggtttgtggttggggacggggatagaattcggttctgggatgacttgtggtggggggatcaaactttgggaacccaatatccaagattacttagcgtagtcacggataaaaatgctcctatttcatcaattctcgggtattcccgtcctttctcttggaatttcaattttcgccgaaatcttactgattctgagatagaagatttagaaagcctcatgcggtctcttgatcgtctacacatatctccttcggttccagataagagatcctggtccatatctcctttaggtctcttcacagtcaaatccttctttctggccttatcccaatattccgagtcgcctccagtgttccctactaagtttgtctggaattctcaagtccctttcaaagtcaagtcctttgtctggttggtggcgcacaagaagcttaatactaatgacttgctacaattgagaagaccccacaaagcacttagtcccaacatatgtaagttgtgcatgaagcatggagaaacagtagatcaccttttcctccattgctcgttgaccaaagggttgtggcacagattatttcagttagcaaagatggattgggtttccccaaggagcatctctgacatgtttttttactaattttaatggtttcggttcttctaagagaggggttgtgttatggcaagacgcgtgcatcgcattaatgtgggtggtgtggcgggaaaggaatgcaaggatttttgaggataaagcaaggaattcagggtttctctgggattctattcgttttttggcttctctatgggctttttgttctaaggtttttaaagggatacctcttaacatgttacaacttgattggttagcggtgtgtaaatagaccgtttgcttattctctagttgtatttcttatatttgattcttgtagtcttgtttttctttggtgggaggatttctcatccttctaattgtaccttctttttatcaatatattccgttgtcgtttcctatcaaaaaaaaaaaaaaattctaagcacatatggaagctagagaatttgactttgtctatgaatggcaaatctataattcaaattgagtgtctaatggggataggggctcatggaagtttgatagttagcttcgcaaaatcatagatattcctagtgatgtgagctttgatcttatgatggagagagatttagcaattgtagagagataaggggaaggaagtgttggttttgagtggatttgaagttgttcaaaatctcagtagaggggcccagaggcaagttggtaggaaatatttttgaaagagatagaggttgctctagttggataagatttggtgttacttaagaggagatatgtagagttggggtgcttttggagtgacattcacacaaaggaggtttgacttaggcttgttgtgctaccgttacacctatgggatatgaggttattctagaggattgttgtgggtggataatgatattacaaagtagtgtaatctttagtgggcaaggattcttgtgagttcaaatggaaacaaggttcctgcatcactttaggtggtggtggagcccttttattacttgggttagttgtggtggagggtcccaccatggatgtcaaaggttgtagccatgagagatggaaaacaaagggaggttaagatagaagatgaaggtggtggtgctctatgtgctagagagggcttgaattagaaggctctattgggctacaagggcttaggagatgtgtgaagctaagggttcatttggtgtcttaaagctgagtaaatagttggtgccactgataagccattgttgttaggtcatcatgatggagattgtgggccaggagattagggtctttgggttaagggagaaggccccttatgaggaagagaaggaagccattttgggcctgggccttaggggcttgaggaaggtagttaaagacacctaccccttgatccatgacattttgtggattgggtcaggtccatttcatgggttcaaggtatttaaattgctccttaatggatgcgagttgggccttagcaggtagggagggtttttatagcctctttcccttagagaaagattagttaatagtttgtaagaaaggagttggttctaagttttggcctcctaagggaggtgagtttatcttgatgttgcataggcgggaaccccctaataattttttttttgttttgataaacgagaagaggaagcaccaaaaatagtgccctcaaagtatacaaggagtatacaaaaacaacccaaagtcacactccaagggggaaaggatagaaacacaccaccttcccttacttagagcctaaccaatctaaaaaacttacaagagaaaaagggctcaaaactatagacaccctaacctaagaccaaagattacatacaaaagaatattttaatctttgaagcgaaaactccttattcccaaaagctaacaaattcctttccttccaaactgaccaaaatatacataagggggccatttgccaagccttttttgtgctttccccacaaacgctccatgccacccaagaagagtttccttcgctgtacgcgagagagtccaagccacaccaaaaagggagaaaacaaaacccgcgtctttacacaatgaagtaaaaggtgatctactgtttctatttcagagaggcatagaaaacacctgttttccaatgagtaccccctcctttgaagttgctccaaattaagactttaccccaagaagcctcccaagcaaagaaggccaccttaggaggcacactcaccctccaaatactaccactagggaacaaaggagaaacttcgggctccaaaatagaataaagagacttgattgagaaaacaccacactttgatgctgtccaaatcactctattttcctcctccctttgcacccggaaggtttggatcttatgcaaaaaacgctccaccaactcaatctcccaatcattaagcacccttgagaaaagaggggtccaaccatccccatcggggttccaaacatccgacacccaagcatccttagacaaagagatggaaaataaagaagggaaggacttacaatattgtgctgatagtttctttagttgatttggttagttcgaggatggtttgtgatgaagtggctttcacttcattgactgtctcctcaaatagcctaaaagagagatcattatccatagacattgccctcttgttttaagtggaatgctttgcaggtaaattgttgactcccaactattttgataagggaagggtcttctccctcttctccctttgcttccaaagataggggtccatcgttggggattgccaaaagcttggttccttggagggagcaagtcaagtgggttttagtggtgatggttatgggctgttgcaaatgatttctagtgaggatttggttgtggacttcccaaagaatctcctagagatgccaaaagtgtggacttagatgtgtgcaatgaggaggtgacttcaggtaatgattgtcttagtaaggactcgatagtagaagagagtctcttcaattttttttttctaaaatttgtttcctttagcgagtttttgggattgccagtggaagggtatgaggaggaaattgtgtccttgttgagtaagttggaagccaaaaaggatcgtagagtagcagcaaccttgagtaaaaagaggaggtctgcctctatgtcccttttagataaggagcttcacaaattagagtgttcaattgattatagccaatcaattggaaaaaagaggagttggaagagcgggtgggatagggtttcttaatgtccatgaagtttgagatttttggactgccattagttggttcaaaggttggatgtttttcatatatgtatgcttttctttttcttactttttatatttaacctattatactcgcctatcatatatatatcacaagtaggaaaaccatatgggataacttttataagttgacaataataccgagagttgtttcgcaaaattatatatattactagtgagatgggcatattgatgcaagtctaaatgaatataaactctctctctctctttcttgtttttcttgttcttattcttattcttcttcttttttctttttttggttcattgaagataacttctcttttatgtagttggttttctttaaactttgatatagaagtattctatgaaatttgtgatgaatttatatagaaacatgtcatattttgttaagttgatttcgtcataacttcagttttctgcattaacatgtgtagatgatagattggttctttgtcccatagtattttatcaaaatttgttgtatggtgttctagaccatatttctttcattatgtatgtgtttcatatatgatatcatttcatttattttttttatcagaaacaaaatattcattgataatgatttagaagtacatgtgaacgatgaggaatccttcccaaatgtacaaactctaatcaaatgaacaaatgaatgagttttctccaatatgtcatctagacaaatgtctcaatattgtaccttgtaaaactatgtaaaggaaatgtgattctactctctttagagatcaatacatctacaaaggagaccaaagctttgctccaagatttgttattttaaccctttttatttattccaaattccaattgagttgaataacaacaagaggagtgcccttgaaagttgaatttgttgaggcccaaaaagaagaatagaaatacattcagtcctatatcgatgctgtacttctccatttattctcaaaaagccttgcatttctttcctgccattatatcgacgctgtacttctccatttattcttcaaaagccttgcatttctttcccgccattctatacaaattagattgaggcatgcaatttgccaaagaattttgccttgagttgtacaccccaaacctccacatgaaatggtcattatgtcacttgtgctcctaggaggaacccaatccagccttgcttgtctgaatagtccgtaccaaagcaccaaggtcatcgtaaaaaaaattgttaatcaattcaccactcatatatataatgcaacagttaggactaagggctttatgaagtcttctcacctattgcaagtcttttcatgcttcttatagttatttgacatttgactctcttaaccatagtatctttcatgaattggtcatacagatatcatggttatatgttgctatatataggcatatattgctcaatatatattattcttgcagcatatgtctttcatatatatacgcttttttccctctttttttcattcctttttccattttacccatttcccaatatgtttaagaaagggactttaggtcatagaatatgataaaaatgggaaaattataagatgccttttataagttcacaactatggatatgaataaataaatgttgaatgaatgatttcctttaattttttaggatt

SEQ ID NO: 12142 - DNA, 6354 bp, Vitis vinifera
  Intron number 11 from transcript GSVIVT01033137001 (locus GSVIVG01033137001) derived from phytozome v7.0 (chr-ID chr 4; pos 8268779 to 8275132)
gtgacacgctttgacgacaaagatcttaggtcccatacttttagaaaaagtgatcaacttcaagacaagtggcatcaaagccatggatgcagctacaccaacttcgctccaagtccatcgacccttttgatcccaacacacaataattctgctttcttcggagaacaaggaacaccttcttctggacatgctgatccagccggtccaaatcggccaatgtctccatatataatgtttgaatatgagcttgctaatataaatcacgagtaaacaagaccgcctgtaattgaataattgatagatcatttcctttcctgtgttctttataccggtggcatcattacccacaaccaagagtttcaaaaaaaaaaaagaagctatagccataggcatttcagttaaatgattgttaaatgccatctatttgctatgaacaataattcatcactgagaaattgttttgctatgaaataaatgttattgcaaaaagtcatttcttaccataaaaatatcgtcttagctaaatgcgttatcaaattggagaaatttgttgcaatgaattttccaaaagcttgccggccggatcagtttaatccaagatgggattgaaaaggatgatcgaagtgggactgaatgtaccttccggtttatggtaggactaggacagggaggtccagttttcaaaccatcgcagatatgacgcataacattgttttaaaatctatatcagcgaacggttcctacatttttttacaggacatagatgacccattacttgcacatgctttttctttttttctctctttttttccttttggctttttaaatgaaaatcaaattcaaccttcccacatcgataattgccttaaattccgtcaaattcacgaatttattgctgcctaacgcaacagctcaacttcctgtgccttatcagcatataagtaaataaataaagattgtccttgcactacatggttgacattgctttcccacacacaagatcttatttatttatttagagttgggtttgggtgtccaagtggctaacctaacccaactcaataaatgggagaaataagggaagcaatttatgagagttttaaaactacctagaactgccactattaaaataattttttttttaaaaaaaatctctctttgaggtagaattctctctcctagcataatagagaaatatcatgttttctcttctttctctttataaaaacaaaaggtgaagaaatacgaaacaattattctgaagaaacaaaacgtcatttctcttaaagtaattcttgttttttcttcgtaaaaatgaaggtcaagaatcttgtgctgtaagaaaagaacgattatcatattagtagtttcattcatgacttgaagttagaaaattagtcagtgaaacaaccaattggaattcttgggcatttcagaaggtaatccagaacccttatttttcatcattggtatcaaagcactcttaggctgttttttggcctttggtttttttgtattttgttttctttgttttagaagaagaagaacgtaatatgaaatcaatgttttctagttgtggttccaaaaaaacatgattcctaattttttttttaaaaagaataaaaatgattttggatactgttccaaataataataaaaaataataaaataaaataaataaataaatataggaaaatgataagagccatatggagaaaaaataggtgcaaaatgcaaccacctctacaaaaacttttggacgcaattgaaatggacaaaaataaataaataaataaataacataaaaaatggaaaagatgaatggaaactagttatggttctagaaaagcccttctccaagacaaataaagtggaatattattctaggatttttttttaaagtaataataatacataaaagttaaatatgttttaatctacttattaacatcaaagttgaattactcttgttggttagaacttctcttatgctcacttgagacccaagttcgagctttgatgccctcatttgtattataagtatctattactcgcttgaaaaatataataataaatgatatcatgccctcatctgtattacaagatttaaaaaataagggtcttgattactactcaaaaagtgctatttgatagcctataattaatcattttaaacacttttgagtagtactttaggccttttaactcaattggcatgttaaggatcctttaaagcaattttgatcactttgtgtaagttttggtgtttttgttagtattttgatcaccaaagcaagtcaagaatgaggagagctatgaggaatcttgggcaaagcttagaattcatttgccaagagtgaatccggattgcaaggagaaaaagcaaagagaatctgccatgaagcctattcttgatgacagtcgtagcagccacttttggagcactttctgaagtccaaatgatgcatgctatataccatttcaaagctcaggaagtcaacaaccaatgcttcaaacggtgtgcaattcggagttgaaacgaagaagttgcagccattacaagccaatcactccgagctgaaggaagcattttgcaaagtgttgcgaaatcacccttttgttgcgaagtgatttcgcagcatttttgtacagtaaggtgtttctccttctgacgatgcacgaaccatgccgcgagaagggagctaggaacctcaaggtggaagccaacttcgcagccttgtgaagatagcttggtgttgcgaaataatttcgcatccctcttgggtgtctgcgaaatttcgcagacaccatttttctcctgcgaaatggttcctgaagcctcccgaagtttgctaccgacattgggagatattttccattagatttttgttgtctaaatcccaaaatactccttgtaaaccaccaattacatgattccttagtttttaagttagtaaaaagactaaatatctatgtaataattagtttaatatgatgttaatatatatacctctcgggagcctgttctcagagaggagttccttctgtaaacgtttgggtaagcaagtaaaggtcttttctttctactgccttaccttctcactttgtattttcattttcttactaagttatgaattctctgaggagttttccccagagaatgagtaactaaacctctaattccttggagctaaggttgccggggaaggttccaagtgcaagaatgcaaagctttgtggtttagctagtaatgaagaggaagtgaaatcctttagtgatttctatgtttttagttaacttaaaacaccttagagtcacctgggccaacacttggtaaggcaagtgatttccaaccatggaaatgcactagtttaccctttgcgagcctctgggaggtgacttcaaggtaggattttctggaattaccaacacttggtaagcttttggactcttaggagacatccattagttatctcttgcgagtttgtgaaaggaagtccaaggttaaagatcaccttgaatggttgaggcttggtgagaggctgaaaccattgcaagttgcatcagtgagagaattaaagtgaaatctaattgaaggagtctctgtacatcaccggttagagaattgactagaggttgaatctctaatgcgagaaaatgaaccatctgaccaaagccgtgtcttttgcatgaggaaccaccccagtgaacctaaatctccaaggaatgcttttcttcctaaattattccaaacttctgttatgttagttagtttaagtctaaacttttaccaatcaaagtttgtgttttacttcttaatctaaccttgaaatgaaacaagaccaattcacttggaattggtatcattgattgcttgttaatcattcccagtgaacgaccctagagccactatactatagtagctttttctttgctaccctagtgtatggtgttataggtaataaattttgttgattactccctcaatcaaggagcaccagctgaacacaaatcagctgagacaccaattgggcatgaatcaggtcttcaatataagtatttgttactcattgaaaaaaataaaaagaaatgagggattgcccatgaagaggcttgatcccttgaccatagatataagagtcttgtactctaccaactaggctaaatgttttttgttttcataaaagactggttattggaaacaacatctaaagttatggaagacattgaccataatcctaatattgttgttccttttagttttaagagtgaagattagttctttttctacatgttacttttttatgctttgtatatgaaatgtaaatatcttttatgcaatatatgacatgaatatttattgtttgataaatgagtatgtcttttatttacatgcatgtcttcagttcttttgtatttgttattgatacatgaaagttgtataatatttttttatggagtgaaaggttttaagctaaaaagaaatttaagtaattccttgcctaaaattagaaaaacttgcatagattatctctaacttgtaataattaaaattatatataggagttgattgggaacatagtgaacttttgtttctattgcaatttaggttattacatattagaagatgattaaagcaagtaaaagtatcaatatccataaaaagtactaattaataaaattatgcaatatctctaagtagttgaatatatcgattacaactaggaacatcatagtagaattaaacaaggatgagaaactaaatggcgataactatgaggtttggcatcacaaagtttagtatatcattgttgaccaaaaggctcttgaaacattgaatcatgtcatgtaagaacctaaataaggaaactctactcaacatgaagaaattaggaggcttatatggctttgaagaaaaagagttgtcttcctctcaaattataatatcatattatattttattattgtattaaaaaaatttgataaacaaggttttgtaccctgtttgcttactaatagtagagtagaaatttattcattcatttaaattcttgttgatcatttgaacctacctactcctaaactcaactgtagacctcttacaaaatgaagaagtggaagtcataataaggcttagatcattgacgcatgccaacttcatgatcggtcttggaagcaaagctcgggtgcccatcatttcattctctacaacaagtccatctctttcttcgcttcagagtcaattttttttatccaagctaccctatatgactcagctcaagtaccaataataagggcaatagtctagtcctttggatggagagaagttgtacttatttatgaggataacgagtatgggaatggagtcataccgtctctgacaagtgccttgcaggaggtggacatgcatgtgacctatcggagcgccattcatccattggcaactgatgatcaaatagttaaagaactttacaagttagtgacgatgtcaactagggttttcgttgtgcatatgcttaagcctcttggctcctagctttttaccaaagcaaataaggttggaatgatggaaaaaggctatgtttggatactaattgatgggataattaacttcttgagtactttggatgcttcaaccattgattcgatgcaaggggtgttgggtgccaagccccatgttccaagaaccaaagagcttgaaagttttaaaatcggatggaaaaagaaaatccaagaagaatatctaaccaatgaaatctctgagctaaatatttttagactttgggcctacgatgttgcttctgcactagccatggcaattgaaaaacttggcacgagaaactttagcctccaaaagactaacattttcaaagattcaactaattttgagaggtccaaatattctccattcactattaagtactcgatttagaggccttagtggaaattttcaaattggagatgagcaactacacacataagctttgcagatagttaatgtgattggtgaaaggaaaagaggggttggattttggacaccaaataatggaattgtaggaagatcgaattctatttctaaggtcaatataagagccattacatggccaagagaatctacttttgttcctaaaggttgggtcattcttaccaatggaaaaaggttgaagataggagttctagtgaaggagggttttagtgaatttgtgaaagtgacacaagatcctatcactaatacaacaaaggtcattggttactccatcggtttctttgatgttgtaatggcaacattgccatatgcagttccttatgagtatgttcccttcgagaaacctgattaaatggctactggtagct

SEQ ID NO: 12143 - DNA, 4321 bp, Vitis vinifera
  Intron number 5 from transcript GSVIVT01027333001 (locus G SVIVG01027333001) derived from phytozome v7.0 (chr-ID chr1 3; pos 16460441 to 16464761)
tttcgagttgtcactgaaaacactgtacttatctatcccctttttattattcttttaataactctcatattagtattatcttgtaaaaatatgttaattttttgaaatgttgtaaccatttcctgtttgttttccttttcatttttagtttccatgtcatatgtgcctatcaattaaattttgtttattaattgattagataaaatagacactatcaagtatcttcctatctcactaggagtttctaaatatggtgattattcttctttgtgattagataacttgcatgatgataatcaaacacaaatgatgtaaaaaaattaaatcaagtataaggttttattaaaaaaaaaaaatatgtcattaataataagttaagaaaatgattcttttttccatattagttgaacttatgtttgtattgtcgtggaatcttgttcatatgcattcaatatttgcaatcaaagtgaaatatatatatatatataatattgagaaaaaaagaaaaagaaatttaatgtggcttgaaacataagtgtactctttttgtagaaaaaaagaagatatataaaaatacaataattagaactcttaccaaatcactctatcaattcaatgtcctgtacctaaacccttagatatgttcaaactatctaatgtactttttttataatgttttgaataaatataagaaatagattaataataactcaagtacccataaaagttttagtttgaatcatgtgtataattattaagaaacattgacttggacgtagtagcattatgcaagtcaaagatttactacatagtgttcttgtacaagtttaggtctcttaacattctatctctagcttgaagacttattttttctactaacaagaaaatactccaaagttactatgtgaacttcaccaagtattaggtaaccacaaacgtcctaagaaaagtcttatgttgaatgtactctcttgtatgagtttctttactatgatatacttagatttacatatttgatacattatcatcattagtaaatcttttatagtaggatttgaccattttccactatttctcctaataagtgatacttagtctttatgttttgtgttctttagtgaaatattagacttttagccaaatatattatactttgactagtgcaatgtatcacaattacctcttttatggtacttgaaattagtaaacaatacctatattcaaatagcttcttcactacttctatgatttctttatacctaacttctattataaataacacaaattttgattgtagcttatacatctaactaaagcaccacccactatagagaacatatgattagtggtagaatcatgaaatatatatatatgttctaaatcttgacctcttgcatagtctcattgacaattctaaccaactatatatcttgaaaactataaaaataattaacactttgaagtacctgtcaaacaatgaagagtccattgcatatcataggaaacactaggctccctattactcatgactaagatacttcatacaaatcatttatttcctcaacttttatgttctaggagattgttttgaagataactagcaagtagtagggagcaaagtgttgactagtttagcatctttattgaagtaaggttacattctatgaatataaaatttttgtgttatccaaagtttcctatttttcttgtccttgaatatagtcatcctaagaatttgattgggaactcttaaatccttcatttcaaaatttttagacacaatgactttcatatttgcattttcatctagaactaacatgccatttacatagaataagattataaggctaacactacaataactataaaaagtatacacaatggctagaatcacatatctaggattctaagctcataaaagactcaaattgcttataaaaataccctaatgccttttccaaaccatatggaatcctaagttcataaaagtcccaaaaccaatgcctttatcatcatcatcttcttcttctttagacataatgaccaaatcacatatctagaatcctaggctcgtaaaggatatagatttcttataaaaacactacaatgtcttcgtcaaaccatttagaattttaagctcataaaggactcaaatataaccaaattatttttcttttttcttatttttcaaactatatggaatccaaaactcataaatgacttaaatcaaaacaaatgttcttcctcttcctcttccgctttctattcaagattagcattgaaaaaatttacaatttttacatctagttgcttaagttccgaatcaagtgtagctactaaactcaataaaatatatattgtaccaaaactatggaaaaatgcaaattttacatctagttgattaagtttcaaatcacgtgcaactacaaaacccaacaatatatatgatacccaaactatggaaaaatgcaatttttacatctagctgctgaagttccaaatcaaatgtagctactaaacaaaatatatctaatactcaaacttaataaaggagaaagtttatcaaagtaatgtctgatttttttaaaataaattttactataaggcaagcttcagatatatatatatatattcatatttcaattagcattcctttcaacttaatttaaacccatttgaactaatattcttctctattgatgattgaatcaagtcccacatattgttcgaatataaagcctccatctcctcctttatagatgctccctatgagttagcttttttagaatgataagactctttacatgaatgaacacacaccacttttctttcctatgcaaagtatttactatcttacactagttgactttgatggctcctaagtttaaaatcttctaccatattatgttggtcactattagcattatctttaacttatcattatgttgaatgaaatcaacatgttggttgcaaacttcattaaagttttaaaattgatcatcttcattatttgcaagttactttgtcttttaccgttctataaggaatcttcattgaaaacatcctaactaacattaagcttataggcaatatggtcctcaaatctttatatatttgttccatctatatagctaagaaaaataaaatttcgagatcatctatatattttaaggctaaaacacatatataacaattacacaaagagagataactaataggagagtgatttcatttcatggcttcttctaacctctctacaatttccaatgtatgttaagagtcgagtaaaggcttcatttttctattgtacctgtcttaattgtttttgttgagtatttttcttatgaatcttgtactaatttcttggagtaaaagggttaaaaacaaacacaaataatcatataaaagagatatgactaatactagaaaaaattaagagaaactcatagtgtcttcaatcattcttattcaattagttcaaaagttcgtatttattaatatctatacctaacaaaataaaaacttttaataacaaaaaatatagagatattttaggaattaatcactttaatttagaaacatcaatcaaataaaaatattcttattaacttttagatatcaaattaaattacttattttaaacggtctgtaatttaagtttacttttcaatcattttgatttcttttgatcataaatacaatagctaggatataaaggaaatgactttcataatgttttacatgaaaacaaaaaaccaaaaaccaaaaaaaaaaacaaaaaacaaaataagaaggatacaaagacatatagcatgccttagttactaattaactaaaccaaaattcaaattgatttcaatagtacattttttttagtgcttatattcaagctaaaatctaggattaaatgactaatgaggaagatgtgtgttaagaaaccacttaatcatattatgaagtcataaaatatacataaaatagaaataaacataagcaataaaatgggatgaagagtaaactttgttggctagctcgcaaaacctaaacatgcatctatatgagaggagttaggtatgtagtcctagcctcttcaaattatttcatgatagcaaataataggtaaacttcatactatgtgaattgatctttcagtagtatgcataggttagcttatgatttcttaattaatttgagttacaatcagttcctgtttggttcaaaagtagagccggattggaactaagggcctactatcaaatatatgtgttctttcttggtagcattaattcattggtttattgaaattgtgtaggtatttgct

SEQ ID NO: 12144 - DNA, 9680 bp, Vitis vinifera
  Intron number 2 from transcript GSVIVT01016199001 (locus G SVIVG01016199001) derived from phytozome v7.0 (chr-ID chr1 3; pos 6710662 to 6720341)
cagcaaaaacaggggattcaaaatcaacttggaaggtatctacaaattgattgcaatgttgtttgtgatgttttgattaccattgtactttgctgcttgatacctatcttgaatattttaaaacctacgcttttttttcctttacttttagaaaattttaaattgtcctggaagtcagattctagtacatgcaatttatttattcattagtgctttataagctttagcatgagaggataaaacactaattatacatggtccctttcactaatgataattatcactatctcatggaaaaaatggtaatgatcactacaatgaatctccaccatgatgtatcttctacatccatgtttgactttgcaaaaacatcatcattgtgggaattgaatatagtgacagtttctcttagaagtctccacgcttatccatctttgtatataccattccaattctatgaatgtattgtcactaataaaaaaaaaaagaaatcctgcgaatgtgcaggagataaaacaattatgtgaatcccttgattactggtatgctacaagtgaatgcaaaagaaatgaatgctaatcttaggtttactcacccttttaatctaagtttgttgaatcaaactacttcaggcactgctatatagaacacaagtaagggctattgattatttgttgtggctaaattcctaaaaatttgtgagaatggaatagttctattgctaatattaggtttgccccattcttagaaaccatgtgaaaaatgaatgtgatcaagtatatggatttgctcaattgaagttgatttgaggtgaacattgaatggacattggtgatccccaacccttgcacttcatgtcttacgatggtaacttattttatatatctatccggtggctacaacttatacaaaattggttaaatttataagaggcataaatccctatatttttgtagtttgcaacttcattttttcatttaggtgtatcattgatggcacttgtaatagaggaactagcacttatggaggtctgcaaattgtagccttgtggtagcctcatgggtttagttttaagattccaaattgtctaacgtgtattatattgtgtatggtagtaggggtttaaggcatggtgatccactttctctatttctctttatcattgtggtagttgtgttgtgtatactaatgttgaaagtagagcaatgtggtatatctttgagggattcttagtaggtagaaagtaagacgggggtgactcatctagagtttgctaatgacaccatattcttcttaagagtttgttcaaacgagttgcaaagtcttaagaccattttgttggtgtttgggtaaattttaggattaaagataaatctaggtaagagtaccttattaggcatcaatgtaagttaaggcccatgtcttaatttggttgccactttagaatgtacggttttttattagcctttatcttatcttggccttcctttgggtggggtggggtggggtggggagccttaaagctatctctttttgggatctagttatggataaaatttcttggtggttagatggttggaagctcacttgcccttaggtggtgcttgcctgggaagaaagagaagaacaggaattgccctaagtggagtagagggagacatgatactaccatttgtctatctcaccattggtggccccttaggactttttgtaaagtgatcccttttatgctgcttattaaaacacctaggtttttattcctagctgcatattgctcctaacgcgaaagaataagcggccttagcacatccaactaccaaccctatgagctagcttaccaactcaacctctgccactactgctttgctagccaatactaaagatcaaaggtcaagaataaccctagtccattcatgcttgttttgtattgccttttatttttattttttatctatttttaaaacttgagctaaagtggctaattggattgagagattactgagagaccttttgtggtcaagctttagggtagggaagataacattttttgggttgggatcaagtgtgtgagccaaagagtgaggggggtttggggtatagggaagatagtctttaggaatatggcccttttaggtaagtggttgtagaggttccttagggagagcaacactttatgatataagattattttagggaaaagtgcgttttgactcactaattttataattagatttatcttcatccatttaaaaatattttaaaatgcatgcattttttcataagtcaaataattatttcctaaaatgacctttttacttactacattaataatactaattgaccataagaatgatttgagatcaataaaataagaaattttaaaaattaaaaatacaattaaaactgaaaaaactttaaagctaaaaacataaaaataaaacattaattttcatttcgctgaagcacactagtagaaaatatagttttggacaaaggaaatataatgagagtcaatattttattttttaaaattttaaatattttagttttaattatatttttaatttttaaaatttcttattttattgttgatgtcagctaacataatttttattcaaatttattaaaaaaagatgagaagatgagtgaatttatataatacaggatataaaatcattattgattggagaattagaaaaattttgtttatcatcttagagaaaaatttccacaatgatttgtatctcatattatgtaataaaaaatgtatattatatttatttgtcagatacttttatcaaattaaaatgatagattaatttgttgataattttatttaatattatcaagtaaagggtatttcaggaaataattatctaacttaggaaaaaatgcatatattttaaaatatttttaaattgatgaagataaaattgatttataaaagttcaagtttttttttctatattttttcaaattaatgagtcaaaacccacttttcctatcattttgagtatcgattgaccacatggtatgccattattattgttagatgtcagtgtctttggaaggccattacataacttttccttgtcttctcgtgttttacttgttattttatgagtgatggtaaaaaaatccagtttgggagatatttggtggagtgaccaatctttttgtgttcaatttccaaatctttatggagtggtgaggttgagaaattcatttctgtcttcaattttatcttttctcctttgtcttgaaatttcaatttttgatgcaacctttttgaccatgactttgaggaatttactctcattatgtcgactttagcctttacatatgtatcatccattttcctggatatgaggatttgtctttgatatcctcaacatgcttttgtagaaggtagacaaattttagatgtggtcttcatagcaaatgaagtttgattcgaggttgaagagtcccataagtggggtcattttcaagttggctatcaagaaggatttcgatcatgttaattaggacttcatgttggcagttttagagaaaatgggttttgacctaaaattgataaagtgaattaaatgatgcttaactatggctcgcttctcaatgttaagagtacaggatttcatcagttttttttcaagagttatagaggtttgtgatagggatacccattgtttccatatcttttcattattgccatagtgactctttcttgtattctggatagggctaaggaaggaagctttttagtaggtagaagttaaggtaatcgtaggactacaaatggagcatttgagtttgaatcttatgtggtttaaggtaagctttggactaaaaatcaacgaagaggagagtgaattgattctagtgcaattaaccatcgatgtagagaaccttgctaaggtcctaggatgtaaagtgggcacccttcccacaagttatctcagaatgcctttaggagcaccttttagataagtgtgggatgcggtggaaaaaagatttcaaaaccatcttgctttgtggaagagacaatacttatcaaaaagggtaagactaacattgacaaaaagcatcttatctaaccttcctatttattttgtcacttttgctattccgagaaaggttaacttaaggttggaaaagatccaaagagattcttgtagggggtagtgctttagagaaaaagcctcatctagtaaagtggttgacaattggcatggacacgaggaagaggggattgggaattagaaggttgtctatcctcaataaagggctcctaggtaaatagtattagaggttcaccacaaagagggattttttttggaagaaggtgataacaaggaaatttggtgaagaagtgggaggataatgctctagagttgtgagggaaaggtatggaatgggagtgtggaagacaattagaagtgggtgagagacctttaggagtaggatcgtgtttaaggtaggcaatgggtggagggtgaaaattttgaaggataagtggtatggggatttaacccttggggagacttttcccttttattttattttattttatttttacagtcattgcaaaagatgactgggtagttgaggtgtgggatcaggaaggggaaagatgttggaactctcgattctcaaggcaactctatgtgtgggggagttttaggaagtggaggtttttttaaacaattgtatcattatatattgacatgaacatttaggataaaattgtatgagggatttggaagggtgggtttttttttttttttttttctttttttcctagttaaatttctttattcctctttgtccatccaaaacatcaagaccttcccttccaacattgtttggatttcttgggctttggagagagtcggtttcttcattgggaagctgcttgggtaggatattgactttgaaccaccttaaaaggagggggcgtatgattttgaatagtttctatatgtgcaaaaaagaaaaagaagaagaaatagtgggttgtatcttctttcattgcttaaaagcagtaatcttgtggtagttgcttttcgctttatttggaatagagtgggtattacactccttagtaaggaaggcccttctaagttggcatggaacttttgtggggagtaaggggaagaaagccttatggactctccccttatgtctttttttggaccatatggaaggagaaaaataggtgagtgcttgagaattttgagaaaaagtagataaaacactcaaacaatcatttttgtataatttttgggaataggctagagtgttcataggagttgattccttgtctatgtcagactttgttgagtggctaagctctatgtagtgattaggggtgtatttgtgggaaagattccttatccttcttatgaactctttatacatgattaatgcatttcttgtttctgattggaaggaaaaaaaaaaaaatgtagtggttgggggttgttttttgtatacccctccacttggttatgtgttgcctttctatacatcgtatatactttagtgcgctcttttgttaggcactattaatacaataaatatttacctattaaggaaaaaaaatctttagtctattctaaacaattcattctttaaagtgcactttgtttctgtcaatttgaaatcctttcctcctacaaattttatttgggagtttgaagtcccactcaaagtcaaggccttcccatgattgttggcaaaaatgaaggttaatactaatgatttgctgtagaagaggagatatcacaaaacctatatatatatatatatatatatatatatatatatatatatatatatatgtatgtatgtatgtatgtatgtacataataatattacttaagtagtactgacattatgacttaggttgtttggacttgttgggattgactggtttccaactaggggtgtggtggagatattgattgttgctcactaaggttttagaggtcttccatgagggaagtaactttggggtattgcttctctcacattaattgttagactatattagtgttatcaaaggcgatcacttggatcacttaggccaccaggctaaacgggactgatgaaagtcgcctcttggagacttaggcaagatgacttcaaagaagtgacatgtggcggtcgccctgggataagatgtaaggcgtagaggtggttgcctttgaccattggttaagattaaacatacttagattgtaatttaattcaatctaacattagattaaacaaagtataagatgaaatattatatcatcaatcatagtgataatgagatggagggctatcaatctagtcttgatggaattgatgacaattttaatttcagtgatgactatgataatgtccaaagcttctttaggacatttattctcatattttgttttttattttgatttttggatgtctagaaaattagaatatgcattttgattggatgaatttctttaaacaatttgatgtttcttataatgtggggtctaatatttaacactttgaataattcttactattttattaattttataagataccatgaggggtgaacaataaaaaatgttgattgttgaagatgacgcttatattggttaagtattaaataggtaaattttttttttgataactgtggatgaagtattgaataggtaaatacatgtataggttttattgtctttctatagtcaagctatcgccttgtttttcgccatttgccttaggctaaaaggaatgctatatccttgacattgccttttgcttttgacaacactggactcagtgttattagaggcgatcgtctaggttgcctaggtcatcagaccaagcgagacagataaaagttgcctcttgaggacttgggcaaggcagctttaaagaggcaacgcctaggcaattgccttaggataaggttaaggcatagaagcggttgcttttgaccatgagttacgattaaacatacttagattataatttcattcaatctaacattgaattaaacaaagtataagatgaaatattatattatggatcatagagataatgagatggaggactatcgatttagtattgatggaagtgatgataattttaatttcaatgatggctatgatgatgatgcccaaagcttttctagaatgttcattctcttatttgctttttagatgtctgaaaaattagaatatccatttagacaggatgaatatctctaaacaatatgatgtttcttatgatgtgggatatagtattttattaattttataagacatcatgatggatgaaaaataaatagtattgattattgaagacaatgcttatattggttaagtatcaaagaggtaaatatatgtatattttttattgccttattataatcaggctatcgccttgtttttcgtctttcgctttaggctaaaaagagtcttatcgccttgacatcaccttttgcttttgatattactgagtggactatgtggagggaaaggaatgtgatgattttttaggacgaatgttctcaggagacagtttggtatttgatatatttatgctctttgagcgttttctagtgcactatttgtggacaccctcttcagcattatacttctagactagaatctagtaagtagatctactaaggttagttgaggagatactccctacatggatgcttcctctaacaggcagtatcaagttgaatttgatagatgcaccttgcataacctaggacaacttaaaattggaggaacacttatggatgatcatgaaacattagtaagagcactctctaagaatactggagtgggtctaagaatgctggaaagcctaaagcttgcaaaaattaatggtttatcctgctttctagtagagtggaattctacaatagtcctaggtaaataggaaggagagaagcatgtggaggtttgatggatcgtgacacaaattttttgatattattgtagagttggggtgttttttcagttggattcctcgagcagctaaccatgtggctaacatgttagtgatacaaagagccaatcaattgatttctttttcaagggatttttatcctcttaagcttttaagttcgtatttgtaaccacttatggacttgtatttccattaatatctatagtagatagttttttcttgcttttgattagagttatgtagtggtagggattaggggaaagatttctcatctttctatatatttacttaatctatgataataaaatgtttgtttttcattaaaaaacttattgtatcatgaatggcactaattatataatgtgtgtgtgtttatatatatatatatatatatatatatatatatatatatatatgtctcaagatatgttaagatctaagatgcaggtcatgcctatcattttacattaaaaaaagtattatattgcatctcacaagtttttaataattatgataatatttttatttgagaaaaatgaagatcttatacttaaaataagaaatatagacaatataaatatatttatataataatgtcaatacaagctaattattttctggaattatttgtattggtaacccaaatcctacaaacttaagctttttgaaaaattggttgtttaatatggaatcaaagtcttgtttggtaggagtttatatgtttgaacctcactggatgtttatttcctcactttattaaggccaaaggaggctgtttgtggtttgtatattttgcggtgtgtgcttatgtgtctctccatgtgcaagtatgaagttgcatgtaaggaagggtgttggagtgcatgatatatattgtgaatctaaatcctgcaaacttaaactttaagaaaattggttgtttaacaatttgattatgtacattttatttgtattttattacaacatccttgttttcctaagactaaccttttccatagatcttataaaccataaatttgctcattatgcatggatgagtaagaacaataatattttatggatttcacacaagttcctcttcttttctttttcaggactgggttcccaagcagaatcatttgccctcaaatcttggctaatgattcattttgacataaacctatccacagtgtgtactgattttctgttgtttatttttatttttttatttaatttttcctcacaaatcttgggacataacaagaaagaaaaaggcttgatgaatatgcctatgaagttggagccttgggttgtgttcagtatttttcacactacatttttcaaacagaaccccaaatagtcaatcttcttttattttggaaggatgtgtatggtttggagttcagatccgaagagcaaaaaattggagggagaagacctgaagaatttggtgggcttttccatagaaaaatatgcacttaatgtggatatatatatatatatattcgaatacagatgtttgtagatatgcacaaccctagtaagccatatggacatagaaatctcataatctgtttgaagcatatacttcagttacaatcttcgacttctaacattctcatgtgttgtctcttaaaatctccttgagtaggattctatattgctgatttattttctgaaattttatttttttctattcagtcacttgtcgtcattcttacctgtaggttctcatc

SEQ ID NO: 12145 - DNA, 7369 bp, Vitis vinifera
  Intron number 2 from transcript GSVIVT01022434001 (locus G SVIVG01022434001) derived from phytozome v7.0 (chr-ID chr8 ; pos 2922698 to 2930066)
acttacaagcaggttttcttttcttaacttttcttcacatatttgattatctttgagctttggcataagaaatttgttctatctctatatcatgtaatgattgtctgtaccttatacaaattagtttgtttatttattgagaagtggcagagcaaattcttcctttcccatccctaaaacttttttattgaatctctatttcatatcttgattttttttaccttatacaaattaatattcagctttaatcatttgaagttatcagaaaataaagtttgattttagaaggcttgaagaagtaattactatgatttttttatgatattgttgcacccttttatgatctgcatttgttggtttggtgaacctgggatttgtagacaccaatgagtattatacacaagatatggcattctgacaattgtccaggatctaaatacagggactttgctaagtttgtacctgtatctgttttctggggacacattttttgtgtatttacttgtgtttgtaatatgttagttattacattggaaaatcattgagagaaaaacacattttagaagcaagaaaaagtgtttttttttttttttttttctttttttctgtggctaaatatgagtaatcaggaactagaagacctagaatgagagaggtgaggttaactctaggcttagaggggggcttttagtgaggagaaggctgctgacagctttggcagatttggtttgagacagaggccttgctcctgtcagcttttcaattgagtttttgcaaaatcatactgcgcagcatttaggaaaaaagtgatgggttttatctggtgatttctttgtgtttcgctccttcaaagggagcctgacaacagcttctgttgttttggttattaaaagaggggtggaggatgtcaaggactttaggcctatcagtctagtgtggagcttatataaatttatggttaagttcctagttgaaaggttgaaaagagttgttagtcttgttgtgtcatattttcaaaatgtgtttgtgtaaagaagacagattttggatgtggttcttgagcttcaaataatctctagggaaaggtttccagacaactaaaaatcaactattatgggcatagaataagatgctgcccttcaatctgtgatgaataagcatcaaaggcatctcctgagccctgataattcataatcacctattgagcctgataattgctctttacatatatggataataaatagctctataggctagtagagtcaaactcctgagagtgcgaaagagctcttttgataacagtggccaagagggacttgaggtagtaaatatcatttacaagtcagcaacagtcctactcctattcttgaagatcctagcattattttaagccaaggcactcaacatatagcaagaaaaatgccttagccatgggacttcttctaaaatccaagaagcaaataactaacatattagcagtatctttggagggagctcataaaactacagcctaaggggtgattgaatggtatgaacagatggataagttgtctcacctttctctatgtacaaaatacaaaagttagagctaataaccatgtagggtctcctaaaccatagcagcttattaggtttgatcttcttattaacgttaaacaagtgaactttgactgtggagcagtggactaaaatataaacttggcttgagtttattagactcaatgagggcacaaaaatggatttttgggggaaaagacccaaaaggttctaggttccaatacctcttatttggaacagttgggagaggtaaatattgtgtagggtaaggaggtacaggaaatgacgaagttcataatcaataagattgtattgaaagtttaaagtccagtgagaggagttctggtggatggattagaaaatagtgacatagatcaagtttctagatctagaataagatcgaggtgggggtagatggaacaataaggttagtcaccccactgatacataaagcatgaccctgagaaatgactttccaagtacaatgttcagaattcctaggcataaacttagcattccatcaactattgtgtgattgataaatgcctctcataacaatatacaataataagttatgctccttgggaaacctgcataagctcttcctagttagaacttcgttcctcacagattccactctcttcagacccaaaactctcatctaatttgaccctacactgcttgattcaacccaataagatgatatctcttcttttttctaatacttgaccacaagtaatttttgcattcttttctgattgcacatatccccattgcagggggatatgcacaagataagactgcattgaggtgaaacttcttcccaagaccataaagacccttttccatcgatctggccaataaataggtcctaaaagttgagtactctccaaaagttgatgacagctgctggccctgcagcacacacaatcctaggtgatgttgatacccactaaggaagacttatcatgttggtctcactgttattgaagtggacctagaagtgatcgtcttttgggttgccttggggtagggttggtaatgggtcatgtccatagttttaaaaggtgccctttaagcacacctaggctcaaggcgcaaccactccctagttataatgccttgcttgtcaagacatgcaccttgttaaagaggcacaccgtgtctactttactcttcctttttaaatatttttattttgaaatttctaattgtatattaaaatttatataatttcattacttttttattgaatgcttcttttagatttttggaatcttaaattttttattaattggattagattttgaatcatattttataaaattgatatgcgtcctaggtcacatttcttttcacttaggcacacaccttgtgttgcaccttgcatccaacctgtaggagacttttgcaccttaggtgtgccttacaccttttaaaattatgatcgtgttcgactcatttattacataggtaacacgtcattacccatttaactcgtttaataaatgggttataaaattgatatgcatcctaggtcacatttcatttcacttaggcacacacattgtgttggaccttgcacctaacctgtaggagacttttgcaccttaggtgtgccttaacacctttaaaaattatgattgtgttagaatgattagacacaaacacaactcatttattacatggaaccgcgaccttacccatttaacttgtttaataagtgggttaagttaacttgtgtatgaattgacatgaataaaccatcaacatgattttcacttgttgacatgattgtaacccatttaacctatttaaaatttaaaatttataaatgtattattttaaaataccctttagttactttaaccagtaggtattatttttttaaaatcttaattaatttatttatataattttaattataatatatttataatataaaaaatgaattttaattataatatgtttataatataaaaataaattaaaattttaattttacacttgtttaaaattttatttaatgttttaattatagaatatttttaatctttataatgaaatttatagaattttacttagttatttaacctttttgaactatatggtagtatgattaaaaagtatctaaattttttataatttttaaatatataaaattattaactttacatggtttaaatgggtcttaaatgagttgggtcataaatgggtcattttgacatgattaagtaaacaagttattttgacacaattaaagaaacaagttcgtttggcatgaattagtaaatgggttaaacaagttgaatggtcaaaccaaacatgacttgtttatcaaacgagttgtatgagttaacatgattatgatatagatatcattatacctaatccaaacctactaaaattcatgttattttcatgttgtgttatcttatcgtgtcaaaattgtcgcctctaccttggggaatagggctccttggtggcaatcaccttgagagagatttaagatagagcgcttccatggttaaggcctattaatgggctttggacctccatattaaaagaagatctttttccttagttgattttatagttgccttcatggattgaaaaatctgtttttatcggcaatatttcgttgatagatcggatatcggacggccccgaaaggatattgagcatcgattatcaaacgggaggaatatcggaaaaatatcaggaaaatcgccgaaatatcggcgatatattggtttggaaccgataaatcgacaaaaaaatcaaccgtgaagtgatgtgtggagcagcggaggaagcctgttaaaatatcggagatatatcggcgatatattggatatatcagcgaatatatcggatatatcgccgatatatctgagaaatatcggagatttttttgaaagtttttttattttttaaatatttatccttttttatattttttatttattttttattttaaatttatattatcattttatttttaactactttttatatttatctcattaatgctattttaaaaaattactatcatttcattcttttttttatccgtttaattttatttaattttaaatgtttttattttaattaaaaatacaattttactcaaaaattgctacaatataaaaaattaatgaagtcctaatattctataaattaaaattaatttgataagataaattagtaataattttaattatttaaataaattaatgttaatagaaaaattgtcacttgtaataaatttttagaaatcaaatctcaaataaaatattttatataaatcaatttaattttttatttaaaatgtaataaaatatgttttataaaagtattttaattgttaaaataaatgaatataaatatattaaaggagtttatgctaattttttttataaaaaattgataaatattatatgtacaattaaagataatatttatcaaattttataaaaaattagcattacttacttattttatcatttttttttggagttttttcaagcattcttgtgaattttgaataatttttgcctcatcgatatttttgtcaaaatgttcaccgatatttctccgatatttcctatgtattcgtaaaatccaagtaccgatatatccgtatttaccgatattttaatccttggttgccttccacccttgtgaatgctcttaggggtctccattgtttggttaattggttgattttatttgttattttccttagttgattttatagtcgacttgcacccttcatgagagcattcttaggggtctctattgtttgattggttgttaattaatatatatatatatatatatatagtattatattattatattattatattatataatattttcaaggttttcaagacttgaaagatccaaagagactttttgtggggaggtggcacattagagaaaaacctcatttggttaattgaaccatagtttgcttgggaaaaaaggataaggattctgaaattcgcagcctctttgtattaaacaaggcatttcttggtaagtagaattggggatttgctatagaaagaggatccttatggaaacaaatcataatagggaagttcggagaggaggaagggaggcggtttttgagaggggtgaaagatggatatggagtggttgtgtggaaagcctttagaaacgaaagggaagttataaaaaacaagccttgcttttcaattgggaatggaagaagggttatattctataaagacttgtggtgcaagaatctaatcttggaaggagtcttcctgaacttttctcctttgcttctaacaaagatggatggttgagaaaggcatgggagtaggttagggaagagggtagttggagcccccatttttcaaggcagtttaatgattaggagcttggggaagtgaagttttttttgaaaattacaattattgtcaattaaaagggatatgaggacaaactaagttggaatgaatccaagagtggcaatttttcagttagatccctttattcttcgttctttaggggatataaagagcctttcttagctagtgtggtatggagcacttgggcaccaatgaaggaaggtttctttgcttgggaagcatcttagagtaaaattttaactcttgaccaattcaaaaggaggggttgaactcttctgaataggtgttatttgtgcaaaggtgaggaggaaatgatagggcacttgcttttgcattgttccaaagcaagaatgttgtggcaattgattcattctcctttttgagtggtttaggtgattcattcttcaattggaaggaacttgtgtggtcaacatggctcttttgtggggaagaaaaggaaaaaagcatggagggtcgctcccttttgcttgttggggactctttgacaggaaaggaacatcaggacttttaatgatgttgagtagtctgaccaagcaatcaaatccaattttatgtatacttttatgaattaggctagggcgtgtatagaggaccatatgatgtctatgatagattttgtagattggttgagcttaaagtaaggtgaaaggtttattgtttttaaccttcttgcctataccaggtgttttttatatacttcatgtgtactatgctatgcctccttttaggcgcttttaatatgaatccttttgccttatgtataatattattcttatttcttttttgtcataattattaatttttttttatttctgctttttttgtttcttgcttctctttgaaggcttcttaaccttctaaagttattctctctcttccctgtacaccaagtttaggccagttttgtaaatttacttctttggttagttttgatgtagttgcatagttgccttgtaaggttgcaatcagttatttaaagtttttggcttattgcatttagcccaatggtgttctcaaatgagtattcgtgtcacctcatttttcgaaggactatattttctacatatgagctaatgatggagtcattgttcacaccatgcatactgtaaatggattgccaaactaattcaaggatttatagtataacagaaccagcatcgatattgatataaatgatcaataaattttctgcataatgctttttgtcatttcaattttgtcctgattatcatatgtttcttttccatgttacatctccaatgtgattttgttgttcacattcatgaaggaccacgttcccacattttctgttttgctttcttttgcactcctttgctttcaaaattgcagctagagcaagaaattttggacttttctgaaggctt

SEQ ID NO: 12146 - DNA, 8506 bp, Vitis vinifera
  Intron number 4 from transcript GSVIVT01028519001 (locus G SVIVG01028519001) derived from phytozome v7.0 (chr-ID chr7 ; pos 9071005 to 9079510 reverse strand)
ctacaactagagtctataggtatggttttctatctcaaagtcaatagccataccttataagaatcaaattatccaagtaacatgattaataaaatgtttttactgaggggtgcctcatcatctcatatcctgggtggggtgggaggtgctggtgagggttgttacatctcaatgttgtagaagacatgtgacctacactgtcctgggaatctgcacttgatgttctggcaaatgacaataagttcaggaagcctgcaggctgctagatctctcaattgcttcccctttcccaaaagttgaagcagcaggtctagaatatcagcaacaaaaggggtgcaagtcctcgcccaatctgcccctgtagctgtgcatcttactcctgtagacctgtggtaattatatgtttatcctaatgatcatccaattcctccaaatgatactgggaaacagccaaaagggcttataagccagccaactcggttgttgtctaacctgtatagacccttcagcctgttagcctctgcgatgactgcagacactgatgtatcaaggacacttacaatggcccaccaagtataaaaggaaccacatcagtagtaggttgaccatgcatcaaactattttttctaataggcaaagataaatttattaatgcttctataaaagagggggccatcccacaaagcatagaaaatccagaatactcctattataagaacccaatcaggcatcaagatatgaaaaactagagagagaaaatatatcacgaactaaaagaatcaagtatagaaaatccagtacccttcttttaacaagaactcaaccagacatcaagatatgcaaaactaagagaacgaaaataaatcaaggactaagaataaattaagtctttctgtttaccatgacctttttttccgttgaagtttgcccttgagatatctgtgggtgttgagagtctaggtatcttagagagaaatcatggctaatgaaggggctcttgccttggaactagaagcttttatcccctggaggggctacaagctgagggatagtaaaagtgatggctgtcaaaggtgggaaaagtgctacattatccctcttgtgagaactttgtttggggagtccttaaaaaaatgatctgtcccaccaaatgcttagacttcagaaaggagtctggataagacaatacctgtttcttactacaatcaattctgaatagtgcatggtctagctctccttgcactaggttaccctaataccatgacctcagtgtgaaactggtactgatgggcatcctagacagaggtggtaatgtcaaaggtaattgttgagagagagagagagaaaggagaaaaaccttattcacattcattgtaatctctacttacaattgagagatatatatatacaaggctaggagtcctaactaccatacatgtgacctatattaacaaggaaagatagtatactatacatacattatattcaacactccccctcaagctggagcatatacgtcatatgcaccaagcttgttacaaatatatttaatcctaggacctctgagagatttagtgaagatgtctgctagttgatcatttgaattgacaaaacttgtagcaacacatcctgatgcgatcttctctctaatgaaatgacagtcaacttcaatatgcttggtcctttcatgaaagactggattggatgcaatatgtaatgcggcctggttatcacagatgagtttcatctgttcatcctttccaaatctcaactcctgaagaagatgtctcaaccatatgagttcacatgttgccaaagccatagcttgatactcggcttcagcgctagatctggccactacatcttgtttctttctcttccaagatattagattacctccaataaaaacacagtaccctgaagtggaacgtctatctgtgggtgagccagcccaatctgcatctgtgtaaccaacaacttgagtatgacctctgttctcgtacaatacaccttggcctggtgtacttttgatatatcgaagaatacggattacggcatcccaatggctatcacatggtgactgtaggaattgactaacaacactcacaggaaaagaaatgtctggacgagtaatggtgagatagttcaatttacctacgagccgtcgatatctcccggggtctcctaaaggctccccctgtcctggtacaagtttgacattcggatccataggtgtgtctaccggtttacagtctaacataccggtttcttccagaatgtctaaagcatacttcctttgggaaaggaccacaccagaactggattgagctatctcaattcctaagaaatacttgagtttccccaagtctttggtctgaaagtgggtaaaaagatgttgctttagtttctgaataccatcctgatcactgcctgtaatgacgatgtcgtccacataaacaaccagataaatacactgccccaaggagttatgatgataaaaaactgaatggtctgctgtactgcgaagcatgccaaactcttgaacaacagaactaaaacggctaaaccatgctcgaggagattgtttcaagccatatagagagcggcgtaacctgcacactaaaccagactccccctgagcaacaaaaccaggaggttgctccatataaacttcctcagcaagatcaccatgaaggaagacatttttaatatccaactgataaagaggccaagaacacatagcagccatggacagaagcaagcggacagaagcaatcttggcaacaggggagaatgtgtcaccataatcagaaccataaacttgagtatagcctttaacaactaagcgggccttaaggcgatcaacctgaccatcaggaccaaccttaactgcatagacccaacgacaaccaactgtagatttaccagagggtaaaacaacaagatcccaagtgccattagagtgcagagcagccatttcatccaccattgcctgtcgccagcctggatgggaaagagcttcatgggtgctctttggaagagaaacagaggatatagcagaaacaaaagcagaatagggtgaagataatcgatgataactcaaaaaattgtaaataggatgaggattacgagtagagcgaatacctttccgaacagtaatgggtaagtcattaggagaaggcagagccggggcaggtgaagccgaagggataggaagtgagtcagcaggtgcctcaggaaaagggagaggagcaacgacacgaggacgacgatgataaacctgaagtggtcgagggggcatagcatcaggtggggagacaatgggaatgggcaagacttcagaaacaggaagagactcagaagtggtggaaaagaatggtgagtcctcaaagaaggtgacatcagcggagataaagtaccgatgagtctcaagggaataacaacgataacccttctgaagtctggaatatcccaagaagaggcacttcatggctttggcggaaagcttgtcctgtccaggagtgagaatatgaacaaagcaagtacaaccaaagacacgaggaggaaggaaataaagtggttggtcagggaaaagaagggagtgaggaatctgatcgtgtaagacagaggagggcatacgattaatcaaataacaagcagtaagaacagcgtccccccaaaaacgaaaaggaacatgattatggaggaggagagtacgagctgtctcaacaagatgtcgattcttgcgttcagctaccccattttgttgaggagtatgagcacaagaagactgatgaagaatcccatgatgagacataaacgaagtaaattgggctgaaaaatattccctggcattgtcactgcgtaacacacgaatagaaatattgaactggatttggatttcagtataaaatttctggaaaatagagaataactcagctcgatttttcattaagaataaccaagtacatcgagaatagtcatcaatgaaagtgacaaaatactgaaatcctaaagtagacgcagtccgacaaggaccccaaacatcagtgtggacaagctcaaaaggagactttgcccgattattcaaacgctttgggaacgagacacgagtatgtttcccaagctgacatgactcacacggaagcgacgacaaagtggaaaaacgaggaaccatcttctggaacttggagagactagggtggcccagacgattgtgaatgaggagaggagcatcagtggaaatgcaaactgcaggagatgaatctgaggtgaggtgatagaggccttgagactcacgtcctatgccaatcgtcttccccgtactccggtcctgcaaggtcacaaatttatcagaaaaggtaatagagcaattaagagtacgagtgattttgctgatggaaataagattaaaaggacattcaggagtataaaggacagaagtgagaggtagagaaggcaaaggaagggccaaaccaatacctttagccacagtttgagaaccattagctaaggtaacagtaggtaaatcagaggtagtagtaatagaggagaaaagatccttattaccagataggtgatcagatgctccagaatctagaatccagggtccaagagaagatgtgtgggtaaggcaggcagaggcattaccaggctgggtaacagaggcaatagaagcctgagatgtctgagatgcggaggagctcggaggctgaggcagcggagaatcagaggactgggccatatgggcagtgcgaggaggtcttccatgtaactgatagcaacgatcgcgagtgtggccaagtttattgcaataggtgcaatgaggacgttggcctctacctcgggtaccactgcgtcctcctcgagaggtagtttgagaaactaacacagaagaatctgaagcgctatcagatggcaaagtctgagtggacgagatacggaggaggcgagcaaacacatcatccaaggacggaactgatgaactaccaagaatctgatcacgaataggctcaagatccggacggaggccgataagagtaaggaccatgaagaacttgtcaagctgtgtttgttgagccccaacatcaggagtaagaggcatcacagtcaagaactgctccttaagagaggcaatctggccaatataagtagatagatccaagtcctgttggctgagatggacaatagcagaagccaccttataaagacgctggatatcattcgtgtataatcctttggcctgagtccaaaatttaaaacaagttttataggcctgaagatgaagaagaattcggggatcaaccgattgccataatacactacacaactgtgcatctatcttcctccactgtacgcggtcgacctcagggatatctgtctcctgtgtaatcaagtgatcctcatatccttgacccataaaccaaagttcaacagaggcagaccaggaaagataattttcactcccaactaatttctccgaagtaatcataggagatccagatatgacagaggaaaaaatggaagttttagtagccatatccacttatctggagaatgaagtatgtttggatcgaagagagccctaatacggcttcagattgcagcgtggcaccaccgaaaaagggagacggcctcagatcgcggtgtggtaccaccagaaagggagaagaacacttcccaaggcacgtgcagggattggagtggagaaaaagtggtcggagcttcgtcggaaagactgtttggagggccgacggagacaaaaatccccaaaagaggtacgtgtagggctcggatgggagaaccagggaggtgggaaggctgatcggcgtcaggcgaagctggaggaggaggcgcgtcgccggaaaagctctcacgcgcccccacgcgccggcgcgtgagattcaatcgccggccggaaaattgcgcgtggccggcgcgtggctgctcttttggtgctggtgccttcacaaaagttggagatctcctccaggcgctccttctggtatggtcggtgtcggaaaaataggtcgccggaaaatttcgccggaaaatttgccagcggtgagtggtttctaatgacgatccgactgaccggaaagtattgggagatggggaaggtgaccggaaagaaacacggtcaccggaaggtttcccggagttgatgatacggaaaacaggaaagaattaggttttcttccttggctctgataccatgttgagagagagagagagaaaggagaaaaaccttattcacattcattgtaatctctacttacaattgagagatatatatatacaaggctaggagtcctaactaccatacatatgacctatattaacaaggaaagatagtatactatacatacattatattcaacagtaatatagggatggggtcccctggttgtaactgcctataaacctagtatggcttgtagaccatcaggagacagatgcctcttgatgaaagttgggtacaccaaaggggagaatgcagtaagcatatgaaggcaattggttcaagttgttgtctcatcagtaagatcaagagcggtaggatgctcaggaatgaagtcttgagcccttgctagaggatggtaatcaatgtaatgcctatgagtaaacccttcttcatttatatatgatacaaggtgtttgtgttgacacagataacctcatgaaatctacagtgaggaaatcgacatgttattcgcacctttcttctgtcctctgagattggtgctcatctcatgtggtatgggacaatgggagtaacgcttacagtgctcaaataggagaagaaaaatccttaaagcaattgtagccactacctgatgcccctaaaaatctgtatttgcagttgtcatgccaactcaatgatggaaagatcccaaggatagtgggccaagtgggaacctcacttcctgagaaatttgaatgtctaatagcaagacaaagcgtcaatgctctctcaggcgacctctctgaaactcacatggatagccacatgtgaggaaggcctctagttgttactgttgttggagcatcagtgcatcaattttgtgcagattgtgatccttcttccccttcttctggaagacaaagcatcaatgcgctctcaggaagcccctctgaaacttacatggatagccacatgtgagaagtcctctagttggtactcttggtggagcatcagtgcatctattttctgcagatactgatctttcttcttggtttttacgcaatggaccaaacaccaatatggaaccatgccttctcttcttagacacatcaatatggaacatgtcgcattggttttattcaatgaaccacacactgttatggagacttgtagcataggttttacttaatggaccatttttttaatttttttatttatttttatttttattgtttgtggggaaaatggaacaaactatgattttatttagcagactgccacaatcttggacattttatttagctttggatagtgactaaaatattatgtctttgtaacagacttgccatctctgcattgaatcttgatttgaactgaattcaatcttgtacagtttcaccatttgctttggtttgagccactatgctcactcaatacctcttctctgaagacattttgtctaggatgctcctcacctgtatgaacaatttatggacactgatgaggacaccaaactccacctgtgcctcaacagcttgatttgttggcatgcatacataagagggattttgcatgacaagctctgggcttaatatacacataaatcaaaaagtactgatcacaagcaagtggtggaagtgaaaatatcagatagagaaagcttagtttttacataatttttttgaatcaatggcagctcaaagaatgaatagatgtttcaaagagggtagctagcagaaaaaaataagctcttctggaactggacttgggacttttcggaattgaaaggatcacaacaacctattgggtttttgaaactagagattttaagaactagaggttttaaggatcaaactatttgctcaattactctagtttcatttatataaaagtactatacatatcactactgcattttttaataggttctttgttaatccacttattgttttttttatggttatcatacaaagcatggcatgactactttctctcgtgttccatatacttcttctacctttagatgcctgaactgaccttacatcgtttttatgtgacttaatgttcaaaatgctttccctatacctcccaattaagtgggtataagtttctgattcgtcctcagccactccttccacatggtagagggttgatattatgctaagactgtaggtgacaaattgtttctgcatatatttacactgttgagcagaaaaggggaagtcataagattgttacattttgatttttgaagccattactggtgacagcagtaacacaagaagatgttctcttttacagcttcttccagtgaaatccgtg

SEQ ID NO: 12147 - DNA, 2263 bp, Vitis vinifera
  Intron number 1 from transcript GSVIVT01011632001 (locus G SVIVG01011632001) derived from phytozome v7.0 (chr-ID chr1 ; pos 5754020 to 5756282)
cgtcaactcaatatctatgtgagcttcttctcctttgcatacatgaattgaattttaaaattgtgtttgcctggaaaaggacgccatggaaaaacggtagtttaggtttcgagttctaggcaaaaagtctatattcgcatcatttttggtaacgaaatgattattatataagtgaaaaaaaaaatccaagaatccaacgaaggatgaaaagcatatttttgaattatgagaagtagggatttaaattgtgaaatggaaaggtttgatgttagattgattcataattttcgaaaattcgtatctcatgaaaaatttggaattgaacttgaattgttctgctttggtggaacctaggttctctaatgttttgtctcctgtttcactcagaggtgtgtatgtatgctagttttatcttattttgaagggcatttggattggaattggaattggaatccaaatgtgtttgacaataacgaatttgttggtggaagtaatattttgacattagctaaaaattggaaatcaaaaccatgaggacttcttttctgcaagagtatggagaagtcattaaacaaacagtttgcttcaaaacctcctaaagggacctgatctcaaattggtgcttccttttcatttcaggatggctgtcatacaaccaaaagaacagttcctagtctgaattggataaacccttgccaaccctttctagatagaatggtttgactgagcattcttttcctgctaagataaagcaagtagtaagttttcttttaacaggaaagaatgctgtgtagtggaaggaaggttaatatatccttattgtgaaacaataggtaataataataactgccacccaaatataacaacgcacatcccagaccattgatgcccattaaaacatattagagacaatctaagtcctttgaagatagatgtggtccctgattaacacctccaacatagtggcacatggcttgctaaatgatatgctatacttggctgacttaagcttccaaacaaaagaataaccactcctctaatgaggtccattgtcctgcacatcatcaaatcatactctaggttctcttctacctttagagatctatgagaggacaattgtgaatccccctccactagaagggaattaacacctaactaggctgcttctgtcaatgctccaataaagttagggcctctgcttaaataaccagatccatgccagttggcatggagaagtgtctgaccaaactactatctctatagtctctgaatactccaccaatcctcatacaccatggattatacaatgaacaactttgggtctagctgatcgtcgaagtgttgtatcttcttgtttaggaaaataaaaactagaagatgccatgtaaatccattccaatcctagtactgcctggagatgaatttgtagtttaatgggatttccatacttctgaggtggcagacaacaggagaactatatgaagagtgatggcaaatgtgggatatactacaacagaaacatgtctagggtgaaaggccttgttagacttttcagccttcttctggattcaatttattgttcagaattgtacagaagaggcaccacaattatggtggcttctacactcatatcatgaaaaagcattaaccttgcaactatacctagaggtctttctgaatcttggagtgccatctaccttcctaccaagttgctataagctccttctgtgtggcatttctcccatagggacatgaacctagttagaatcaagattggaaattgctaaaggttgtatttcatgtccaaggttattttatattttacctattttcttgaaaagggtaaaccatcatcataaaaaaaaaaaaacaaaacaaaacaaaaaaggaaagaaagaagtttctggggacccattgtacacctggtatgcataaaactatatcaataacctcttggatcaaagatctccatcatgtggacaaacttcatgagtcaccaatggcatattctgtttcttcattgtgagtagtttctaatagcccttcacaagttctatgcacatggaaaaaaatgctggaactagtattctagagagcctttttcatggtaaaggagaagaactccaacatgaattttctcccaatccatagctgagtcactttgtatttcctgctctagtgagagccttatatgtgaaactcaattcgttaattctcctttgtttcagggtttcagaaaaattgatacagatcactgggaatt

SEQ ID NO: 12148 - DNA, 14544 bp, Vitis vinifera
  Intron number 1 from transcript GSVIVT01010567001 (locus G SVIVG01010567001) derived from phytozome v7.0 (chr-ID chr1 6; pos 16528841 to 16543384)
caatactttataacattcttaaatatattaaagcagtttaaaataaatgccacatttgttttaataaacaacagaattactgaaagagaagtctgtaaaaaaaatatttacctgtcgcctgcatcacttgccaatatatttaaatgctttttttcagtcattcatcacttaagcgtgtcaacttaagtttttttgtaagttttttacccagtcattcctcatgaaaacgtcattcaaagttggatttctaaatttgaagtaataaataatagtctcaacaacccaatacctaatacactctttcttctccaggataacatcacatgtcatttaagaaatatctcatttttatttaacctatttcgtgatataagttgctgggcattcgtttgattttttatattcatttcaatttcaaagattctcgttttttatttttaataaaaaatatacttattgcattagaatattgcaaacttttgacagtcaagtcaaaaattggtatagatttcaatttgtacccataaaaaagaattgcaaatatataagagcattatatgtgcatgtgaacatgtttcaaggacccacgaaagtggatattgactataagagaattgtagcaatacttttaaaataattatatactaattagtaaaattgtagtcggctaaccctaaacaataagtttcttaatgttaattaagcttagaaaggtaatttatccaaatcgaaactcaacaaatattaatcacttttgtaaaaataaaaaataaaaaatcagggtcaaaattaccaacacataagacccattctatcaatcacaatttttatttttgtttttaaatcatgattaatggaaaactcataatttaaaaaaaaaaaattcaatacgtgctacaagtccttaaaaaagttatacactaaaataattttcatctcaaatttagaatttggaatcattagcttggcccaatatgtgaaagacatcgggtttttgtcattgcaagtcaagaatccgaactcaatggtcaaacattatggtaattgggggatatgaaagtgatcccaactaccaaattaagagcaagcatatgaccaaattaaaaatgtcttgagtatctcaccttgtatttcgtagaatcttggtgatgaaatgccgcaaaatgtctactagaagagtgacgttgtattgaatctgaaagaactccattctaaatccaattgtcaaacagggatcgcatgttgaatcatatgaagaaattatgctacacacttttatagaaagggaacaaacctaaatccattttgttgtggcgaataaggtgtggatcttctaaggctatagagagaaaaccatcatttctgcaatctctctgatgatgggaagcgggagagagagcgcactctgtctattcaaaagattattcaaaaaaatgaacagacaccaaccttatatatcctctatgccttagggaccattccctttaaatattgggtcatatgtgtcttaggcccttcatttgagacacatatgatatcgggctctacacatgaggtggcctatactttagaacaaacggaaaacgaaatatgtacatgtaaatgtaaatagcttaatcataaattatgtttcatatgtgagtccatagttattttaacagaatcattaaggttctcatggaagtgaatttgccctttcacatggctaaattaaagatcttttaaagaataatgtagaagcaggagtgtacacacgagcctttcttgaagaaaaactagtggtcatattgaaaatttattgatttagaaaatatataggttataatctctagttggtcatctgattcttttaatcataagaaattaacttgacttgggtcttaacttagtttcgaccttagcatgtcttagcctgggcttagattttggcatgtcttaggtatgagttttgattttggtgtgtcttcaacttgggtttggaccttggtttgtcttgggcaatgctcaaaccttggtgttgttgacattcatcgaaggcataaatgttttatcttggattgaatatgcctcgaatttgatctttgaagctccaaacttgatctttgaatcttcaaaccaactattcaaagttttgaactgggttttcaaatcttcaaactaaggctttaacgaacttgttaattaagtcttgaagggaagctttctctaattcttcccaagtgtgaaagtcttcctatttttccaatgtgattttgaaaacttactacctatttatcaaggttatgagagacatattttcatagttttccttattccttaattaaatttattatttaggatgattttggatataattggatagtttttaccattcaaaaaaatattatctttaattcaaaactaatatttaggaaacttggtatatttcatcatgtcctattttcgtagagctctctaggaagactagccaacaagtttcatcatccttttcacctcctttagagatcctatgtgaacattccttgtcactctagagttcttttgatttagatgaccttccaacttcttgtttccataagcagtgtagggaggcatattattcatgatttcatgagcattgagttaaggttaagtatgagctctccttaccttcctcttgagacactaaggtccttcatttttttgtgagcataaatgggattctctaactctcttgataggggctgcctatcgcaattatgtttagatttctacgctaataaccattttgcctcattattagatatttcttttagagttaacatatatgggatgactatcttggtttctgctcattttattttatgaacattaagtcttcaacctttcttagagacgtttccacacttcactccaaatgcatgtttgatcctatggtgggtcatgggatctttctatatatgtttccatgtttatcattgctagtgagtatggatcttcaccatgttttctagttacaacttttgcctcttgtccattatgcatgagctatacacatgggccctagctaggcctcctatagagtaggaggagaagatcaaggtgatggagtaagaaaaagagtagagcggactcaagacttgagggaaaggtagttgagaacatacttatgttgggatagaactcttaaaagtaagacatgaagtgacaaaattaaacttgagtttccactaatatatccattgtttgtactaatattaatttgagtattcaagcctataccatttgcattgtacatgacttgggtgcattaaaaggtgcacaaaaaattcaagccatgagttcctttcaagattgatgagttatttataatcaattcatagacttaaacaatccatcaaagggtatagtgcactacctcataattagagggataacttgtcttggttattggaataggcatggtgattgcactagtttatatagttatatattaaacaggacctatgatgaatcatggcattaggtgtcgggtagtcatgattcattaagcaactatactacatggactctgattactactcaaaaagtgttatttcatagcttgtaattaactcttttaaacacttttgagtagtagttaccaccttttaacccaattaacatattaaggacccttgcaatcaattctaatcaaattgtgttaagttttggtgttttgatagcttttttatcaccaaagcaatccaagattgagagttctttggaatccatggcaaggcacagggcgtccggacacaccatcggagtgccgcgtaagctgtggtaggctgtcattttcatccggacaacatatccggataggatatgctatcgtccgggtgtgatgatcgcgagtgtcgtgtgcttctccatgagggagtccggataggggagcgcgccacatatcctcttagagaatccggatggagctgctccgccgccattccacccgaatgtcttacatccagaattctcctccgccgccattccacccggatgtctcacatccggcacacaccttctccagatatttcacatctggcacctgacaccggatgggagaggagggcgtttcaacttccccggtcagacatatccggatcctctgatagtgcttatccggagagtttcgcagccattttccacagtgccacggtgttctcctgaaacttcccgatatgtccaaccgacattttgagatatttttctgcacagtgccgcggtgttctcttgaagcttccagatatttgcgaccgacattttgggatattttgaaatattttgctttagatatttgttgtctaaatccccaaaatctccttgtaacccaccaattataggattccttagttattaagtttggaaaaagggtgaataaccccttatatatagtttgtaattttctttaaagaattatctcgggagtttgttctcgatgatcaatcctttgtacagttttgcaaggaagtaaaatacagagcacttgctctgcttttcttatatatttttgttttcttgttattttactttctagccaatcaaactctgaggatttttcctcagagaatgagaggctaggcttttagttccttggagttaaggttgccgggaaaggttccaagtgcaagaattagtagctttgtggtttcagccattaatgaagagaaagtgtgacctgttaatgatttctatgtttttagtttacttaaaacgcctttaaatcacctgggccaacacttggtaaggcaagtgatttccgtccatggagatgcactagtttacctcttgcgagcctttgggaggtggtttgaaggtaggattttctagaatagccgatacttggtaagcttttggactctaaggagacatccattagttatcttttgcgagcttttgaccggaaatccaaggttaaagatcaccttgaatggaaagtgctaggtgagaggtatgagccattgcaaggtgcatcagtgagagggatttagtgtttgaacccattaatgggaagcatctgtacaaaaccggttcgggaaataactatatgttaaatccccaatgcgaggaaaagaaacaagtgatcggaactccctttttgtacaaggaatctgagcctagtgatctaaactccaagaaacacttttctttataattaaaatcagttattatttttggttagtttaaaaccaaacctttttcaactaaagtttatgttttcttttaaagctaaccttgaaatgaaaaggcaccaattaagctttgaattaatatcaattgtgaagtgaaaacccatcccagaacgatcctagagccactatgctatagtagctttgtctttgctaccctagttcatggtgtaataggttataaattttgttgattactcccgcaatcaaggagcaccagctggacatgaatcagctaagacaccaattgggaacgaatcagactcttaaccttgagaagatattgaacttgtgctgaagtcatcactagctttaacttataggtgaaactctaaggtggtcatatattccctatgaattaggtcactattgatggaggttggtaataacaggtattctcaataaagacaccatgatatctcatagatttgagataacatatctcattacgtgattctaaggacatatgttcaagaaaaatgtggttataataattcttgaattagaatttgatgaatgctctttatgagcaagagtatgccagttaatcatataatactaggatctgtaacttaatgatcgaagaggtaatcttaagaggatgatagtatatacctcattagattacaaatactagttcataaggagtttgcatgtagtggatagtaggtcacataccaaagttttgtcttgtctaatcataggataccaaagtgcaattgactctttatagtgggatattgagttaactttagaatcgaattttaaaggaaccaatattttcctatgggtcttagtattccccgtttgagttccttattaatggtggcatagtttttgttttagggaattatgggtttgtagtttatatgtgggcataaaggcattttgataaaaattcaaggttatagttgttcttatgaatagccttttgaattaggctaattaattaattgaatctcaatagggttaattaattattaagactcgagtgcgatagattaagtgacccaagcctaagttgggctcaagtcaattatgcccacaaagatgcctatataaacccctttataggtttaaggctatattttgtacactcttgtcttttagactccagatagaaaacctgagcctccttctttagagagaagaccgcctttctctaatgttaagatctgtgagaaagagtgatcatgtcgaagatcattcggtctacgagattcacgacacttgtagagcttctttatcatattagaattgacttgggaacatctagatcacaagtataatgcactaaactctatatctaagtttttgaatgctatatttcggatctagagagccttatgaccgattacatgtaccctaaaagatctagggttgagaatggaaatatctaggttttcctgcaaatggtatcagagccttaggtcaggatttaacatgttagaactattgtagggtgtgctaactcttgcttgtagggttatcttattaatctcatggcctaaaagatgaatatatgagatgtttttatccgttcaattgaatatgaatgaatgtggttgtattttttattctctagattgggttatacaccccataaaggatataggatttttatttcaatgtaaaaacctttaattttgtattagataggttgtaagctcagcttgaagagcataggatttttattttattgtaaatttttttttaattctatttagggtaacttaagagaaggaagaagacattcatagaagaagacccttccaaaaaagcaagaatcaatgtgcaacctatatgaaatctacatatagtagcttgtgtgtaggaatggcaatttcacgggttttccgggtcacccgccccgccccgcccctattggaacaggtataggaacatggaaatcggggatgggttgggttcaggtttttttttaaaactcgaatcgggttcggggcgggatcgagtttagttataatttgacccatcccgccccgccccgccctgccctgaatatgaaattacaactttaccccccacctataaatatttgcttcatcttctcattttaggtattcttctctcattttaaggttctcgttcctgtcgacactagggttgttcctcccactcaatgtagaaatccatcagataatccattcaataatctcatttcccccatctcctctcgattcatccttgtttatcccatattcacaagaatcacaactattagcggtctcatgagtttacgctactgccatttttgccataggaatcatatcttcatgtatctacaaaccggtataattttttgttgattttttagttgaatgatgccttgatttggtgttgtagtccatttctaattcgggaaagagatacgagatttaggatttttcaatttccggtttcagatttttgccataggaatcatatcttcacgtatctacaaaccggtatgatttttttgttgattttttagttgaatgatgccttgatttggtgttgtagtacatttctaattccggaaagagatacgagatttaggatttttccatttccagtttcagattactgaaggactttttttttctattagttttcgggttgctatttagggttttgaatccgtttcttgcgaatcttaatagggacaaagcaattcttatcgtcaaatgcttccactccattcatattgtttctagggtttctttaattattgcttgctaacctttggctttgtaatgtgtagcaattattttatctttctgcacttgcattgttttttcaatttaataatttgagtcttgatctaaccatgcttttcatgttacagaagctatagctatcacagttcccaatcgattcttgatggttactaccagtggaggcttaaatcaacagaaaactggggtaattcttgtagcattcatattatatattagttaaaatttatccaagttcatatccttacctatcaaaaaaaaaaaaaaaacatgtttatatcctagctcttcattggccttggagggagtttgctttcctcttttgggttgaaggtttaagtaatggtacaagcagcataggaaactgaaatgaaggttaggtttttagttgaactgctttgccttagggtatatagcttatgaacgcagaactcaacatgaattgcattatagccttcgtgagtcagattgaagacttatatattgatttattgatttctattacaaaaaacttatatattagttttgaagtatcgaatacaaggttgtaaagcaatgaatgatgaagtaaattgtcagttattgagtaagcgacatagagttcaatgtgcgctctgataccactattcactaccacctgttttcatcactttttgtttctttccgtaaattttctcattttattagctacctatggcaaaaaatgtcttttggatgttaatttgtttggtttggggtgtttttttgtcagtttctagggaaaatatgagagattttaaggggatatttgggattgttcttcttattgggatcattgtaattgcagcttaatcagaaaatttggagagtccaaacgtatagcaaatctgtaatccagtgacaataaggtgtggtttttttcctaattttttttctcatttcagcatgttgctcatgtggaacttactagctagtagttgtcaagtcccaaaccccaatagttaagaaatagcctacacaaggtgctcagttcgagtgtttgtgtaactcattgttttccttttttttgggcaacactcgaaaaaaagctctgaaatccatccaattaatatgtggtaacaaagtgttattaatttgggtttgaatgttttacttataggctttatttcatgttaagaaaaataacatcagaagaaggggaaaacttttccatgccaagtgtgggttcaactccaattacaggtagtacttcaactattgatggaaccttggtatctaaaagaagaaagttgacttcggttgtttggaatgattttgataaaatcatagaagatggaaaagattatgctatttgtaagcactgtaaaggaaaacttaaggtcgatagtaagaatgagataaaacacttacatgtacacatagataggtgcatgaaatgaagaaatgttgatattagtcaacaattattggcagtagagagaaaaggtcatggaaaagttcaaattggtggttttacctttgatcaagaaatctcaagagagaagcttgcaagtgcaattatattgcatgagtacccactttcaatagttgaccatgtgggggtttagagattttgctactggtctccaacccttatttaagatggtttcctgcaatacgattaagggtgatataatgaagatttatgaggttgagaaagataagatgattagatacttagagaaacttcaaagtagagttgctatcacaactaatatttggagatcaaatcaaaagaaaggttacatggctatcactgtacattacattgatgagtcttggttactgcagcatcatattgtaaggttagttatgttttttttttttttaacttccaaagcgattttttatttgatcctttaatgatactgtttgtgttaatgatttttttttcttaatttaggtttgtttatgtgcctcctccacacacaaaagaagttctttcaaatgtattaatggatttcttgttggattggaatatggatagaaaattatctacagtcactgtggataattgctcaagtaatgacggaatgatcaatatcttggtggagaaattatctttgagcgattcactcttattgaatggaaaaaaaatttcacatgcgatgtgtgacacatgtgctgaacttaattgttaaggaaggtttggatgtcattgaagtagaaattgaaaaaattcgtgagagtgttgcatattggtcagcaacctcatcaagaatggaaaagtttgaagatgcaactcgccaattgcgtattccatgcaataagaagttaagtcttgattgtaagacatgatggaattccacatacttgatgttatcaattgctataacatataaagatgtgttcccacgtttgaagcaacgtgaaaaatactacacggttgtgccatcagaggaagaatggaatatggcaaaggaaatatgtggaagattgaaattgttttacaacataacaaagttgttttaggacaaaattatcccactgcaaatactttcttcatcaaagtgtgtgagatcaaagaggcattgtatgattggttgatatgctcaaatgatgttgtgaaaatgatggcatcaagcatgttgcaaaagtttgacaagtattggagtgggtgtcatattgtgatggcaatagcagctatatttgacccaagatacaagatagagattttagagttttactttccactaatgtatgggtctgaagcttcaaatgagatagaaaaaatatgtggaatgtgttatgagttgctttttgagtatcaatcaaagtctaagttgggccaagaaacttcatcttatggtacttcatcaagttcaactcttttggagttaaactatgatgaacaagatcctctttcaaagtttgacttatttgttcatagtactattggagaaagtcatacgaagtcagagttagattattacttagaggagtctattctgccaaggacttcaaattttgatgttttaagttggtggaagacaaatggtataaagtatccgactttgtagatgattgtttgtgatatctatgctattccagtatctacagttacatctgagtcagcctttagcatgggtggtagggtggtatcaaaacatcgcagtaggcttcatccaaatactttgtaggccttaatgtgtgctcaaagttggttatggaaagtaaaagaaggtaactgatttacataattatcaattttatgaattgtttttttattaaaatatttagtaaagttttataatttttttttttttgtgttttttttttactaggcgattcatcaattcatgactcacagctccaactcacaataatggatgaaaataatgatttacttgtgctttagattttttacttaagatgatgctagagacttttttttttttttttttgctaacaatttctttgtaatgtcttttttttttttttcaatgttgttaagcttatggatatattttaattctggatgttatattttgggatgtcttatatgatgttgattaccatggttgcaactaagaaccgcctgctttacaatcaagttcaagacttgcaaggtagactccttgataggaaatgtgggtgcaggaacatatgctaattgaagccaacaatgccttgagaaggaaagtacaaattctcaaatgaacttggtctttgattttagattgaaatcctgtgttataggaagtgggtctggtcagtctagtccaaaggccattaacaggccttctaagtccaacttggttaaagaggatttaggaatttgcttcattctgaaaatgatttattgcatgaattgtcccactttcattcttatgagaccttttggcctgccttgttgctacttttcaccagtctccacactcattacctatatttgttttattaatcaccgccaagccattaactcactctcaattttgtgatctttagctggaaaaatataatggaaaatatccccttcaacaatcatgggaagcggcaggaaacaatggtggtctactaatggttcttcttagtatatttgttgttgtttgtggctctttcgaatttgggtcatgtgtaagtattgagatctcttccaatgttgtccttgtctcatttggtttgaacataatttcctgagtcaatgaacttgaaagaatatgaaaaagcattctactagccatattcagaaatcaatggccataatattatctgatttgatatatttatgtatatgattactactcaaaaagtgctattttgtagcttgtaattaactcttttaaactctcttgagtagtaattattaccttttaactcaattgacatgttaaggacccttgcaatcgtttctaatcaaattgtgttaagttttggtgtttttgatagcttttagctacaccaaagcaatccaagaatgagggagagctatatatagttcatggcaaagcttttggaaactcaaattcatgaagaaccaagctttggagctccatagccctttgccaaagtcgttcaaagtatgcaaggaaagaacaacagagagaggaaaaacagagtgaagaaaacagaggacagcagctgcagtcttctttcacacttttggagcacttaccgaagtccattttctacattatatatatcatttcaaagtttaggaagtcaagaatccaacgcttcaaacggtgtacgaattggagctgaaatgaggaagatatggccttcgcaagacaactacatccagctcatttccatccaggtaggaattccatccgggtaggaattccatccgggtaggatttccattcgggtagaaattcaatccgggtaggaattcaatccgggtaggaattccatctggctgccgccatttccattcggatgtatcacatccggaatctggctaccgccacttacatccggcgccgcatccacccccggatgacatccggaattcaggatccggatgggaaaggaggcgtttcaacttcatccggcagacatatccggatgggaaatgaggtgtttcaacttcctcgatcagccatgtctggatcttccatggcgtttacccggatcactccaagctgaaggcagaatgttgcacagctgcagtgttctcctgaagcttcctgatatttgcgaccgacattttgagatcttctgggatattttgctttagatatttgatgtctaaattcccgaagtctccttgtaacccacctatcataggattccttagtctttaagttagaacaaagggtaaataaacccatatatatagtttgtaatcttttcgataaaggggatctctaggagcttgttcttagagacaaccctttgaataagtaatatatatatacagagcacttgctctgtttttgaaaaaaaaaatatttgtgttttctcgttctttttatttctagccaaacaagctctgaggaagtttcttcagagaatgagtggctagaattttagttccttggaattaaggttgccgggaaaggttccaaatgcaagaattagtagcttcgtggttttagccattaatgaagagaaagtgtgactcgttaatgatttctatctttttagttaacttaaaactccttgaaatcacctaggccaacacttgataaggcaagtgatctccttccattgagatgcactagtttatctcttgcgagcctttgggaggtggtttgaaggtaggattttctagaatagacaacacttggtaagcttttggactccacggagacatccattagttatctcttgcgagcttttgacgggtaatccaaggttaaggatcaccttgaatggcaaatgctaggtgagaggcacgaaccattgcaaggtgcatcagtgagagggatttaatgtttgaacccattaagaggaagcatctgtacaacaccggttagagaattgactatatgttaattctctaatgtgaggaaatgaaccaaatgacccgagttctgttttttgcatgaggaacctaccttgtgaacctaaacctccaaggaatgcttttctttataagtaatttctattactttctttgccgttagattacaccaaacctttttcaatcaaagtttatgttttcttttgaagctaaccttgaaatgaaaatgcaccaatttagctttgaattggtatcatttatgaattgaaaacccttcccagtgaacgatcctagagccactatgctatagtagctttgtctttgctaccctagttcatggtgtaataggttacaaattttgttgattactccctcagccaaggagcaccagctggacataaatcagctgatacatcgactgggcatgaatcagtatactattttccatgtttaaccctctagtggtttcaatatggggatctgtttctcttgattctggtagatttttactaggatatggtattggtgttctttcttatgtggtatgttttcctgtgcagcatctcttctttgtgttaagaaagaaaattgtccctcacttaaactggatagcaatgaagcagtagaagatttatttgatgcaaattatgtctcatattcaagggagctcata

SEQ ID NO: 12149 - DNA, 3047 bp, Vitis vinifera
  Intron number 5 from transcript GSVIVT01016458001 (locus G SVIVG01016458001) derived from phytozome v7.0 (chr-ID chr1 3; pos 3702278 to 3705324 reverse strand)
ctcgacgaggtatggccgaggcctaaactggttttgctttaccttgtttggttgctgggaaaagtaaagaaaccgaaactttggatttaattgagctaaaattttcatttgggttattaaattactttgatattacaattattccatttaattgaactgtgttttatatatgttgtgtcttttattttctcagcaaccaaacaaaaaagagatcaatgtccattactatcgaagtttgctttatttcatttctgtatcttaaatacttactgtagatagcaaaaaacaaactcccatgtgaattcaaacatgtagttacaaaattaaagcgagaacctgaaaaagatatccgatgagtactacattatttgagcctagattgttcttttgctgtcaattaacgtgactgcaggaatccatctcaacccaaaaagaaaatggccagtgcaccacacttccctagtttagcacccccatggaaattgggttttaaggatgaaaataatatcaaacaattatccaaaaaaaccctgtagtttataaagttgctagaaggacatggacaaatcataatttgattatatcaaacattgtttagtgaagaaaatcacatgtgaagccataataaatggactcgaaatacaaaaatgaagcacaattaatattcccaacaatttccgagggtgccattagctctactgttgtactgattcttctgggtcatgaatgggtaaaagagggttatggtgatgttctctccttttgcaattgaatgattctgatgatttgattgttactgtcaaggaaccagtttcttgggggaagatatgaggttatttactggatattgcaaaaagctgtgttgtcttgtcaaattgaatttcttcactattcccttttcttttttttttaaatattttcttttggcaaaatgcatcatctaaatctccatatccggaccttcttcattaaatatgcaaggataaggtttgttggttcttttgataaatgatatcacgtaaatcaatgcacaccttatggcgtcagcttctaactattgagctatttcactattttaggggtaaagtatcagctgaaaagcactaagattggaccaaaagcatgttttgctatccttacaatcagcacttaaatgcatgtagacaatcagttgcaatatataataatcttatcttttttttaaatttttaagaaaaaatatcaaattatattatattatatattttttcattttttcttgaaagatatataaatttatttttatttttttattgttatcttgaaattttatcctatttactatttaaattttcatataaatatttagaaaaaatttttaaagagttatacacctgaccaaccaaagtctaactcaaacaatctgaactcaacccgtgcttagagaaatgaggttgagttggtcttaagttgaatgtcttatgttagaggtcaagttgggttggactcggattgattgtttcttaagttgggttggcctcaaattagctatcaacctcaccaacctgcccaagttacagctctaaatgcttcatatcttcaagttagaaatttagaatggctggacctgatggttacacagtgaaccaaaaggcattaggagtccataaaatgcagtatcacactttggatcacatccacaaaggagaaatgtaaaagttaaggtcattgcattgttgaagacgtgatgggtgagctcaaaagcactaaggttttgtcatattgtccaaactcctaatgacgtgtgcaaggctacaagttattcttaatgatgtaggcaccaaatttgagctgactgatgcaaacactttggatcatatccacaaaggagaaatgtaaaagttaaggtcattgcattgttgaagatgtgatgggtgagctcaaaagcactaaggttttgtcatatagtcaaaactcctattggtgtgtgcaagactgcaagttattcttaatgatgtaggcaccaaacttgagctgactgatgcaaatttgagttaattatactaagatatttttgatagactagttgaattgaaaataagcaattcacttccaatggtctttgttttataaaaaattatgacatgttgctgaatcagttggaaaaactattttaaaagtcatatcattttcattagagtttgggatctttgtctctctgattgggagtgatcttaatctgggctatgtcatacaactacaaaaaaaagttgtcacatgctgaaaacaaggttgctcttgattccttcttcgtatacatatttagcagaaggactggaacagacaatagatgctcatgattttctgtttttcttttcccttgatatattattatgccaatatgtttagtgaaagatattatctttcacttttatgatccccaaactacttaacttgaaatgaatatcccttatgccttgcccaaaaaaatgagtgagcctaatacctttcaatccatcaactgattttacacagttttatttttattttttattttttttcgttttacaatcgtgttctgttcaaggaaatgcttgctcagggaacgcaccatatattccaatattgcaatgttctaaaaggcaacatctctgttgaaaatggtttcaaccagggtagaaaactcaaagctctagatcagagaccactaaaccaaaccaatgtggtctgattagaagttggaaaagcacttcttgtattggattgtgtcaaagcatgtttcttgatatatctatatcaaacatatccatgagctaatcaactattaatcaaaacaggtcacttaggcatttgagtgcctctacttcctattcatatttgatatttaaaaagccagatattgctaatgataatacattcatgttcttacctcacaacttctttttgtccatatctgatacacagaggatttaccaattcaattaaagagattcagatccctgtgtaattttgtttccccttcatttccattaggtttacaggagatataagctttactgtcagcagat

SEQ ID NO: 12150 - DNA, 936 bp, Vitis vinifera
  Intron number 2 from transcript GSVIVT01017278001 (locus G SVIVG01017278001) derived from phytozome v7.0 (chr-ID chr9 ; pos 6281046 to 6281981 reverse strand)
aagctgaagtcggctctgcagtgaaagtatgacttctttctcatttataatttctgatttttaattgttctttttattgtaagttttccttacaatgtgattggaggtgacattgaagtttgtgtaggtgaaattgaaatccccaaacttctatggttttctggaatgtacatggagactgaaaattctgaattgaatgagaaaaataaataaatgcatacccaatttaattctgtagattatataatatttcaagaatgattgctggcatgtagtatctcaccaatcactgaatcaattctttataatgtgctgatcacaagcctgaccaatcactgaatcagttctcttcaacgtgctgatcacaagtcaataccgactcatttgcaccattgattggtgagaagacatagcaattgaaagtaaaacgtgaattctattaaatggacgggtttgattagtgagaagacataggaattgaaagtaaaacttggattctattaaaaggacgggtttggatttacttttgtaagattttggatcttcctttcctttcctgccacttcttagtgataaaacagatctttaaggtctctgtagcatttttcttatgtaagatagatctgctagtacagcttgaaatgtaaattttccccctaatttattgtcagaaggtgaacccctattcacatccatctcaccatatagaagtgggtagaatataacactctcccatgtctatccaactctgaaggggtgagaccttgatttcttagaccattactagcattattttctgcacatgcatgttttcagttatttaaaattcttacagcttctttgtagttttcttaatcacttcatgataggactttccctagttgcttttgtttagtaaataatcccctgatcccattttcatgtgccagaaagaag

SEQ ID NO: 12151 - DNA, 1836 bp, Vitis vinifera
  Intron number 1 from transcript GSVIVT01025195001 (locus G SVIVG01025195001) derived from phytozome v7.0 (chr-ID chr6 ; pos 3483889 to 3485724 reverse strand)
tttggaaactcacggctctctctacctcctctcctgtgagtgtttcttcgcccaatttccgttcttcttcttttttctcgtttttagcgagctttgatgcccgaaatgggcttgttttgtattgactattgaggctgttgttttcttcaattcagtggagtggaatgtattgttgcgggtttttgtttgatttttgtactgaaaatggcatttatccacgttttcatttgttgaattgttgtgttgtgttattttgctgctcctgctgttgtctgttctgtgtgatttggttttggtggatcaaggtggtgcactggcttttggttccttaatttgtcgacggtgtattcgagttgataatccaaagtctttgccataattttttttttcttttaattttttctgaagggaaagttagtttgtaaatgtgttttgacgatgatatgctaagtgtgagaaatgttcgtggattgtgcttgggttatttaaatcagctactgttttttctcttgaatttttcccagcaattaaaaagggggtttgctttgggggtctttgattcgctttacggaggtggggtttaattgatataaatgtgattagattgggaaagactgatttgttccttctcaaagcatggttctgagaaagtgggagaaaagaaaagaaaattaactttccctttttcaaaaggttgttcctgttttggcatctctggaaaatgctaaactcaactcagctgatcatattgttatgcctatctcagtcgataggttgttttagcattctcacagtctctgacagtaaaaactataatagaattttaatttcatttgttttcccactttttcttagcaatggaaattattcttttgttcttttgtattcagatggtttctcccctaatacacaatatttgcttaaccacagttctttgcagtccatttactatagaagttacgatggaattctttagaggaacgttccaataaaaattgtctccaagggtgacttcctaacaggaaaatggtagcaagactgaaagagtttcatcgatttgaaaagaatgctatttatttatatcaaaattttattagtcccgcagatacatataattcagtagaatatgtgagtggttcatccacattgattaatggttttaccaacttatatatattcacaaataagtgaaattcgatttcttgatctacgtcaatgatatgcattcatgtgagtgggagatagaaaatgtttattgtagttcaattatcagctctacagctgactctaagacgaatccagagaatgtatgctatcctgacattttcttgaatttcctgaatgagggggaatggggagaaagtgccattttggagttctatcaacaatttgcttgagttggtagggatctggtattttctaaatcatcgtgtgaggtcttttcctgaattataagctatatttatttatttttatgtttttaacacgaggtctagttggtaatatatatcagctgctttctgagtttgaatttggagtttcttgaacttgattgagagttatctgttagtgcttttcaggttatgcatcttatcaataccatgctaagttgttttgttaattataagcatctcttatgctttaaaatgttgtgattcgtgattgcatttttactttatggaaaaaagttgaaagattattaaatcttggatttcttacttgctttttttttggttctgacctaaccttttattattatgcccttctgttttattcttaatttttttcttattctctttaggtggagtcagtattagataaggaaaatttcacttt

SEQ ID NO: 12152 - DNA, 470 bp, Vitis vinifera
  Intron number 2 from transcript GSVIVT01032233001 (locus G SVIVG01032233001) derived from phytozome v7.0 (chr-ID chr1 1; pos 13510386 to 13510855)
caggtctgtggacgaataacaagtatccctttataagtttttctactcaaaaataaattgacttgtgaattatctgaattgattcagggaagctcaagtttacctacttgttcataaacgtaagtggattgagtctttatagttgttgtaaatatggcagcttgagtctcttggacctgagtctttataattgctcagaataggttcttatgattagtggagttaacaatggaaggaaatgcattgtcctgatattactctttgtcataaaagtgggaaaaagtaaatcaattttgtagctgctcaacttaatgatttctctgttatgcttatctaagttctttgtgggttggctctgtatgttgagtttaatatcaactttcgttttgtaatcctgttctttcggatttctaagaagctattacatcagagcaggtgactgggacgcagcctgatatcattcatatcca

SEQ ID NO: 12153 - DNA, 12300 bp, Vitis vinifera
  Intron number 10 from transcript GSVIVT01021404001 (locus GSVIVG01021404001) derived from phytozome v7.0 (chr-ID chr 10; pos 4992223 to 5004522)
cacaggaagtgcggacttctgaggtatgaatgctttaaattgagttgttctatattcttaaagaatgcctttttatccttgcttctggttttagccttatattttttataagcaggttttagaaggcacagtctaaacccgggtttatgatatcatgctgtggttgataaatttgtgatatgaatgacagggttagctagagagattgatgagtagtatattttacatctgtggcttagttatatttgattggtccaaatgtgtttggtcttaaagcatctagagagattcctttatgtgttccattgatgttcaagaattgtacaatatttcattataatgtatgagaatcactttaatttgtttgattgaaataaacaggaggcttgctcttacaccacatgataaaatacatctctgatgaactttcttttaggttttccatgtaggtatctaggaatcctctttgactgaactttcttttacatagctatcagtgtattaagccagtggtcacattttatattgttgttcaggagattcatccttttagcctactggccttccaaaatctgggctattcacatcttttcaccaattggatataaactgacttcatcaaagatgaatcataattcatgagtaagcttaagcatcagttgatagttttatgaggtgtccagcctgatcacttataaaaactttaaatattatgattatggcccaattgtcatgagtctgcagtgttagaaaatcaaaggaggaaaacgtgggaggtatccttggaacatagaatgctaccaataaattgtaaatatgactgagtagcttacaaaatattccttggtaatttacaaacactcccttaccatggaattcaaaagttctgtaatttatagctctataaacctttaaaaaattgtaattattgtgaaatttttgccatgtggaaataagtttaacccatttcctttcatgaagagttaaataattttgaggacgtttcccctatcaaagaagaatagttcaagttttagtattggtagggctaatgcctggtaccactagtactctttgacacctatcagtacttctcccagaaagtttactaaaatcacaaaaataggaaaaatggtcaaactttaaatcagtcaaactacatttctagcaggcagttaaggcgaactacacatatcttaggaaaaataacaaaacaagttcatatgtataaagcattgttgcactagcttacacaacttccagaaagaaaaacccgcattggaaacctagatcagtatcataattgggcttaaattacctgcttcaatattatgatttaagggatctaattccatcataacccgtaacatgactcatatcctccctttggttagagagggtactattcaagaacactacttctaaaaccattattaaccatcagatttctcactgggattaagcttttgttgaactcagttcagtccaatattcgtcatatttttcctcttcattatgggcatttccacttgacaactccattcactgatgtccaaggcagtggaggggatgttagttagttggcattggaagtttgtatttaagaaaagtggaatatttggagggtgcctttcttgtttgatgaagattctctggaaggaaaagaacaagagaacattcaaacatctgaagcttcctctcacgtgctccagtatcagttcttaatcacactttgcccttgggctttgcaatttggatgggacttgatgacttattttggtattcataattaattttcatatataacttgtattctggttcatactgctgtttccggtaaattctctgcacattttgcttaatccatgtatttccatgtgcacctggcttgtctcttcccttttcattgggtgtcttaatgaattttatattattagaaaaattatttcattctctatgtaccctccttgtgttagtagtgcattttagcttttctctttgtgctattttgtcatcagctgttgtgcttcctcataagatacttgaatgaggtccttgtatatatatttgttagatagtgtatagttatttaggttatttacttttcttttttcttttcctttccttattgtattgtgggtcccactaacatgtatatatatacccaagtccaatgtgtattctttacagtttttcaataacaataattagggattttccctttttctctctctcttcacatggtatcagatcctagggagaaaaaaaaaaaaaaaccctaattatttctggtttattcgtgaatccattctgggaaatctttcagtgaccgtgtttcattccgatcacccttcccatctcctaaagcttccgatcaaccgtatcaccgtcagaaaaccctcaccgccggcgactttttccggcgactttctcgcaaagtccttttccgacaccgaccataccatcaagtgcgcaaggaggagatcttcaacttttctcaaagcaccggagggagaatcccagccacacgcgtctcttctccggcggcctgaatctcatgcgctggcgcgtgagggcgcgtggggcactttccggccacgcgcttccacctccagcctcgcctgacgccgtctagccaccctccatctgcgcttgtgtcatctgagccctaaaagtgcattttttggggttttttgtctccgccgaccctctaaaccgcctttccggcgaccttcggtgacttcctctccaccccgagccctgcacgtgtcttaggaagtccgcgataagccgtattagggctctcttcgatccaaacgtatttcgttcactagataagtagatatgactactaaaagtttcactttttcctctatcatatctggatctcctatgattacttcggagaaattgattgggagtgaaaattatttgtcctggtctgcctctgtggagctttggtttatgggtcaaggttatgaggatcaccttgttacgcaggaggcggatatccctgaggttgacagagtacaatggaggaagatagatgcacaattatgtcgtgtgttttggcaattagttgatcctaagattctgcttcatcttcgggcctacaaaacatgctttaaattttggaatcaagcgaaagggctatacacgaatgatatccaacgtctttataaggtgacttcttctattgtcaatgtcagacaacaagacatggatttatctacttatattggccagattgcctctcttaaggaggaattcttgactgtgatgcctcttactactgatgttggggatcaacgaacacagattgacaagttcttcatggttcttacgcttattggcctccgtccagatctcgagaccgtctgcgatcagattcttggcagttcctccgtttcatccttggatgatatgtttgctcgcctcctccatatctcttccactcagactttgccatttgataacacttcagattcttctgtgttagtttctcaaactagctctcgaggaggacgcagtggtaaccgaggtagaggccaacgtcctcattgcacctattgcaataagcttggccacactcgtgatcggtgttatcagttacatgggcggcctccccgcactgcccacgtggcccagccatctgaccctcagtcgcctcagcctcccagttcctccacatcttagggtatttccctcactgacagtgagtatgatgactatctccgctatcaggccaccaagtcagcttctgttgcttctgttgcccagactggtaatgcttttgtttgtcttacccacacatcttctcttggaccttggattctagattctggcgcttctgatcacatatctggtaataagaatattttctcttctattactactacctctaccttgcctactgttactttagctaatggttcccaaactatggctaaaggttttggtttcgctcatcctctcccttccttacctctctattctgtcctttatgcccctgagtgtccttttaatcttattttcatcagcaaaataactcgcactcttaactgttctatcactttctctgataaatttgtgaccttgcaggactggagtacggggaagacgattggcataggacgtgagtttcaaggcctctatcacctcaccgcgccttccactcctgcagtttgcatttccactgatgcttcccttctcatccatagtcgtctgggccaccctagtctatccaagttccagaaaatggtccctagtttttcatctttgtcgtcgcttgcgtgtgagtcctgtcagcttgggaaacatactcgtgtctcgttcccaaagcgtttgaataatcgggcaaagtctccttttgaacttctccacactgatgtttggggtccttgtcggaccgcgtctactttaggatttcagtattttgtcactttcattgatgactattctcgatgtacttggttatttttaatgaaaaatcgagctgagttattctctatttttcagaaattttatgttgaaatccaaacccagttcaatatttctatttgtgtgttgcgtagtgacaatgccagaaaatatttttctacaccatttacttcatttatgtcccaacatgggatcattcatcagtcttcttgtgttcatactcatcaacaaaatggggtagctgaacgtaagaatcgacatcttgttgagacaactcgtactctccttctccatagtcatgttccttttcgtttttggggggacgttgttcttacagcatgttatttgattaatcgtatgccatcatctgtattactcgatcagattcctcattcccttcttttccctgaccaaccactttatttccttcctcctcgtgtttttggttgtacttgctttgttcatattctcactcctggacaggataaactttctgccagagccacaaaatgcatcttcttgggatattccagacttcaaaaggattatcgttgttattcctctgagactcatcgctactttctttccgctgatgtcactttctttgaggactcactgttcttctccacctctaagtcttttcctgtttctgaagtcttaccctttcccattatctccttacctgatgcagtgccttctcgcccatttcaggtttatcatcgctgttatcgtgtcactgttcctccttctttggccgaggtacctgctgactcacttcctatcccttcggcttctcctgccccgactctgcctctttctgctgacttacccattgctcttcggaaaggtaatcgatctactcgtaatcctcatcctattttcaattttttgagttaccatcgattatcttcaccctattttgcatttatttctgctatatcttctgtttcttttcccaagagcacccctgaggctctttcccatccaggctggcgacaggcaatggtagatgaaatgactgctttacactccaatgacacttgggatcttgttgttttaccctctggtaaatctacagttggttgtcgttgggtctacacagttaaggttggccctgatggtcaggttgatcgctttaaggcccatttggttgctaaaggctatactcaggtttatggttctgattatggtgacactttctctcctgttgccaagatagcttctgttcgtctattactctccatggttgctatgcgttcttggcctctttatcagttagatattaaaaatgcattccttcatggagatcttgttggggaagtttatatggagcaatcacctggttttgttgctcagggggagtctggtttagtgtgcaggttacgccgttctctatatggcttgaaacaatctcctcgagcatggtatagccgttttagttctgttgttcaggagtttggcatgttccgcagtacagtagaccattccgttttctatcatcataactcttcggggcagtgtatttatttggtagtttatgtggatgacatcgtcattagaggcagtgatcagaatggtattcagaaactaaagcaacaccttttcacccactttcagactaaagacttggggaaactcaagtatttcttagggattgagatagctcaatccagttccggtgtggttctttcccaaaagaagtatgatttagacatcttggaagaaaccggtatgttagactgtaaaccggtagacactcctatggatccaaatgttaaacttatactaggacagggggagcctttaggagatcttgggagataggcgacttgtaggtaaactaaactacctcaccattactcgtccagacatttcttttcctgtaagtgtggttagtccattcctacagtcaccatgtgatagccattgggatgctgtaatctgcattcttcgatatatcaaaagcatactaggccaaggtgtgttgtacgagaacagaggtcatacccaagttgttggttatacagatgcagattgggctggctcacccacaaatagacgttccacttctaggtattgtgtttttattggaggtaacctaatatcttggaagagtaagaaacaagatgtagtggccagatctagtgctgaagccgagtatcgagctatggctctggcaacatgtgaactcatatgaagctcatctatgataacctagccgctttgcatattgcatccaatccagtcttccatgaaaggaccaaacacattgaagttgactgtcacttcattagagagaagatcgcatcagaatgtgtggcgactagttttgtcaactcaaatgatcaactaacagatatttttactaaatctctcagaggtcctagaattaaatacatttgtaacaaacttggtgcataaaacatatatgctccagcttgagggggagtgttagatagtgtatagttatttaggttatttacttttcttttttcctttcctttccttattgtattgtgggtcccactaacatgtatatatatacccaagtccaatgtgtattctttacagtttttcaataacaataattatggattctccctttttctctctctcttcacaatattcaaccacatgtaaagtgtgcatcataaataactgcacttcacatctttgttaagagggtttgatacctgctaatatatcctgacataactttctttactgtgtatttttgagttataaagttgaagcaaacttcacattatgaaaaaagatacaatgattgttttaatccatagagaaatctaaatatggttctggtcagggttaaatttggaactccagttgtttctcttggtggaaccagtttcatatctcacatcaaccagaaaagcctactaatggatgccagtttggttaactaaagcccaaaaggcatgtgctagaagaatattatgcttttatgttcagcagtattagacttggtggtgagcacaactatgaacacaaacatggtgtctatcaatatcagatacaggaatgaggcagaagtggtctccttgtttcatgaatagttgtgactgaaattataaagctaattaggattatcatttatttgcttacagctttctttagtattattgccatcatatcgaaccatcctcaaataatttagatagggctttattttttattttttaatcagaaacagaatatattaatttcattgaatgataaacacaaagaaggacaagtagtccttccaagatgtacaattgatgttcaaaaagtagaaatgcgtacaactccaaaaaatctacaactatctacacaaaccataatcaaacaaagcaatttacacacagtacaaaagttctatgtacttgggggagaaagaagtcaccaacaaaagaaagcaagtgttttgttccttgcttaactaactggtttgaagcttgattagttgagcaaggaacccaagagaaggagccttccacctcaataaaaatatctagaattttgcatagccaagtattgaacttccatgagcctctctccctaaatttaggttggaaagccacaaaagtttagcttgcaacaagccctccaataaagctagcggcttttcctcaatggctaatccactttagcaggtttagaataatgtcacggacttagtcgttcactaagctcgtgcggcacttaggcaagtcaagacgcttgatcttgctaagtcagccttgatcctcaatgcttagcttgctcggctaagacactcgcgactcgaaagcttaagaggcttagtaggcaactccttaaagaatggaagctctttattactgaaagaagcttttacaagtgcttggaagctcacttgcttggtgccttggccaaatgaggccctcacctatttataggcaccaatggaactctctagaaccttggagggttccttacaactcaagactattctagaatgtcctatatcattctaggtacaagcctatatacaagtatatacaaaagtcttctagatttctctagaaccttccacactcttcccactctaggagtctccagaagcttcctgactctatataaggccatggggaggctcatttggatcagcttgtgacaataagctcttaacccaatgatctttgatcacattgcctataccgaattgtctcaaatcacccaaaaaaacatccatcaaagtttaattttactgaacctactggagaagataagcatccaaacatagtcttcttgtgtgacctctcggagtagcaaattttttccaatctaacaacagaagatgcaaggaataactacagggggattagtgactgaggcccaaggagagaataagaagtaaccaaatattaaataacctcctttgattttcatttatcttaaaaagatcttaccatttctctccaacagtaaaaaccataccaaggataagctagccttttgccaaagaactcttcctttaagttgattgctaaagccttaaagaaaattacctacatatctactatgcttctaagaggcattgattagagcaacaatatgtgctccaatggcacatatagcgaatgaattatgtaatataaaggctcaactcaccaaacttaactcaaattgttgctaagaccatagtcatgtgtctaacatatatcttgagctaaattccaagtttaagagatggaaacgatggaagttgtaagagtcattttcaatcatggtagaaaaggggttaaatatgcttaaaaagagttctaagagttgtgaagtatgacgaaagcttcaaaaaatgcaaatggatcaatggatagcatgagagataagaaatgaaggttatggaaagagtagaaaggcaagcaaacacgagaaagaaggttggaggccatagcttaaacatgagaattggagttcaaaatctggcagcagtaaataccttcattttgaggtgaattttgaagcacttctcgttttggggcaaactatatttgtttcaaagcttgggaagtcaggagtccaacatttcaaacagtttgcaaatcggagttgaaacaaggaagttatagatgtttgaagtcaactaagcaaaataggtgttgacttcaaatgtgaaccaatttgaaatcatgccaattttgaacttgtccattgccaagttaagagatccaactaaccaattcaaaaagggcctaattttgaatttggccactgccacttcaatgccaagcttcctccaccttgaaaattgcacctttggcacgccaccaacccgaagtgggtcttggacagttgaaaatgacaattttattattttttagtttttttagttaattatttggggaataagtggccactaggagcatgttatgtattaattttcacattgacttaaaaaaacccaaattttaggttttgagagaatttcttagagcattcttaacgattcttaagagaaagaaaaagacattgaaggatcttgataggtttttcttctcctttattaataaattattgtttctaatttctttaaattcaagaatagttcttgtactttcttttatggtttgtgtgaatgaaaataaatccatgagaggcaaaaataatcttggggtgtgaaacataaaaaccttaggttagagtcatggagaaacaatgaatataattgaaattaataatggattaaatgaaaggttaagacattaacatcaaaatcaaaatcctctttaatgttagtttgcattgagggatggtacaatgccccatttcttaatacaagggattcttggtaattcttaatctctagctatatgaggttttgccattgttatctaccctaagtcaaatctacacaaagtggtaagtctaaatatattaagtagatgcaaccctaagttatgaaactctggttgatctcattagacctcacattttttaatactctaagattaactaaaattgatacctttgttttgtttgaggccctatactcaaagttggatagtggaactcctaatcttgaactatttgaattagaaatcaataattctcttgcaatttaattaggtttattttagtaaatccaaattcagtcgaatcaatttttttacattcttaatttagaggatcaaatagcaagcaatcagttagacccagtttgacaacttccataggccaatctttgaggatgatacctagagtactacaaaatccatagggaatctttctttctttggttttggttttttttcctaaagttgctatgtaaaaaggcttaatattttagacaacaaaattagtggtcaagcataaagtcaatcttggcaagattgaacaatctatgctaaagttccattgctttttttttttttttctgataagtaataacaaaaagttccattgctataaagtaataaaaaaagaaaagaaaataaagaatgatcaattgattcactactctaagcacataagatatgggggtccaagatgagagctttgtgaggtctcttcatttgaagcattttattaatatcaaccttcttattaatcacaagttgtgcaaaagtattagccttaagtggagcttttgactttcaaatgaatttggtaggaacaaaagcggtcaagatataacaaactaaacgagctgtaaaaaatgaactcactaggaaaagttgtgaaggttttaataattgaacccttacatctataaggaaggtgaaaggtacacatgtaataaatgaggaaaggagaactgttagctcctcaattttggattggaaaggttctgatggaaattgaaattccaagaagcagaggaagagaacggacttgaacaaaagaaattggaaggtctctagtcctcaaaacctcaaaaagatttggaaactgaaactagaaagattgatcacccaaccatgaatcctcccaaaaacaaacttttgcactatctcccacagagaaacaagcaaaattagaaaaatcaacaacaacacttaagaaatagctctccaatgagtaaaattataacttgacttgtattatacagtcatgcatatggtttatactctttgatgcatcagattgatgagattcgagaggatcatgttgtttcattaatctctcccttctcttcctcccttcttccctccttttcctttcagttgtctgatataaactttaatctcacaagcaatgtaaatatcccacactcttaggagtaggactgtgcatgtcaaaatattgacttttgaagcatgatgtctttccagtctaatctcatgctgataagaatgtggactggttgagacaaaagcatgaacatttaagatgtccccaattaagagggagttttaccctcctccctaagtgatggtagggatcctgctcaagtgccttttatcattactaatgctacttttctctttttgggcacatttatgttttcaatttaataagagtttgtagcaccctttatagtttcctttttgttaaatatttccaatattaatgtacttctataaaaaagggcaaagaaaaaaactacactggtccattcaagtaaactgcatggtatttatgattgacacttagatgaaatcctggaacagtttccatgtttctagcctcattttgttaaggctctaacattgagaacagagattcatgtgcttcagtttttttatcctccaagaaactgatatattgtctcttagcataatgtacttcaaattctagctcccatgttcttgattccttctgaatactcttcttacatatattcctatacgcttcacagggagggcgaggtcttcattcaacacttaattctca

SEQ ID NO: 12154 - DNA, 20794 bp, Vitis vinifera
  Intron number 3 from transcript GSVIVT01027579001 (locus G SVIVG01027579001) derived from phytozome v7.0 (chr-ID chr1 5; pos 15376129 to 15396922)
aattttccagttccaggtatgctttccttccttcttccttctccttttcacattaatggcggatccatcactgcaacatccagactgtcttctcttactgtttctttctcaattcataaataagactattagtaacgaatgtcatgcacacttatgtctctgagtctcatattagggcagtactctcttcttctcagtttcaaccagatctcatctgaaattatcactctcaattgattcatcttacagattgctttccttttctagtcaatttcctttatggttttttttttctttccttgtctctattcatccaaaaagaaaaaaaaattagaggaaaaacacggtcaacccatttgtcaaagagatggtgcagtaccgtcaatccaaaacagctttcaaaagaccattaatgtaatgaggatagctgggtttcatgttcttcatgggtttgtacggtgttgtctacttgcttctttctctcatacctttttcttttataagtttctgctacaccaaattttcatcataccgacaccacaattcttcaaaaatacacgactaattcattttcttctaaaccactgatgcaatagggtttatcactgataaaagcagaaatagaagactgtacttcccttggtttgattgattactggggttaatgcatagaggtaggtactttttggaacttaaaaagaggtagtcctttgtgttttatccggtaagcaatactcactctcgtctcacccacccaaaagagaaagggagagagagagagagaggtcctttgcattacaccctccataacgctatgtccatatctgttatgtttgtctgaaaaccgcagtaccatttgacaattcattttttttgacaactaaagatggatcaatagatccaaaggctacaatatgaacaatgtaagatcatagctaacagcattgggtactccacaatgaggggtagcttctagtgcatgttgccatctgaaaggcaaacatgtgtgaacattgtgcatgtccataagtacgtccttgtgttagtgaggagtcagcttcaatttagtacattaactgtcttgtcaccatactttcatcacggaaaactaatcattgttcattgtttataattaggatttttgagttttctgaatcacaaactttttaaaagcataatattttgtaaaaaaaaaaaattataaatttaccctttatctttaaaacccactataatttttttttttttaaatttcagatagaatttttttttaacacctcattttttgaaacagattttaaaatcattattttttaataaattatttgaatttaaataggtgtagaaatttcattctaagctcaggattgaaatatacctttcttttggaggctggttctttgccataatcactacagaagagtcgatgattatagattacttttagttcactggatttggtagctgttcatatgaatcaaaaccttaagaaaaatctcatgtctactacttggtatttgctatatgaaacctggtttttctcccagcttcaacccaatgatggctgtccattttgttattgtcatgtcttcaactggaatcaaaacaagtcccctcatgtaaggagtagaagttatcaatactgtcacagcgagctatttctggttgttaatatgttgaattcatgggacataaaatatagttatgtcagacataaacaaggggactagaagaagaaaaaatggagcatttcattaataaaaggtctaggttttcttcccaactaaagatcaaaggattttgaaacatgcaatacagaaactgcatgtttatttcggtgataagtacaatgggggcaagctaatttctcgtgtatatgttcttgtgcttggaagcacattattgaacactgcacgtatgtatgtatttatcctcgatcttaatgtagtcttggcttcaatttagtacacttatcatcttgttacagaaaggagctcttagtcccactattgaaaaccaatcaccattcatcattcatgggtaataagaagcttaaggctgaattcatttccatggttaaatatataaataattctctcattaatattcattcaaaaatattttatgtatctcctctcattcattggttattggtatactcttcttctaagttcagctggtttagcttgtaagcttctttccgttttccttgtatttgaattattcatggaccggggagttctaaagctatggaaacttgtattccttagaaactttagtatctgagaatatcatgaaatggtgtgaaagtttctttctaaacttaacattgaaaagttatctttcttttagaggtttgctcttggctatgatcacctccagaaaagaatgattgtaggctactttttgtccactggattcggtcaccttcacaaccttttaccttaagaaaacatcaacccaactacttgccatttgctaatatgacatcctctcttagtctctacacttccagctacaacatatttcccctttagtgatcttcactttcttgttaatctttcaacttgaatcaaatcgatcctccttcattgatatggtcattgatctccatcagacatctgaaaggaattctacttatcttgtatcggtgttatacctatcaaaagagtttctttctttttatgggcattgacatatcctcctattttttcttgtcctatatttaataacagacaataggaacataactttgatgggtagttctttggtctttttatcctttatgctacatgcaaattaccatgggagaaggaaattaattgattaagcatagaaggcaaaataataataagaataataatagtaatcaaaagtagttctaattagatactgataaattaatgaggtctccttctaggcagatggaggaagttaccaaatagtgaagtactcctgaagatagtgtttggacttctttgctcacaaaatgtggagataataagaaacatgattaaggaagactaaagcaccaacatgaagatgatttagactatgaagtaatctcatagccgcaagatgttatttgtccttctaaatttgattttaaaagttggaatgaggttaaattcagttgagtgtccatataatctatgtttaagttaggtttttcaggtgtaggggaataggtctagcaaaataattagcccaaatttctactagaacaatgaaaaagcttcaaatagattggatgaagaagatattttttccttgacttcgacctaggagtgccccctcgttatatgataccttctaccatatttgctgacacaactctatgagattgcaattaagaaaagctctaactcagagcagatgatcttgttaaggtgattctttcaatggaaagtaccccaatcacccctcaatggcccattaaagtccctcttaacaatagccatccttctccatttgagagagtaagtaccatgatggaccctgcaataaccgtaatcagttcctatttttctttccttgagcttcttctctaggtcaaaattcaggagatcttgttgaatttggttccaacatggtctccttgttaccctttatcaagaacaacattttttttcttgtaatgatgccatccattcacttctaatcaaaattatagccaagttgttttactcatatttctgctatttattgtggcctatcttagtgggcgggtaatcgtgttcaggccatctaaaaggagttggcaggttttattttcatatataatgtgaaactgctccttgtggtctagccaagttgatcgcctccatgataaataattgaatcgtctcaccttccaagtgaaaagatgcattttgacttggtatgaggcagggcatcaaggatcagtgaaaatttgcttagcatgataaagcctttctggatcgtccccattaaatcaaagaaaacaccgactttaatgttctagaagcaatcatagaacttctccatgccttgaattattggactcatgcttgtttcctgaaatcaatcctgtggatcaagcctcctctatctaaatgctttcaggcaaatatgagtatgcttggactaaaggtctaggaacatatacactacttcacatcattgtgcattcaaggaaaatgaaaattcaaaaattagatatagatgatattttttccttgacttctacataagatatggatgacataggagattatagtttagaaaagacaattccttgagaaggaaactcccagaatcaccaccttaggttcccctcttgaaatcactcttatcatcatcccacatgtggagagaaaaattatttatggatttcagataaacaacttaagcaagcaatttcttaagaatgaaatctcctgaaatcacttttaaaaataatcatcccatacatggagagaaaaatcaattatggattgtaaggaaaaattttaagagttgaatgtagttgggggttacaagtaggagagactcaagcttgagacctctaggtaatcatagttctaatatcaaattatcggcttaagtttaaactgttaaaatatgaggtcacgatgtatgctagactaacaattgtaaggttgataagataacaagagtgccaattggggaagcaaagaaattaattatttcagaagaaaggaatatttcattaataataagaaaatgaacaaacaaaaagataaaagatccttcaatatatatatatatagaagcaagcaaaataaaactgaaagacaacaccaagcagcaaaaacactggggggagaaaattgcttgtaaactcaaccaaggaagtagctccctataagctggcctattagtttcctaatttgttgacccaggttttcaactaaaaagtctctgatgaaattcattctgtctcaaatgacttttatcacatatgactgtttcacctcatatccctaatcttctagacagcccaacagattaccactttggtttccttttccataatgatatacatacatacatacatacatacatacatatatatatatatatatatatacacattttcattagaaaaaaaaatgatatagtatgaaggaaattaagagatgctttgataaatcaatttaatgacttaattttaagtcattagttgcagttaaaattaacttaaagtaataggtccaaagaaatcatttttttctgaattcaaactggtttgtcttcattgcctaaaactctcaatttcttgtcagttatttactataactatcaactcgttcttcctttagttttatctcataagctcattacttgatattaataagagtaaatgtgtcaaattcaatacttttagaaagctttgaagttaattctatcaaataaccttaatatttagataagattaatgaattttaaatcaacaaatttaatgaacctcaaataagtcacctcaagtcattttgttttatggaacacctaaggaatcccttatttagccaaacaatcaacaatgtgattggccactgtaggagtccaaaaaataaggctctttaaagattaaacctagtaattgactttcacccaaaatcaaatttccatcttactagcttttcaataatgatattaatagttctcattgcattggcttctttaaccttatctaataccaaataatgcaaggatcctatcgtttgactttaacttctcaatctagttaagctcctttcaaaagaagaattacacttatgcgaaatgctttattttcacttctctagataatgaatttccacatgactaagttcataacatctccttaaaacatttcaatgatggatatttaaaggaaataaaatcgtgttgatgtagagtttcaagctaataggtggaccaaggtatatgtgttgtgtgtctaccatgacataagggctagtgacaagttgattcatcttcaaagatcacttcatcaatccatctactccttatagtcttagattagcaacacctacacttcatagtctaagattgccaacacctatagttgtttttcacattcccaatgcaacactcctttcaactctccttggtggattcttggaagcccatatcaaggttgaagcaatttgagtctagaccttttccaagctaatagtattttcctaaaagtattgagaaattgagggttcaagcttttgatgaatgattatactctttattagggtgttttttagtcccatcaattttctacgaaacatgaaaaactccaggaataaaatgttgggcgatatgatatctgtttgggctttagggtgcatgtatctaagatactaggcatgacagaagcaataaaaacaaatactttggctccataggatgtgttaaaaattatacatggtgttttacgtttccaaacacaaatcttttcctaaaaaagatctcgaaaactactaatcttccattgatggttttatcttttatccttggcacatttgtagagtgactacacccatgagaggaggagaaatggagaataaggctaactttggaagaatggagtgaataggtttattaatcttaaaccccaaggggtttatatagctactcttgtggacttgagtgattttgacccaacttaggtttgggtcacttaatgtagtccttaggtcctaattaattaattagccttgttatgttctaatcaattaattaattcaacctagaaaaaactcatgtaattaatcattaaatcttgtgtaatcttaacttttaccaaaacacccttatacacatatgattaaatatctagttttgctcaaacctttgcgttaataaagattgtgagttcaagtgaggactactaggactcataagaaaatactagatccctcaaaacccagttctaaaatttatttcatattttattaaaaagaataaactgtattctaatatcctatgtcattacatcgagaaaagaattgattaaattcaatttaaataattctttcagttcataacctactatccattgcatgcaaaatcgctatgagttagtgtttgtaatttaacaagataaatgttataaacctcttaagattacctttacaatcttcaagtctcatatcctcctattatgtgatcaactaacatacactaacttattaagagcatatgtcaaattccactaaaggaattactatgacatctcaaaccttgagagatagctcaattggtccaatcttgggtttgctccccaatggtcaccagtttgagtcccctcagggtcattggaggtaaaaaaacaaaatttactatgacgtctctaatttcattattacaagtccttaggatcatctaaaaggacatattgcctcaaaaccgtaagatattatgatgtatccgtggagaatacctattgccacttactcttaatcgataatgaccagtcgttagaaaatatattatcacattagggtcttaccagtaggtcaaagccattgaagacctcaaccctagtttagtattctctcatggttgagagtccatgcaacataataacttggtaaaatcatgactgcttgatagctaatagtcatgattcaccataagtcctattctatgtataaccatatacactaatgcactcactatgggaaactcatcctaatgaccaagacgagttatttttctaattaggaggtagtgcactgtagccttagatagattgcctaagtccatgaattgattgtgaataaactcatcaacttacaaggaacctatgacttgaatatttcgtataactcttattgtaccaaagttatatacaatgtaagtgatgtgacttgaatgctcaaataaatcttaatacaattaagaatggaatagtgaaaagtcaagtcaaatcttaatacaattcaaaggctctatcccaaaataaattatagaaagtttccacattttaaaacattccaaaaatgagttttatgagttagaaatgaatttagaaggctaaaggtttgaatgctctaaagggacgtttgaacgttcatagggatcgttgaaatgcccttgggggacatttgaacaccctaaaaggcgtttgactgatgtttaaacccccttcaggcatttgaactctcctcaaggcatttctcccctattttcctcaagattttgtttttcgtttttcaagttttttctataataaacatttggaaattatgtttttgtaatttctttcactcgattaaagcttaaatgcatacttacctcaaatataatgactttggaccaaacataatccaagtcaaatgaaatttgaagttgtcttaaggcaagtaaaacctaaaaaagtaagtcacatctaatcaataagaaattgaacaaaattgtcaactaaacaaaatacattaataatctcttatttcaacgattttgtgagaaaatacagaattacaataaggccctcaataactctcataaaaccttactaaacctaaaaacaattcctagtctaaaccttcccttacatagtgatgtcaattgacttagggcatggaagccccatctgcccgccgtgccggaggagaggagccctcgctccttctccagcccttgcttcatcttccgtccccgacaggaaccccttgagggtagcgtcgccccaaatggatgcgccgccgcctgtaaatgggtcatccccctccgtcgaagctcgcaaccctcaaggtgcgctctctttgcctttgatctccccgagaggggagtcctcttcttctactcctttctgaggttcggggcttgagagggaaaggggttcttgcctggtctactggagccgacgcttagagagggggaagcaacgccgatgaaggatgggtcgacagagatcccgaaccctgatctggaaaaagacgtggcgaaacaaagaaacctatcggccgctcctccgtgtgcagaaggatggtcagaagaggagctttccaaacttttccactttagtaaagtcttgggaatgcctgttgaagggcatgaagttgaaatcctggccctgctcaagaatttgaagctaagaactggaagtagcacccttagcaagagaaggaaaaagaaaaaatcttgtatcacccgcttcgaaagagagttaaaaagattggattgctctgttagctatgaggggacatcaaggatatccaaaaaatcaggccagagctctagggttttgattccagttgattgatgagaatcaaaattctttgttggaatgtccgtgggcttaatgattttgagaaaagaaagctaatcaatggagtggtgaggaatcaaaaaccagatttggtttgcctcttagatacaaaggtgaaagaaatgtctctgcaaatggtaaaaagcgtgagcgtaggaagatttcttaattgggcgtcattggactctaggggtgcggcaggaggcctccttctcttctgggataacagagttatggagaatttggaggttgaaagcggaggtactccatctctgttcgatttagaaattgtgttgatggcttctcttggattttctctggagtgtacgggtcagtgattggcagcgaaaaggaagatttttgggaggagcttgaagccatccgtgacctctgggatgacccttggcgtgtaggaagggactttaactctgtaagattcccagaggaaataaggaatgcccctagcctcatagctgaaatgaagagatttttagaggtgataggggagctggggttaagagattctccactgaccggaggtcccttcacttggatagggggtttgaactctcaagctgcctctaggttagaccgtttcttgatttcggatcaatgcgaggaccacttttcagccatcacacaatcaactctaccttgtatggttttcgatcacagcccaatagtcctagaagctggaggtttctcttcaagaaaaagccccttccgttttgaaaatatgtggctgaaaatagatggattcaaagacctagtaagaagctggtggaatgggtattctgtagaaagctatagcagccattgcattgctgagaaactcaaagcgcttaagaaggacctaaaaatctggaacaaggaggtggtagacaatgtctcttccaatagagtagaagccttcgccttcctgcagtgttgggaagccaaggagaaggagaaccctcttaatcctggagatatggaggctaaaaatctggctcttgaggactacaagaaataggcccttatggaagaaactttttggaggcagaagtcaagagaaatctgcttaagagaaggcgacaaaaataccaaatatttccacaaaatggccaatgctagggtaaggagaaactttctgtctaaaattagactgaatggggtgactctctcttctattgaagatataaaagatagggtttgaagaacctaccagtccctcctctcagaatttggggattggaggcctagtatcaatggccttaatttcaaggagctgggagaaggagtggttagcagcttggaagttatgttctctgaggaagaaatctttgcagcccttagcagttgctatggggacaaagccctaggctcggacagcttcacaatggcattctggttattttgttgggacgttgttaaaccagaaattttgggtctcttcagggagttttacctccatggaaccttccagagaagcttaaactccacgttcctcttgctcattccaaaaaggagggggccgaagacctaagagatttcagaccaatcagcctggtagggaatgtgtacaaactgctggccaaagtcctaacaaataagctgaaatcagtgatgggggaggtgatttctgattctcagcaagctttcgtccaagggagacagattctggacgtcgttcttattgctaacgaaacccttgattctagattgaaggacaacaagtcgggtttccttcttaagatggacatcgagaaagcttttgaccatgtcaattgggactttctcatggaggtgatgcctaagatgggatttgggcatagatggattaattggatgaaatggtgctgctctatggcaaccttttcgatcctcataaatgggagcccttcgggcttctttcgtagctctagaggattaagacaaggggacctcctttcctcctatcttttccttttcgccatggaagcccttagccaactgttgtcttgtgcaagaaacgggggctttatttctggcttcagagtgggaggaaaaggaagagagggactgatcgtgtcccatctcttgtttgccaatgacaccttgatcttctgtgatgccgaagcagatcagttgcaatatcttagttggatcttcatgtggtttgaggcgattttaggattaaaagtcaatctgagcaaaaccgaggcctttccattaggggaaggcattcttatggagaccctcgcctcagttctgggatgcaagatagggagtcttcctaccacctatttggtctcccccttggagccccctacaaattcaccagggtatgggatacagtggaagaaagattcaggaaaaggttgtctctctggaaaaggcaatacctctccaaaggtggttgtcttaccttgttaaaaaacaccctctccagtctcccaacctacttcctttccctatttgtgatccttgagagggtgtgtgcaaggcttgaaaagatccaaagggatttcttatggggcggtggtgccttagagaacaagcctcacttagtaagttggaaggttatctgtgctgctaaaaaggatggaggcttaggcattcgcaatctaactatttttaacaatgcccttcttgggaatggttgtagagatttgctaatgagaatgagtccctatggaagcaaattatctctagtaactatgaccttcaagaagggggatggtgctccaaaggtgtaagagatcgttatggggtgggggtttggaaggccatcagaaatggttgggagagcttccgttctcactcccgcttcattgtaggggatgacactagagtgaagttttggaaagacttgtggtgtgaaaaccaatccttggaagaagctttccccaccttgtttaatctctctgtcaacaaagatagctggactgctgaggcttgggaggaagatggagttgggggaagctgggcgcctcgttttaatagacaccttaatgattgggaggtgggagaagttgaaaacttgttaggtaagctcttccctatgaccattagaagaggtgtgaatgattcgctccggtggaaagagaacaagaatggaaccttttcagttaaatcattttatagctctctctcaaggggcatcaaaacccccttctcggccagaactatttggatgccttgggtcccaattagagctagcttctttggttgggaggcggcttggagtaggctgctcaccactgatcgtctgaagagattcggttggagcattcccaacagatgctttttgtgtaaaaatgaggaggaaaccatatatcaccttattttgttttgtgaaaagaccagaatgttatgacttttgattctctccctctttggggtgcaatgggtgatgcactcctttgtgaataggaacctcctaggctggcatggtttttttgtgggcaagaaaagagagaaagattggagagtggcccccctctgcctgatgtggaccatttggaaagaaaggaataggagggccttcgatgatattgagaggaacgaccaagatattaagtccatttttttgtacacttttgtgaattgggctagggtatatataaaggaacacactttctctttaatagattttgtagattggctagccatcaattaagggtgtggcttgtttgccctttggtgttttacttctttgtatcttggtatactccgtgtatactctttcctttgccttttggcctttaatgaaattactttacctatcaaaaaaaaaaaaaaattccttgtaaaccgtacacacttaaacaataaacctgtgaaaaacatagtatgacaaaactaatagaatattgctcacaaaaataataaacataagaaaataacacataaaaggcacacaaggagaataaccaacaaaaggactgtaacatacatgcataaataagagctagtgaaaagtaaataaattaccagaagataatccaaagtaatcaaaatactctctctaaacctaatatttcataaatccatgaagagctctaaattctattgatccaacttcctaaattatatttctatggtcacaaagaagttcaaattaatccctaaactcccaaaaatcacgattgaacactttggagcatttccttaaatgcttaaacactcttagaattataattttcagaaaattagcatgtaattatgtaatcaagatataataaggcctgaaaaattgttcaatgggctaagaaaagaactaaaataatttattatctagaattcacaagatttttaagattagaaagaataaaacacaagtataagaaatgagactttaattccaaaacaatgaaatcattagcaatttgagattctcattccatcttacctttttatttcaactaattaatttaggtagtaaaggtgaacacattcaatttgaattcatctagttggatttctatttaccacaacttttttagaaagtcttggaatgtctttcctaccctaattattctcaaatttatttttcaatcattattttttattttttccagtgggggaatttttggcatagtatgagaagttcatctttaattgcttatttcgctttggggatttttccattttgccaagtgatagctttcacacttgaattaaaaatacagatattaatatttgtccatggtagcctttttgcttcatgaatcttctaatatttttcttttatccactttaggatgattcaaatatgtcgaacactctaggaaccataaattaataaaaataaataaattagtttgatttcccttgaaaaatataaagaaatagatttacattgctttagaattttcaaaaaaaactaaattcacgtcataaagtatttagaaaaatctttatttattaataccattttatagattaattaaaatgttcttaatcataaaaatgaataaattcatatacatatttcctaaattgcatgaaactctagaaaattttaagaaaataataattaagacaacattttggttttataggaacttgaatctagatcttagaatccctaaaattatttctctccccaaacataggggcctaaatctagaagagatacaattttaattcaggatataaatcacattgaagagagcatatcgggttgcctaaattcaggtcttaaatcatgaatagataagctccctctaaatcctagacctagacttactaaagactagctaacaagaaagctctaaaaaaaaaaaaaaaaagagagaaaagaaggactcaaggatgcctacaacgatatagcctcaaggacataaaataaaaacactatgattagaccctagactatgaaacaaaatgtgctacctagaagatgaagattttaaagatttcataagtgatgaactccttagagaatctaaaggagtgagcttggaattcactaggcttggaccttgaagtgcaattaggtcttctttcttaacctaaatttgcatggttttagaaatagtgctagtaggactctttcctttgttaggcctagtgtgaaacttactacctttcctaatatttagattggatttttaaggtaattaaattatcccactagcctttttcacatgagtttggtattttttttaaagatcctattcaagcacttgtaagcagtatatgcaaatttcttatatgcaatgcatttagggacatgcttagaagatgattccctagatgaggaacataccttatacttgacaaaagtaatttttctatttataggagtttcaaatttgcttatgtggtctaaacccctttatctccaaaggtttgccctttttggatcattttagttaagatttcaaaacaaggaccaaaattttagtttggctccttagtttatttttaagttgatctaggtccaaggtaagagaattattttaaccatcacatcctgatattaagattcaagaaacttaattttttcaattagatttgacttttcaaccataagttcattgatcctaccatctatgttttttttttttttttttgagaataatttttttaatttttcatttaattgaatttgagaatttctttattcaaaatctttttaagcaattacatcctcacatttttatcttataactttcatggtattgttgctagtcattgagttccccttcctcctcatcactagattcaactagattttttaattcaaatttagaaaatgtaggtaacaaggccatgaaagcaacaagattattgtattcctcattataagttaaacttgtgaattcagatttggaatcacttcaagtcacttttattgatttcttattatttcgggagtagggtaatatgaagcaaaatgtcatttccttattttaatggacattttaatgcagaaggatttcttcattttctttaagtcatttttgtgtttgcctccttttacatttttacaaattctattttttttagcaaatgtggaaatttcaaattgttcttcacttttgaggaagcctttaaggctatcctttttaggtctcttagcgaatggtaaagtcatctcatgggttggtaaagaacttacaagtttatctttctcattaagtccatatttttattttcttatattatggttactttagatcttaatcttttagggaaaaatctcaatattttttcgacctctttagagtcaaggatttttcctcccaaattaaaacaagaattcacaacatcattgagtttaatatagagctcaaagaaggtctcatcatctttcatctttatgctttcaaacttagcaattaacagttactagaagaatgtctcaagcctttttagcaaatttactagtggcaatcccacagaactcatcagtatcaacaccattaaatatacagtaggggccttggcattcgcctcactctcttatttactctcttccattcttgcataggttttaattctctagtaagactaccattcatgacttggggtacccacctaaactccattatggcccatagacttacattttcaaggacttattttgaccttgcaatgggtaattattcccataaaaaatggaagatagttaattgaagtcccctcctccacttcctcccccaccccctttcttttttttttttataggtaaaaggcaaaatgtattataaaaaagctcctaaaatagctgcaccaagtacacacaaaatatataaaatgagctaagtgaaaactaaaagggaaaagaaaaaaccaaacccaatacaaaaacaatgccctaaagttctagcaaaaaaatagagagcccttatttgtccaatttgtagccaaaccaaatctactaattgctaattgaacaaagcctacacctttcctacctagccactcttcacaactctagcttgaacacttagaatccattttccgcctactcatttgggtccttctctcttttccacttgattgattataattagttgagctctctaacttccaaagctccctaccaaaatgaaacatagacaaaggtctcctcttaatgctcgagcctccccccctcctcctctctctgtgatcccttctggcttccaacttccttaacagtgaggtaatttttttctcaaaaccaaccgcaggcaatcccaaagactttctaaaggagacgaatttcctaaaagatgagagtttcccatctcccagcatgtcctaagggttatccttcttggagtgccttcctcactctataattaagaattgcatacttgacatatttatgagaagtttttaggacatccactcctagatccacattagaaaacattagcaaaagcccatagtaaccttccttgctttctaaggattgtcctactctttccacaaaactaagctcttagtcggatccatcgacactctcccttctttgaaaatagaagtagaagatggggaaatcctatctactaataacaacgcaaaagacaaggccacatctatgaaaccttccatttcacataagagagcaacatttataggtgacaatctttcatcaatgatgtgtgtggttccatttatcaggtgcctactcgttatggttccatttgtcaagattaacatggaaaaaaaataaattgtttttttagaatttacttgcttttccactcaaaagaaattttggagtcttgatataatgcaactacctaaaagaaatttgcattaggtctatgagaagccattgttaggatctgatgtgcttttcctacttggctccttggaaaaatatcaacattcaaccaatccttatgatttagttaattctaataaacaatgaacatatactactacaaagtcatggttgcactctaaaaaatggaatatattatactagaacccaaaacttgttaaatgactaagtgggcccttccatgataatgatcggttcaaggaagttaaaatattgtttaacttattgattgaccatctatactcttctcaaatctttgactcatccatatatgatcacatattaaaaagatacaaaaggtccttttgatatatatatatatatatatatataacgacaataataataatgatagtgataatgataatgataatgataataaaagatttcacaaatcattttctttatatgaaaccactaagcatagatttttgtgatcatatattatcaacttggagtgtactatctacatgaattctttacttgaattagtgaacctataagctcaaatacacgtaaaaccatttgtactcctatcgtaaatcttaagattgtatacatgaacaaatcaaagtgtacaatataggaatcctaaacccattaatccttttaaagttaaaagcacttactatttaatagactaattaaacttcatactttatgatggttgtttagtgaagctatctagttagtaatctttatccaacatgactactattctttgttgtctaaaatattaagcatttttatgtgcaactctgactaagaaaaatagagaaagagtcactagacctttgtagtactccaagtattgtcctcaaagaatgacttatggaagttatcaaagtaagtctaaaagattgctttttatttaatcctttaaactaagaatatatgaaaattgatttgaataaattggagtttactaaaataaatctaattaaattatgagaattattaatttctaattcaaatggtttaagattgggttccaatatccaatgttggatataggacctcaagtgaaacaaggggatttattttagctaatcttgtggtattcaaaatgcatggtctaatcaaatcaatctgagttctataacttaatattgcatcgatattctaatttttaatattttattccattttgaagtacctacttggtgaatgaatatgaaatccatgtttaggtctaggatttaggcctttactactctgtgaagatttgacttagggtagataacaataataaaaccttaaataattagagattaagaatattaagaatcctagtatcaaggaatgaccaattgtagtaacccctaatttaaatcaatcttagagggtaactctatttttattatgtcttaacctttcattcattccgtttttagtttgattttacctattgtttcccttaggctctaatccttagttttcatgcttcacaccataagatggctttttaacctatgaggtgtgatttcattcacacaaactataaaagaataagaaaaaatcattcttgaattcaaagaaattaaaaacaatactttattcaatggaataaatgagaaaaacaaaccatgaaaaccttctatgtcttcttctctcttttgaaaatcccaaaacttcctagaataacctataagttgagtttttatgatttggttaagaacccaacacatgacatattcttattgaccacttattttcaaaaactaccaaaaaattaaaatatgattatcatttccaaatgtttaggcccactttaggttgaagaagtgtggatgagtcacttgttgaaaattttgacatgggaagtttcaaaactcataaccaatgtaccaagtcaaaaattttcaaatttcaacatgtcgttgaaattcattttgacttgggaaattatgggattgaaatttttgacatgcatttcgactcgacattctatcactatgtagcttgtttcaatcaatagtaacttcttcgtttcaccttcaatttatgaactgtttgaagcattggattcatgacttcccaagcttcaaaataatatgttgcttgtcttaaaatgatcttgggaaatgctccaaaatttggtcaaaattcatagttggcttcattcaatcttcaactatctttcagctcttctcaatttttgcttaaacttgtttccacataatttcatcttcaaacatgttcatagactccatcactcatagttgacttgtcttttttggctttgcttggttccatcatgtttctcaagtcccgagctctctttaggcatatttaccattcctatttcttgtttgaaattgactcttgaaagttgcatctctttccccccttaaacttaaaattaaacccaaaaggtgtgttagatccataactagggtcttagtaccaatttaagttaatttggataagttgagccttttatgttgcatagatcacatcatatatgtttccattagggcatatattttggattccaatcacaacacaacaagggcctaaatataagttgtaagctcgacaactcctatgactaagtcaagtcacaccatataaaataacaactatgcattgctatagacgaacagagattactcactttcttttgtgattgtgaactaattttgagcttgtaaggaactaataaccatgaacttctatacatgcctaatgctatgcatcatgttcatctgcaatccaaatcttaggcactttaatatacagctgatgtattaaaagagatacaacttatccatgatatgaatgccccacgaatagttcattatggcttaactgaggcttcaaattactgtgcctttctgttgtctttgctttgcattccattgtggtttccatgcatcagagaatacaaaatttaagacagttcttttaaaaattgaatttgatatatggaaactaagactggattatgtcgtgcttattcagtcaaattcccatactactattttcttttgtcagcagaaacactttttatatacatcaagcaaatgaccagctccttttgatgagattctatccataatatagtgatcatagatattccttgcaccagataggcatactaaattattgtgtttcacatctttggttaaaatggaatgatatcctttttaacataagcacctagtaaattgacagattgaacaactttcactaattgattcacagcacatcttttctggctgtctactgtattaaaccatatttctgtgcaaattattgattggtattttgttgtgaaattcttcagt

SEQ ID NO: 12155 - DNA, 5766 bp, Vitis vinifera
  Intron number 41 from transcript GSVIVT01033696001 (locus GSVIVG01033696001) derived from phytozome v7.0 (chr-ID chr 8; pos 18528094 to 18533859 reverse strand)
tagctggctgcatttctataaaacgaccaaaagaggtaacatgttcttttcgttctggtatttatttgtttctttttttctttttacccaatcattactaaaattcataaaagatttttaggcgaaggagatattgagaaacaaattagataaaaacaaggaaaagttggatttttttttttttttagaaaacattttaatttttttctttttctttttcgttttctccctgctaggattttaatctggaacctgccatttctctaccctaacctttttccactcgaccctggacttaggggccaaagaaaaagttagaattatttaattgtttctatgatttctaggaattttttcttagtattctttaattgttatgcattaatttaatttaatttaatttgtctatcaaaattatttttgtcctttggtttgagagtttgaaccttctaatgggttagttcaactttcctttttctttaatcggatagaaatgagtaagcttttgtttcaaatttttttagttggtttggatacaattctactcaaccccacatgatgctggtcctttgctagccttcttgtctagaaagaacacacttcaaatagaattagggatgtcttgtttcttggttgattgtttttgttttctttccttcttttttttggttgctccaaaagttcaaatgaagttgcccgacatatcatattatactggctaaactccttgaagcttctattagaccttcacaaaccaataaaaaaacttaaagagtgttatcaacaaaccaaatagtggcagagccagaaagttttggggggggagggggggaggggggaaggcaaaattgttcataaattttaaaaaataaaaaatctttgcaataaaatagaaaacaaatataatatatcctccttatcattccaaaaaattgggaaaaaaaaaattgattttgaaatacatattgtaaatttgattagaaaattttcaatattttttcattaaaaatcttttaaaactttttcaataaattttataattttttaaataaaattcgagattttttttttccaagtaagtataaagtcaattgaaagtgatgaaatatttgacttagaaattacctattatatagtaatatcgctaatgtattaagtgtcttgatatttagacttttaatgaattcatatatcaccttaaataatgtataagtagttactaagaatttgatacttattattgtctaacgttgaaagcattttcttagttatattatcttgaatgagcaagactaaatataaatccaattaatgtgaataaatttaaaaatttcaaatgatggaagagaatataccatgaaaaatttatttaataaaatataaaatataagatgataaaaaaaaaagagaaataaaaatagaataaaaggaaacaataagtaaggctattaagtaaattttagaaaatattttattttctttttaattttattcaacctactaaagtaaaagttaatttcactcattcggattaagtgtactaggctccctgagatttggattaaatatacttaatcattattaacttgaaatttcgttaaatagctactttattttgaattgaaaggaaaacaagtgaaattaacaaatgaatagaataagggagggtttttgatgaaattttaaattaatagtggttaagtatattcaacctaaactcgaaagaggcaagtggaattaactctactaaataaatttactttttaattttatttaaaatttataacattatttttatttaaatttttttgtggtatttgaaatatagttaatttttatattctaaaaatttaaaactaaatttatatatataggggttcattttaatattttaaaatctctaactatctgtaacatatatatatatatgttttgaaaccctgagggatagctcagttggtccggctttgggtttgctccccaatggtcaccaattctagtcccctcagggccactggaggtttaccagtcgttaacttcagggccccgtgggattagtcgaggtgcgcgtaagttgacccacaccatactagacacattgaaaactgttgaaaaaatttataattatattcaagtctcatattacacccaattttatggagagatttgggattggacatagatgaattccatgcttctgtatatatttaccaataattaaatggcacaaacatggaaaaaaataagattttgaaatttgaataccttgaaactgaaaatgctctgctgcattattgattttattttttattgatatatatatcacttgagccaggcatcaagggcctttgctgcattattgatcttgagtagacaatacaataattttgctataacaacattacagatctctaaacagattagtaatttcatcatacttgaattaattttttatttgtccttaattaacttttatccctagtaatgggttcagacttgattcagaagccaaatgatcttttttactctattatagtgtttccgtgtgggtttcaattatgcatgccatatacctactgttcttctatgctttaatgaggttttgtgggacttatgtctctcaaagctctatcttggagtatattccctccatgtcattaatgcttgccaacctcaagttgatgaaagattaaaaactattcattcatataaaacaccaaataatctatctatttaaaattttatacaaagatgtagtttatgaattgacaactattgagcaaggattaaaatatcccaaactatcaaaatattggtggttcaattttatggaaaatttggcaaatatcgaaaatgtcggatggaaatttggaaaaaatgatgattatgatggaaattaattaaacctcatagaaatatttttaaaaaaacttcaacaaatgataaaacatttaataacatatattgaagttgtatgataaaatttgtaatgttaggtaatgacataatgtgcgctaataagaactataaattttgaaagcatatactcaatattaacataaaggtaaaaaaattttaattaattttttaataaaataatatatgtatagtcaaacaaaattaatacatggatacaaattttatttcattgaaaacatgttatgtttcaatagttaaaattaaaacatattacatttataaaatggttgaaattttatcaattttaaaagttattcttaagctaagatgtaggatatacatattccatgaatcataaatttagtttttttaatcaatttttattttttatattactgattttgcaaaataattttttttttatgataaaattaaatttgtggttgaaaaagaagaactaaaaaaatgtttgtaaaatatattataaaataatattaatatatgtattatttctaaatattgaataacataatataaaaaaatatttataaattttaaatattttaatcataaatattgttaaacacaagataaatttcatattttttttaaatagaaaatattggaatgcaatataatttttattttaaacattgaaaaataatatatacattccattttatttatttttattcattttataaactaaatataaacattacaagtatcccattggatatgctaccttaggatatcatgcttgttggacataatattcatggatatcatatcctaagatatgcatttctatattccattataattttttttattcattttacaaactaaatataaatataacatatcattggatatgttaccttaggatatcatgcctattggatataatatccaaggatatcatatcctattggaaatgatatcctaggatgtgcatttcctatccaatgagatacaaagatatacatatcctatcctatcccgccaaccaaatgtagccttagggaatatcaacacaagtagattgataaataatatctttatgtgtaaagaaagcaccaagactcacattgaaatactcccttccattatcagacctaattagtgtcactgtgcagaaagttgattatggatcatggtgtaaaaatatttgagagtgggagtagtttcgaatttttgcttaagaggtatacccatgtagtcttgttgtagtcatcaataaaattgataaccacctagccctagagagacaagctacttgtgagggttcctaaacatcaatatggataatggagaaagcactttcacttcttttgttacttaaagggtagagaatacaatgactttttaccaactcatatacttcacatttgagtttagaatgatctaaattgatgaacaatttaggaaacaaccattgtaagtaaaataaatttgagtgtcctgatctctcatgcattatccaatattttcctgttggttccttcactacattcccctttatttgataaccttgtattcattccttggtaggtagtaaaggtcatctttcctgaagtgaggttctgaaaaatacaatgaattgagaaaaaggttacagagcaattgcaagtttttgtcagtttactgatggacaataaattgcaaaacatgttataaacatgtaatacagaggagtgagtaatttctgtgaaacagacacgtttcctttatcacttacaggggtgacaaatccatttgcaagctgcaccctcttgttttcctgaacatggtataaaagatgagaaaaaatcaaattctttggccatatgatcactgacactcgaatcaatgatcccggagcttaggattagagaccgaaaaggtactaagggctttaccaattgtacctgattgtgcaaatgcataagaattggaagatgggggaaacctctgattttctcatgatcttatacaaaagatcaagttgctcctttgtcaaaggtaggttctcagcacttagagaagatcctgtgttgtctgcagtgaacataattttcttacatgttcagttttcttgtgacatacaaaaggacttgtgagagctattttacatgggcttgcgtatgggtgtgacgtgcaagtgtcaggtactctgtaaaaaattgaagagtccaggtatctccatgcaagatagagatcctagtaggtgtcaaatttagatacataaactttattaataatttgaagaagagaaattggacctgacaatgttggctagttaaaatggtaaattatgttagtgggttgtactgagttgatcttagcctgtgggtatgtatggattcatttctaaaggaccagacagaaccaaaaagaaaaaggggaaacttcgtacttcctactaaatcatttatatgctaaaacttgttattctagagtttccatgcaaggaccagtgaagcacataaatctgcaattgttaaattctacacaaagaaagcattataaggtttgggaatcaaacatttaaagtagcattcccaaccaaagatcaatctatatctctatagtagttccaaactgataaaacttatgtacttgtgtagaagttgcttaattgaatgatgaatttcatggatcattgatgagttcccttctacacaggttggactatctctatagtttaatcataaattatggacaagtttattcagatattagttccaaaatggtgtttttgataattacctaattcctttattgtggtcttgcattaaatgtaaaaaattggattttaactaattttgtcctcttatggtattttttttttcaggtaccaactat

SEQ ID NO: 12156 - DNA, 5545 bp, Vitis vinifera
  Intron number 12 from transcript GSVIVT01024791001 (locus GSVIVG01024791001) derived from phytozome v7.0 (chr-ID chr 6; pos 6926041 to 6931585)
tactgttttggaggggcttggagctcatttggaaggtactaaattactgctttcttattttttaaattatgtttcagtgcatctatatggtactataattctttcaaggatttatctaggactatttaattggatgggcagacaaattactagtaaagttgcatggacaggagagtttaatcttccaagctgccttgaaatgcatcaaaattgagttggttgccctacttatatttaaagtttctagtttgtaggttagaatattttgtctgatagaacctcgaaaattagacacctgaaaccttttagagaagagtcactgcccttggatttggagcacaagaacattgatattttggtataaatatattttactctccaagtacaaagcattgatattctctgcaatagctttgagagatggtgaagtccttttatgatttctttatttatgtatttatttatttatttatttattttttttatgtttgatgaagagggtggaggggtgttggtttgattttggtttgggctggattggtgttgtgtgtgtggtgtggagtggggaaagattttgagtctattcaacattttgagtctattcaacattatcgcttcaaggtacttccaaacttgaatcaaatgttttttatggtcttactattcctcttttcctcctcaatatagtatacgaaagccatgtggttatcttttcctagaccatagacttagtcctatgaagtcaatctaactagcaaacctagggaatcgcccacaagaatggggtgatggtcatttttgaaaaaaatagtgacattcgttttatgatgcttttattttattttatttatttatttattatgtttggtgaagagggtggagggcattgatttgatttgggtttgggctggtttggtgttgagggggtggtgtggagtggggaaagatttttagtaaattcaacgttattgcttctcaatgtacttccaatcttgaatcggatgtttggtatggtcttacttttcctcttttccttctcaacatagtggatgaaagccatgtggttatctttccaagaccacagacttagtcttgtgaagtcaatttaattagcaaacctaggtaatcacccaagagaatggggtgatggtactttccatttttttttccctatatataagatatttaactagaattacaataagatacaataatgaataatgagaataagtaagcgattaagagcaagggttagaaaaggtaaataatgatttcaacttggtttggcacaatctcgtctatgtcaatggccttaagctttaatccaaaccttgaggtaatccattatactaaggaccatccaaattaagaaatccttcaactttacacttggtttttaggtttcaatgggcttctaaaactccactagtgttcttctaacacttagaattactaggtatcacatagacaaaagagtctgccccttaacgaacaaccaatctataaagtcaaccaaatacaaagtgtgatcctctatatacaccatagcccaattcaaaaaataatacacaaaagaatatttaatagcttggtcagtctgttcgacgtcgttgtatgctttcccattcctttctttccataaagcccacattaggcataaaggtgcagctttccacgcttttggtcttcttttaccttccacccaagcaagttccccctcacggtggaatgcaaaacccaatgcacaccgaaaagggagaagaagatcagattccacaacatgctggccttgttacaaaacaaaaaaagatggtcattagtttcttcttcttctttacacaagaaacatctatttggcatgtttcatccccttcttttcagctagtcagtagtcaagactccattccaagatgcttcccaagcaaaaaaactctcactggagcccaagacctctaaataatgcaccaagggaaagggtcactagaagcccttgtgtaggaacggtagagagaactaacaaaaaaatagtcattcccactttctctccagctcaaagtgtccttcacagggacatttcattaggccagttctgtctttggaccacctaatagagttagacgttaatgcaggcaattggtccttacattgtaaaccgaataaagtctagttcttggaagagttccagatgctagagttcagtcttacaacttcaacctaagtcaggaactctatttcactcaataaacccctttttccaatgcagtagtttctcttgtcacttaagatgaaacttcaactcacaaaatactgacaaaaccttgagtgagtgactcttaaaagaggcaggaatgggtcttaaagtagttcctgagttagtcttcttaattggggggccttgtgacataagggggtccaggggaactcccctggcaaacctgctctgagagagtgacccttgtttataaggggcacgaacggtcagtagttataattaatagacaattatagtattgtaacaagcaagtccgctattcctgactcctagtcaggaatagaataaggacttgaccttataaatataagtctcgcacttccatatgagacggaaattcattacggcggtttactatatcaccagtcccgggacctcctgactttattcaattcttcttctttccttcctgacctggaattactgctaataaatgcctattttaaagactacggaagggtataataagtagagcaaatgaaagagcttcgagttgatggtaccagtgaaccgttgaaaccttccttacctcccttcccctggcatcttttctaacaaccaaagaatgaagcttctgaaacagactccacctctcccatctcccaatcattaaggcgccttgagaagcgaggactccaacaaaccaactccccaccctcctcccaagcatctgacacccaaccatctttatcaacaaccaagagaaataaattaggaaaaacttttttacagcgtttgatcctcacaccacaaatctttgcaaaactcaacatttttccaatttcatactaggaagcggaatctacctcgtatgccttctcattctcttctaatggctttccacacccctagaaggctatgaattcctagtcctccctctttcttattagcacaacaaactttccacttcaccaaatgatgccttttctccaaggctccatctccccaaagaaagtccctttgtatcttttcaagtcttgcactcaccttccgaggaatgacaaagatggacatgaaaaaaatcggaagactagaaagggtgcttttgatcaaggtaagcctcccaccccgtagagagatattgtctcttccacatagataatttttttttaaatctttcttccactatgtcccatacccttagggatttgaaagaggcactcaaaggaagacccagataagaagtgggaagcttcttaaccccacagctaactcctccatattctctaccctttcgacgagaataatctcgcttttatctatattcacttttaaaccagaaagtgcgtcaaaccacacaaacacataacttaaatatttcagttggtaactattggcctcaccaaaaataaaggtgtcgtcgacaaacaacaggtgggacacatcccgcccttctccatcttttctcccgacctcaaaccgcgaaataaaacccccacttctggctttgagcagcaactagctaagcacctccatgaccaaaataaacaggtagggagacaacgggtcgccttgtctcaaaccccttgagctatggaagaagcctgaaggagtgccattgattagaactgaaaaactagctgtggaaatgttccacttgatccaactaatccacttttcctcaaaccctattttagacataacaaaaaggaggaaatcccattgacatggtcgtacgccttctcaatgtccatttttaggaggaaactggggatattgctctttaatcttgagtgaacggcctcactggcaatgaagactacatcaaatattagtctatgctgaataaaggcttgcggaaactccgagaccaccttccccacaaccgtcttcagcctatttgccaacaccttggctaacaacttgtgcaaacccccaaccaaactaattggtctgaaatcttttagatccacaactcccccactttttggaaacaaaactaggaaagtagaatttaggcttctctggaaagttccacgactacagaactccccaaaaaaggtcataatctcaaatttggtgaactcccagcaaaactaccaaaaggccaaaatgaatccgtctgggcctggtgctttgtggcctgagagactgcagagggcttcaaaaacttcattttccataaaaggcaactcttaactttcttgacttttcttcccccaacactccaaattgtaaaccccttacacttggtctccaattccctgattctgacaacaaagattggtaagccctgcacaccccagcccaaatcttattttcattggtcagtgtaacccctttgattttcactttggttaataaattcctcctcgcatgggcatgagccatcttatgaaaaaatttggtgttcttgtctccctcctttaaccaaatttccttagacttttgtctccacgaagtttttttcaacaaagcccatttcttgtaatcctccagagccctttttttggcctttgcctcaagagaaagagggttgcccctctccttcgaatcctagaactaaatgcgagcaaaggcttctgatctgctaacagggacattgccaaaaacttttttattccactttcttagatcatttttaagagccttcaacttcttggcaaggcaatgactactagtgcctgtaactatatactcaatccaccacatcatcaaaaagtttgtcaagcatgagtttttaatcttgcatgaatccaccttattttttcataaaaatcatcaataatgcataaatgagttcttttaaaaaccttcatagctgtttaattctttttcctttttaaaaaccttcatagaagtgcggttcttttttattcaaaaggtttagcttttaaaggtcaatgtgaaactatattttatcctctttgagtagcaccttgacctagtcttatgggagaactcattctatataatataatcttgaaaaaaccattctataaatttcctttttagcttcattgcattaagttgcattgattcttcttgattgatccaaggtgatcttcttgcgtatgacatttcaagttgaatgttaaatacaagcctttattttattgtcatcaaaacttatgtttaatcaatgagctgacaagtcttggaaggcttggttcaaatgaagtgatttcattcccatcccaacagggcaaggcctttggattcaaatatctttacattaaacatcttatatagaacttgagatataaaaatgggggttgttctaatcatacagtttactttcacagtatcctaactatgcttttgattcagaaa

SEQ ID NO: 12157 - DNA, 4411 bp, Vitis vinifera
  Intron number 12 from transcript GSVIVT01026563001 (locus GSVIVG01026563001) derived from phytozome v7.0 (chr-ID chr 4; pos 21792010 to 21796420)
aagggaaggttcaggtatgtggttatcattcactagtagtattgttcctctatattattctattttgtttctggataagtgtagcagatgtctttcttcataggcctctgttgaacctaatatccttaaaactttcatacataggataagtttaaatctttaagcacaagttgtataatctgtttgtggtcttaatatttgtaaattgcgaccctacattttttcaaagctctaggggattgagacaaggggaccctatctccccctacttgtttgtgattgctatggaggcccttagtagattgctctcgaaaggttggatggtggttttatttcggagttcaaggttgggggaagagagggtgggggtgaggagatctctcatctcctttttgttgatgacaccattgtttttttgtgaggcctcttaggattaagtgactttcttgtgttggctactcatgtggtttgaagccatgtcggggttgaagattaacttggagaagagccaaatgattcaagtagggaaggtggacactgtggaagatttggcttgtgaaattgagtgcaaggtgggaaagctgccatcttcttacctaaggcttcccctgggggcctcatacaagtttgtggcggcttggtatggggtagaggaacggtttcgtaagaggctttcgttatggaagagacaacacctcttaaaagggggatgactcactttacttcgtagtacctgacccattttaccaatctattttatgtccatgttcaccatcccaaaaattgcaaggttgagattagagaagattcaaagggattttctatgggggggaggggccttagagaacaaaatgcacttagtcaagtggtcttccatttgtaaagcaaaatcaaaaggaggactaggcgttcgctctctttctttgccgaataaggcccttttttgcaaatggtcttggggcttctctagtgaaagtgattcgttgtggaagaaaatcataaagggaaagtttggggaggaagaagggggttggaggttgggagtggtgatagagctctatggggttggggtttggaaagagattgggaagtagtgggatttttttaatacaaagatttcctttgcagtgggtaatgggagtagagtgaagttttggaaagacaagtggtgtggtgagaaacccttatgtgagacttttttgtccttgtttgccctttttgatttgaaggaggcatgggtagttgattcttaggggccaagtgaggaaagaggaaattgaaactttcattttgttaggagtctgaatgattgggagttgggtgtcatggagtggttcctttctaagccccaaggacagacagtgaagagggaggaggatagagtagtgtggaaggaagataacaaaggggtcttctctgtaagagggctttactttttgttggaaacaaattataccatccctttccttttaaaaataatttggaactcgtagattcctttgaaggagagtttctttacgtgggaggcttgttggggaaagcttttgacgttgggtcaacttcaaagaggagggtggacattggctaataggtgtgcattgtgtaaagaggagttagagtccattgatcatatccttcttcattgtgataagacgagaattttatgagagctagtgttctccgtttttggtattcgatgggttttatctgagttgataagggagactctcctagagtgacatgactctttagtagatagaagacgtattatgccttggagagccgctccttgtattttctagatgatttggaaggaaagaaatgagtgatttttttgaatgtgaggaattgtcttatcaaaagctaaaaattctttatgtaggtagggtgtatataggcggtgggtagacgcatatcgttgatttcatagattggttggagcttggatgaggtagggggtatttttttgtatgttccctctctcctgttttttttgtcaagtgcactttgtatatgtcctatatactcttgtgcgctttaagcgctttttaatacattctcttacttatgaaaagaaaaaaggaaaaaaaaaaaaaaaacaaaaaaccatacatttttcatctaagttatgatactgttaaatgatatcttagaaaatgctagtgatgaaatagataatctgtagtttgtattcacatgattttttttttttggtggtaaagatgtttcaatagtttgatactattgtgtagttcaaaaggagtctaatgatatcctcttatgccttttgggagaggtaatctgttaataataattgaaatgtttttcatatggggagtagtaactgtcagtattgatagctatgaaacaggtcaagcttaagtgactacatccattcaactgtgtgtattaaattctcaactataaagcagatgctatagcttaaacaagtttatatagagaatattaccttggtttaacctgttttcataaactactttctaggtaaacggtcaacacttgtttacatagattggagaaaaacctgttttggaaaagccagtggtaattggttgtgatagcatccatttgcaccatgccctacatattaaggaggtcactgggaaccatgctgagtggaatatctatgaagttaccatttagataaaatgaggaagtatgaattattttcttctgggcaatgaggtcagaagaaaagcaagagaagaataaattacagtaatcaaaagatataggaatagagagaaatgattggaagcaatgctctaattcaactttcattggtcaaagttatgataatctaaaggcatccttctatgcctatgctttggctctttggtagcctctaaatgaatttcattaaccataatagttagtgagggaaaaaaattaaggaatagcattcatgaatttttcaaatcactattaaaagaaaattacaatctactaagtgctagtatttatgcacagataaagctcttatttcttaatcagataatgggtgagattttggttgattatttattgagctctttgaaagatgtcatttatgttgactaattgcttgttgaaatcctgttactctcacacgtactaacatgacacctggtaggttgccacacttccatggtaacttattctgctttgctgcatttatttctagaagagcaccaaaaaaatcaccaaattaataatatggaaacatcacagattcctataaaaattgcttcatttaaactcaacatgattttttcccagattttttttaccagatacttctaagtggggtgatgaatgaataaatggtccacctattttcagtcaaccatgcatagtctggcaaaggtaaatatttgtaggggtatgacttgctgggatttaacagtagtcttttataagtacacacattccatacaaagaaggaaaatttggataagactgcagctttccaggtgacctttttcaggaaagtggctcctccaacattcaccctgtgtaagaaggatttaattgaaatccacacttgcagaatctccaccattgcctatctttcttcaaaagacttggactaagacttatggttgtaccaccatcttactctccaaagaataaataatctatagttccatattttcttgctagatatttggtgttttggcttggggttgggatcacagtaaagcactaagaaacttttgtcattaaccagaaaattctgttagtgccttaagaagtcaactgaagaggaatgccttcatatgtcagatgtctcaaaacttgacttgctgccactcctgacagtgaatccccatgtaaatgcaactttaactttgcaatacaggtttagaaagcagcaaatgggctattagtttctagagtatccaaattgttatggttcaatctcacttttgccatactcttatcttgtccacccaaccccactgaatccagatatcaattttacaacatgtgttatcttcttttttattttttattgttcaaacatgtttaccttttgtactgtatggactgattagaatatcactggagatggtcttagtgaggttgtgtggcttgtgatctattcttatcattatgcgttagatcagtcatttatatttaatctggtatcttgttattatggaataaggatatttttcatctgaacaatgtggagtgattagttttgctagcaactctgatttagttaatggatgattcaactttccttttttttttttttgataggttagatgatacaacttctctttgcttctaatttgtattatttatatacttacaattgttttctaatctttaataagtaaaaaactctagatgacacttccttcttgtgcaatgcagctcctggaaattgcacaggtcccag

SEQ ID NO: 12158 - DNA, 4817 bp, Vitis vinifera
  Intron number 4 from transcript GSVIVT01029816001 (locus G SVIVG01029816001) derived from phytozome v7.0 (chr-ID chr1 2; pos 15240512 to 15245328 reverse strand)
gacacattgggcaagcttacaaaactacgtttcctgtatgaatacacatccttcaggaactttcttcgatcattaaattttcttaccttccagttaatttagcttccttcatatttctttttgtgtctactaattaaaaggattgctcacaataagctagtttagcgttgataattcagatgcttgtacttagggcaattgcatttaaaaaatatattttgggtttgttctctgcttcatttaatcatgatgataaaaaatttgatacacatgtatttaattttaagaaatgcattagcataaattattgatcatatggagtctaatatagtatatttctattttgatagaaattcgaagctctttatttccactgtggttgagacatcatattgcatttttattattttgatttcttaagtacaaatttaatcttcatttatttatacgatcttagggaagcgtcttctctgttcacttttataccttataactaactttttgcattaaattgtaatatggcataggtgtaaacttaaacagaaattattagtaggttgtttagttcccattcctcctttccttctctataggtggtgtgactgtcttttgtacatgcaggacatacattcttctagttgtattttatgatagagaaaatattacaaattgataggtctagtttattgtatttattccttccctttttcaaccaatccatacaaccatttggagagtaaacatctattttggacaacctaatgtggtccaagagtcaattgtttggataactgttgattggttcccttagaactcattaccactgatgggggacaaccttttaaagtctattcaaggatgaaaaggaagacctaagtaaaatttaagtaggattaatattaattagaattgaattaggattagtatttgttggagtcaaattaggattagctagttaaattataatataattagaatttgagtcctaatagattattagagtcctagtagactttgaatttcttagagaaacctataaataggttaatcaatgtaaagcaaatggataacttaattgatattaataatattatgttttcttcattgcaagtgttgaaatcctcaatggtgagactccattaatttttcttctaggtgaggtcctagaaggccttagtgagaatctaaggtttccattttttcttcctcgttcttctttctctttatttatttattttttctttaccataaaatttattcatagttcctctctttatactctaaaatcaaaaccttagcccacctacttttgagtgtaggcaaccatcttagggttgtcctactttggttttggtattagagtaaaagttcttggcttgaaggcatatgcaattgaggagaggaccaatttatgcaatcatgagttccagaaaaacttctaacaatcaagatgccgctacaattcgcttggaggaaattttagccacacaacaatcccatcaagatgctataatacaattaaatagaaaacttgatgagatcatgaagatattagaaaatagtaaataaaaacaaccaattgaagatgaaattagaagtaatcagtttagacaattgccaagtcgatcacgcgaagaacaagacaattttatgatgaggaatcaaagaaggggcaaactctttgagcaagatgatggtatgacaaaaaaggtacaccttgaagttgttgaattttatggaaaattaaatccaatgacttttcttgattggattgtgttgatggaagattactttgattgatatgcaatgcccgaaaatagaaaagtttgttttgtgaaggcaaagttgaaagaagcaacatgtctatggtgggataatattgagaatcaacttcatagaattggccaaccacctatagacacatgggaagagatgaagttgaagatgaaggagcactttctcccaactgattatgaacaacttatgtacacaaaattgttttcccttaagcaagatacttagttcgttgaataatatacagataaattccatgaattgagcatttgaaatccagttcgggaaagtgatgctcaacttgcaacccgttataaagttggacttcgaatgaagattcaacttgagatgatagctgcacacacttataccatagacgatgtttatcaactagccctcaaaatagaagaagggctaaagtttcaagcttccaggcatccaaattcacaaattgggagcactttttccaactggacaacaagtaaacctttaggcaccacaaatttccaaacttcgaatcatgtgaatagtgaaggcaataataaacaagcctcacatgtgcctactagagatgctaataagggtaaaacttcaatgaacatcggagacaaaaataactatgactcctttatgctttaagtgtggtaggcatggtcatcatgctattgtgtgcccaaccaaaggtttacacttttgtgtttaagaaccaaaatctgaattagagggttacccaaaggaagaataaacccacaatgaaatgaacttagtgaataatgtgactactatgatggtatggcagaaggacgtagtcttgcaatacgacctttattagttgtctcaaaggtaaaaggagaagaagattggtgacatagtagcattttccagaaaagtatttcttgctaagggagattatgcaccatgatcattgattgaggtagcagtttgaacataactttgcaagaactcgttgaaaagctaaacgttaaaatagagatgcttccaaatccattttgagtaacatgggttaatgacacctctattttggtaagcttttgctacttagtaacattcctttttggtaaggactttgaatagtctgtatggtgtgaggtcttaacgataaaagtaagtcatattttacttggaataccttgcctttttgatagaagagtttaacatgatggttgaaaaaatacatgtactctcatacacaatgggcttaagaagatcttttgtctaatgaaagaagccccaccaatttagaagtcaaaggacgcacaaccaaaaagggtgcttattatgcgttaatttgaaaagatacgagaaaaaaatcaaaatcagcaatgagaactataaggagacaatagatgcacatcaaagttatattcagtttcaagaaggtgatctagtaatggttcatctacgtctagaaagatttcatccggacacatatcaaaagcttcaagctaagaaaatgggtttatttcggttactaaagcgattgggtgagaatgcatatttgttagaactcacttcagacttgcattttagtccaatatctaatgtggaagatttgtttatctaccatgccatcaaaataaggcaagtgaagaattggatcttcaattaccacctactcttagcccatgtcttgagatcgagtatgttcttaatgatcaacgtgtgtctactcaacaaggtggataccaagaatttttggtgaaatggtgaggcaaaccatattttgaaaatacatggattatgacaacagaatttcaaaagcttaaccccgatctctatgaattgtatcaagcatctaactcgttagagtcaagttctttcaagttgggggggaattgatggtggaaagccttttagagtctattcaaggaggaaaaggaagacctaagtaaactttaaataggattaatattaattaggattgaattatgattagtatttgttggagtcaaattaggattagctagttaagtcataatataattagaatttgagtcatgataggttattagagtcctaatagactttggatgttataattagaattagagtcataataggttattagagtcctagtaaactttggatttcttagagaagcctataaatagtctaatcaatgtaaataaaagggatgaattgattgatattaattatattatgttttattcattgcaagtgttgcaatcctcaatggtgagactccattaatttttcttctaagtaagattcctgaaaggccttagtgggactctaaggtttccattttttcttcctcatttcttatttctctctatttattttattttatttatttttttaccataaactttattccttgttcctccccttatactcaaaaatcaaaaccctagcccacctacttttgagtgtaggcaaccatcctagggttgtcctacatcaaccattgtgcaaagagttttgtttagttctgtgctttctttgttgtgcaagtatatgttgattgtgttaaagaacatgatatatatattgtggacccaaatcctacaagcttaagcttttaggaaagttagttatctaacatagtattagagcctcatttggtgggaggtcatgtgtttgagcgtcattgcatttttctttccccaatttattgagtccacatgtattaagtctacatgcaaggtcaaaagaggttgattgtggttgtttgccttcgggtctttatgtgtgcatgatctcgtgtttgagcctcatcacacttttatttccccaatttattgggcccacatgtaagttcaaaagaggctgtttgcctatgtgagagagggtgttaaaaatatgatatacattgtggacctaaatgctacaataaaattggttgtctaacagattttgtgtctttgctttgtttgttgtttgcttttcaatgattattatgaaacctaacagtgtttattttgtaaactgtctgcatggaaataggcggcttaacaacaattccttgacaggaactattc

SEQ ID NO: 12159 - DNA, 7114 bp, Vitis vinifera
  Intron number 1 from transcript GSVIVT01024083001 (locus G SVIVG01024083001) derived from phytozome v7.0 (chr-ID chr3 ; pos 1263239 to 1270352)
ccggtctccttcagttcggctccggcacctccgaggtcctttttttctatctatagggttttccatttctctgttcgcccaatccttacgtttccaccaatctagggtttattgttcctctttttgctttcgtttcagggaacgtaggtttgaaatgtgagaactgacagttggcgggtttttgttataggattagtgtttcggttttataccattttcaggcattttctcgctactcaattgaatatgtatgataggttagcggtgttatctgataaaattagtgaaacaacaaaaaggtatgaatttggaatgtgaaaatcaacagttggtaggttccattagaggattggtgattgagtcttatgtttctatcatgcacttttttgtcaatcaaaaagaggattgatgaatgtagaatgataattttatcagatatgtataatggtttagttctgtttttagaggatggaacgctggatgtttgatattgtttgttattttgttacctgaatgtcatatttattttttagggttgtttattgcccatttttcctcgttttccataaccatttgtttggttgttgagagaattagtgacagatcaagaaaatacaattttggatgtgaaaataagcagttggcaagctttaccatagattggtagtttggttatgttgtgttcatgcagttcctcttcaatcaaggagagtattgttgtgtgtagaatgatagttgtgggaatatagccaattggtttagttgtgcttttttaggaatgaagccttgtgtgttttttattaatttatttttgagaaattagtcaaacatcaagaaaatacaaatttcgaatgtgaaaattagcttttggtgggtttggttgttggattgattgttcaattttatgctattctcatgcattttgtagtcaatcaagcagaggattcatgtgtacagaataataattgtgtgaatatatataatggattagttgtgtttttaggggaatggagccgtgtctccttgttttttttcttttttacactttgttgcttgaatgcctttagggttcttgtggttcagtttcctttattttcttatcaactcctttagttgctgaggaaatgaataaaagagcgtgataatacaaatttgaaatgtaaaattaaaagttggtgggttttcattataggattgatgattggttttattctatttttatgctgtttctcatcaatcaaacagaggattgatgcgcatagggtgattgttgtgtgaatatatataatcaactagctgtgttttttttttctttgataggaccaactagttgtgtttttagagaaatggggccttttgtgttgtctattaatttatttcttgattgctcattttcccttgttttattatccatttattggacactgagaaaatgagtagaaaagcacaaaaatacaaatccaaaatgccaacagagatgttgctcaatggcggtgccctctggcaatgatccataggtccttggtgcaacccaccaaaagtggtgtagggtagaggagtggactcatattactggtgatttgctttgcagtggaattcctaatatataaggaaaaaaatgaaatgtgaaaattaagagttggtgggctttacttttgttgagagagagagagaaaagagaaaaaccttattctcattcatatattttctacttacaattgagagatatatatatatatacaaggctaggagtcctaactaccatacatgtgacctatattaacaaggaaagataatatactataaatacattatattcaacactccccctcaagctggagcatatacgtcatatgcaccaagcttgttacaaatatatttaatcctaggacctctgagagatttagtgaagatgtttgctagttgatcatttgaattaacaaaacttgtagcaacacatcctgatgcgatcttctctctaatgaaatgatagtcaacttcaatatgcttggtcctttcatgaaagactggattggatgcaatatgtaatgcggcctggttatcacagatgagtttcatctgttcatcctttccaaatctcaactcctgaagaagatgtctcaaccatatgagttcacatgttgccaaagccatagctcgatactcggcttcagcgctagatctggccactacatcttgtttcttactcttccaagatattagattacctccaataaaaacatagtaccctgaagtggaacgtctatctgtgggtgagccagcccaatctgcatctgtgtaaccaacaacctgagtatgacctctgttctcgtacaacacaccttggcctagtgtacttttgatatatcgaagaatgcagattacggcatcccaatggctatcacatggtgactgtaggaattgactaacaacactcacaggaaaagaaatgtctggacgagtaatggtgagatagttcaatttacctacgagccgtcgatatctcccggggtctcctaaaggctccccctgtcctggtacaagtttgacattcggatccataggtgtgtctaccggtttacagtctaacataccggtttcttccaggatgtctaaagcatacttcctttgggaaaggaccacaccagaactggattgagctatctcaattcccaagaaatacttgagtttccccaagtctttggtctgaaagtgggtaaaaagatgttgctttagtttctgaataccatcctgatcactacctgtaatgacgatgtcgtccacataaacaaccagataaatacactgccccaaggagttatgatgatagaaaactgaatggtctgatgtactgcgaagcatgccaaactcttgaacaacagaactaaaacggccaaaccatgctcgaggagattgtttcaagccatatagagaacggcgtaacctgcacactaaaccagactccccctgagcaacaaaaccaggaggttgttccatataaacttcctcggcaagatcaccatgaaggaaggcatttttaatatccaactgataaagaggccaagaacacatagcagccatggagagaagcagacggacagaagcaatcttggcaacaggggagaatgtgtcaccataatcagaaccataaaactgactatagcctttagcaactaagcgggccttaaggcgatcaacctgaccatcaggaccaaccttaactgcgtagacccaacgacagccaacggtagatttaccagagggtaaaacaacaagatcccaagtgccattagagtgcagagcagccatttcatccaccattgcctgtcgccagcctggatgggaaagagcttcatgggtgctctttgaaagagaaacagaggatatagcaaaaacaaaagcagaatagggtgaagataatcgatgataactcaaaaaattgtaaataggatgaggattacgagtagagcgagtacctttccgaacagcaatgggtaagtcattaggagaaggcagagccggggcaggtgaagccgaagggataggaagtgagtcagcaggtgcctcagcaaaagggagaggagcaacgacacgaggacgacaatgataaacctgaagtggtcgaggaggcataacatcaggtggggagacaatgggaatgggcaagacttcagaagcaggaagagactcagaagtggtggaaaagaatggtgagtcctcaaagaaggtgacatcagtggagataaagtatcgatgagtctcaagggaataacaacgataacccttttgaagtctagaatatcccaagaagaggcacttcatggctttggcggaaagcttgtcctgtccaggagtgagaatatgaacaaagcaagtacaaccaaagacacgaggaggaaggaaataaagtggttggtcagggaagagaaggaagtgagaaatctgattgtgtaagacagaggagggcatacgattaatcaaataacaagcggtaagaacagcgtccccccaaaaacgaaaaggaacattactatggaggaggatagtacgagctgtctcaacaagatgtcgattcttgcgttcaactaccccattttgttgaggagtatgagcacaagaagactaatgaagaatcccatgatgagacataaacgaagtaaatggggctgaaaaatattccctgacattgtcactgcgtaacacacgaatagaaacattgaattgggtttggatttcagcataaaatttctggaaaatagagaataactcagcttgatttttcattaagaataaccaagtacatcgagaatagtcatcaatgaaagtgacaaaatactgaaatcctaaagtagacgcagtccgacaaggagcccaaacatcagtgtggacaagctcaaaaggagactttgcccgattattcaaacgctttgggaacgagacacgagtatgtttcccaagctgacatgtctcacacggaagcgacgacaaagtggaaaaacgaggaaccatcttctggaacttggagagactagggtggcccagacgattgtgaatgaggagaggagcatcagtggaaatgcaaactgcaggagatgaatctgaggtgaggtgatagaggccttgagactcacgtcctatgccaatcgtcttccccgtactccggtcctgcaaggtcacaaatttatcagaaaaggtaatagaacaattaagagtacgagtgattttgctgatggaaataagattaaaaggacattcaggagtataaaggacagaagtgagaggtagagaaggcagaggaagggccaaaccaatacctttagccacagtttgagaaccattagctaaggtaacagtaggtaaatcagaggtagtagtaatagaggagaaaagatccttattaccagataggtgatcagatgctccagaatctagaattcagggtccaagagaagatgtgtgggtaaggcaggcagaggcattactaggctgggcaacagaggcaatagaagcctgagatgtctgagatgcggaggagctcggaggctgaggcagcggagaatcagaggactgggccatatgggcagtgcgaggaggtcttccatgtaactgatagcaacgatcgcgagtgtggccaagtttattgcaataggtgcaatgaggacattggcctctacctcgggtaccactgcgtcctcctcgagaggtagtttgagaaactaacacagaagaatctgaagcgctatcagatgacaaagtctgagtggacgaaatacggaggaggcgagcaaacacatcatccaaggacggaattgatgaacttccaagaatgtgatcacgaatagactcaagatccggacggaggccaataagagtaaggaccatgaagaacttgtcaagctgtgtttgttgagccccaacatcaggagtaagaggcatcacaatcaagaactcctccttaagagaggcaatctgaccaatataagtagatagatccaagtcctgttggctgagatggacaatagcagaagccaccttataaagacgttggatatcattcgtgtataatcctttggcctgagtccaaaatttaaaacaagttttataggcctgaagatgaaggagaatcctgggatcaaccgattgccataatacactacataactgtgcatctatcttcctccattgtacgcggtcaacctcagggatatctgcctcctgggtaaccaagtgatcctcatatccttgacccataaaccaaagttcaacagaggcagaccaggagcgataattctcactgccaaccaatttctctgaggtaatcataggagatccagagataacagaggtaaagatctgatttttggtggtcatattcacgtatttggatcgaagagagccctaatacggcttcagattgcggcgtggcaccaccgaaaaagggagacggcctcagatcgcgacgtggtaccaccagaagggtagaagaacacttcccaaggcacgtgcagggattggggtggagaaaaagtaaccggaacttcgccggaaaggctgtttggagggctgacggagacaaaaatccccaaaagaggtacgtgcagggctcggatgggagaaccaggtaggtagggatgctggtcggcgtcaggcgagtctggaggaggaggcgcgtcgccggaaaatgtctcacgcgtcctcacgcgccggcaggagaagtgcgcgtggccggcgcgtggagggttttctggctccgatgcttttgaagaagttggagatctcctccaggcgctcctcttggtgtggtcggtgtcggaaaaagacgtcgccggaaaagttcgccggaaaaggttgccggcgtggtggagatccgacgacgatgaggttgttcggagtgggtcgggaagaaaatgaggggaccggagtgaaacacggtcactggacggttcgccggaaattgattacacggctaaaccgaaaaaaaaattaggttttctcctttggctctgataccatgttgagagagagagagaaaagagaaaaaccttattctcattcatatattttctacttacaattgagagatatatatatacaaggctaggagtcctaactaccatacatgtgtcctatattaacaaggaaagataatatactataaatacattatattcaacaacttttattattttccaaacaacagtgaattaggattttgttgtttgaatgcattctctcttgtgaactgcataattcattctaatggagtagttatgtttctagaagaatcaagacttggttattatttttggcaataagttgagtgaaaggaaaagaaaatatgaatttgagttctgaaaatcatcaaaggtggtaggtttggttttcttggatttaaacaatgataaggatagggtttgtgaggttttgtattattttcatgtattttttttgtcaaccaaacagagaattaatatatgtagaatgatgattgtgtgaataaatatacctcatcagttgtgtgtttaaaggattccatacttgtgttatttgttaatttattttttgaatgcattgtccagatccttgatactgcatttaagaaggaaactgttgg

SEQ ID NO: 12160 - DNA, 6222 bp, Vitis vinifera
  Intron number 1 from transcript GSVIVT01000169001 (locus G SVIVG01000169001) derived from phytozome v7.0 (chr-ID chr7 ; pos 15832638 to 15838859 reverse strand)
ggagaaggaagacacgatcacctcaccaccaccaggtaacctaaccctaaccctaacttcattttcttcaccattttcttctagaaaattatagaatcatagcacatgatatttaagtgtgaaagaaaattgtctgaatcaaaattcaacgagtttgggggttggtggtgtttgaattggtggatcatccacaataacaacctaggctacggatgaatgagggttggaatcgaagagggattcgaatccttcaatccttaaccatctgccactccgattggtgccgcataaattcccaaaacgcgacctcagctgcagctttttactctcatcgccgatcgtgttactaagatccgatctttctctcattctctctttttctcttcctctctttctctctttttctcgtccactctatatatatttgcgtagacgtagactggaaaatttgaataaacggctttgatcgtggtggatggtatgattggattaaatagatggctggacaggtgttggcatcacggaccttgtaaccattagttttgtgcaatttgaggtaactttggattacagttcatgggataaggtcgaagactgaagatcttgccatctgttagttggattctcgaccagccttttcttgtctaagacaattttgattatcataaaggaaagaacagaacaagacagattctaatagttcttttcttgatcacaataaacctccgaaaaatatatatgtggaggacgaagggaagctaggttcctacattaaatcatagcagcaaatggtaaatgtgactaggttgattacttggagacgaattgctatctctaaatttttaggaagggtaggaaatacatatagatatatagtaaacctcaagatttcaatttactgttatagaaggaacactggtgaaaaactatcttcaaatgcactcatagcagtatgaaacatggggtaaaatgatgtttttttttttggtgtggatatattgctttaggaagcagggttctgtaatatttccaagagggcttctcatgagttgtgaaagtggggggaaatatcagaaatgggatttctgatgggagaggagtttctgatatctattggttggtaaatttgtaggttatgttaatgtaatagagaatgttgaccatataatctcaaaagtgaaatagggaatgctattttcttaacatggaaattagtttggaaaattaatttttactaatttacatgttttaatacttttggagctgggttatctcatatttagttcagaaactgattttgggagatgacacgggaaagaagcaaaaaaataaagtgctctcttcaaaccttttttactctttctcctacttgatggttttggtgtcgaatgctccaagcaagtgttctttcttttcctttaaatacttaggaaggagtaagggaaggccctcattgtttatttgttgatttagaggggtatctaggattctggtaaacacgtgttatttatgttggcaaattgagtacacaaatcttatcctcctccattttgttggtagttggatctctgtggggttttcttttctttattttggtgtttataggtgttgcctttttttggtgaattatgctctggtttttggcaagccaattttgttgaggagaggcagaaggaagcttggagcacctttaagcttgttttggtgtatgtgaaaggacggagtttgtgttgggagacttacaaattttgtggtttaagtattctctagggacaaatgtttagccttgtttgatttgttgaaagtttaggatagcttaagtttatccttttgtctttcctttccaaatatccccattacctctcatgcacttggctttgcctccttttgacactttttttaaggattatatttagacaccttgaggtttttgaaaattggatggacatcacctctggtttatagaattacactgccacccctgggaccactagttaaatcttatggaccctccctgctattatttgatcatttgcttactgatggaatatactaatgtccactaattagtttatttattttttttttacacaaaagcttgtcttaagagacgctaaaaaaggaggtgcacccaacgtctacaggtagtatatacaaaaaaccaaaccaaacaccagaaaagaaagaaaaaacctagaaaagagagaggctagccaaaataaagagcatccaaaaatttcaaatgagagggaatttccaaatctaaaaactgctaggaccactctacaagggaatggataaagagatccctcaaactttggtttgacaattcttcatctttgaaggtcctttggttgcgctctcctcaaatacaccaaaataaacaaatcggagctagccaccaaactactcttttcttcttccctagccctttgaattttcattctagtagaagatttctcactaaagccgggaacacccaaactaaaccaaaagttgttaacagctaattagtttatataaatacctactttgcctttcttcaaaaaaagttttaagtaaattaatctcaatttagttctcaatataatattaaatatcacaacaatcattttatattaatcctaattaaatttaaagcagttactaaatcctatataatttttttgataggtaaaataagcaattatattgaaagtgtttgaaaaaggcacacaaagcacacagagagtatacaaatagcgttaaaaggcaagaaaaagtgaaaaaacaaccaccaccaccactagatacaaaaccaatgccctaacaatctagtaaaatagaatgcccctcagccaacccttttacctccgctataccttaacctaagaaatttccctctccttagctcctcaccatctggactgataatagaagcacctttgattccttaaagcaaactggatacaaactaggtttgctttctaagctctaactattggctttataatttttctcctccctattattggcccttctgacattccagaagataatgctcatcttcattgaccaacagacactagctctgaaactcccttaccattaacacttccccttcgtcctgctccattgtaattcactgagcattccaaccttcttaaccctctttcaaattttgaaggaaatgctttcttcctcctctcgacattttcttgaaccttacaaccctttctcaccttaatttttcttaggagagccaatgtttcttcctcaaagcccttggttagcatgcctaaccacttactgaaaacagtcaggctactgccggacccctcttctgaaaaaactgccctttctcgatccttcccacaatcctctacctttatccccacctccaaacaccttagggcttccacaaacttctcccccatactgccatccaccaaatcatacgtagcagaccatcatcctctcatggagtaactactttgaaaccttcctccacaaccctagaattcccaaaactcccctccacttgcgagcaatcagaaatacccaaagaagaggatgagaaggccatgctcctaagagatttcacagagagaacaaaagaacccagaaatctagaagcttccgccattaaagctttattcgtactcaaagaacaacccaccaactatgtgacttgccggtatgactcaacatgaggtcatcctcaacttcattccatgctgaatctatcaaatggtgatcacttcttgtagctaagaattccatctataacgatgacgatggtcgggggtgcttccctatataacaaaaaaattatttttccactaaccctgattaagttttttttaataagatgaaattttaactaacctgaaaaaattataagttaaaatcaccacataatactcagtagataaaaattatgttatattaatcatatattataaaaatattaatcttaattaattttgattaatcattaaatcctttttaacttaacttcaaaatagttttaatttaactttaaagtaacatctaaattcgattataactaaatttaaaataacctctaaatttgcttatcatttttttcaaacccaattcttcaatgcactttcttcccctccacccaatcctaaatccaaatccaaaaaatcccaaccctatattctttttaaaagagtactagactccatagttgtatttccatgactgcacttccatcacagttgcctcatcaatttggccaagttcatcttcttctaccatggttgtaccctttaacctttttcaacctcattaattttgttactcctaccatggttgtgcacattgcaaactagaggtggagttcaacattagggcatcaacggagcatgtgagaacgggggttttgcaaaaactaaacaatggagtttaaatcaaaagctactttttctttttaatttttttccccttggattaaaagtcattatttatttattagatttcagatttgaagattgtttgcatggttactactatgtgccatgagtctatattttgttttatgttttttttttccattgttttccccctaaagaaattagggtttctaggtttagtttcagaaagaactggtgggaagaaaaaagaaaaaggaaaaacaatgttgttttctctcttttataagcaaggcctcttttataagtgaggtaattttgtcatttcctagttttgttaactaccattagaggttttagaaagaactagtggagaagaagaaaaaagaaaaaggaaaaacaacgttgttttaccacttttataagtgaggtaatttgtcattccttagttttgttaactactattagagggcaaaatctgatcggtggcagctgtgtaattttacaaactagaggggtgtttgtgcaattgttagaagcctaaggggtctgagtttggtttaccgaaacaaggctaatcatttgcctatggagtaacatctgctcaagtttgccaatatgtagactgcaaagctaaaggaggaaaaattatttgcgtaagaaggaagctagtcatagtacttctttttcaactaagttccatctttatgcctcttgaggtagtttagaaaatggttttcctatacaggagagtttctgataactatgctttaggtaacttggtatgtcattgtattttgtttgctatctttagcttattgaagaatgtgtagaaaactcaaggtgaaagaaaaaagacaatgtgttacaaagttggattttttcccctttttggacaggcaataatgattttctgaaaatgcctaacagaaggagacaccaccttatgttcccaggaggaaatgataggtgtatttaaagcagttactgagatggggaattaaaaaaattaaatgctattgaaaaaaaaaaaaaatcattaaggaggcttacaacctccttgttgcttcgaatgatattgtattcccgaataagggcatttaggtggacaaggtcccaactaaagttgtgttttttgcttgggaggccacatggggaaaggtcctaactttggataggctacaaagaagggggtggcagttccccaaccgatgtttttttgtgtgggtgtgaagaggagactgtaaatcatattcttctacattgtacagtggtccgggtactctgggagattgtcttcgtcttgtttggcattcagtgggtgttccctgaaacggttaaagatatgttgttcagttggaggggttcttttgtggggaaaaaaaggaaaaaggtttggacttccatcccgttgtgtattttttggacggtttggaaggaaaggaatagattagcttttagggggggattcttatctatacagaaactcaaaaattcttttgtatgtaatttgtggagttgggctagggtgtatattggagaggagtcctcttcactcataggttttctagagtggctcgcgtccaattgagggtaggtaggattgtgggctttttgtggcttttgggtttggctgctttgtatacgtcctgtatgctgtgtggctttttgcctttttaatataacatctgcttacttatcaaaaaaaaaaaaaaaaaaaaaaatcatgctaacctagtagtttcgacagctgctgattttaatattaatgttttagactggtgatttagaatttcaaatttatgcagtgttgctcgaaccggagaatttaaattcctaaaaa

SEQ ID NO: 12161 - DNA, 1199 bp, Vitis vinifera
  Intron number 5 from transcript GSVIVT01009900001 (locus G SVIVG01009900001) derived from phytozome v7.0 (chr-ID chr1 8; pos 12259679 to 12260877)
tgtgcgagctagatttggtatttaatttccacaaggtttgttacttgattagcgtttcttgtccactggaataataccttccaattctcatgtgctgtcaaggaattctttaattgtagcttatgactgattctttccctcttattctcctgccttgcatgtgattgttactcctatttagctactgagtcaatcggcgactcaatattagtatcgtcagtgaatgagttgaacagagggatggcatcccttaagagactggtgaattaaactttccctgatgacaagtggtcactgggagctaagtacttcataatggaaaatttggaataacatcaaaatgtttccttgtatatctacccatgttagcattgaatattttcctcttgatttaacagatagattcagaaacattaagtttttactgcatttttctgtcagatatgacattcttaatgtgtgtatgtgtgtgtgtttgtgttttatttttattttttttaaatcgcttgggcattatggtatatgcaatcgtctttttagtgtcaaggaatttaaaattgtatagacacttaaaaaccctaccattttagaattgtacatgttatatgcacaagatgaattgagtaaaaatggaaatggttgctggaccttatatgaaaaaatgagtaactgatgatcctctgaagttacacaaatctttattcaaactgtttcgagaaaaccaattagctgccttagtggcttttgatcgattctgtgggcatttacatgatttgttagagaaacatctggtggcaatgttctgtgcttatattttgcattaaaccttacaattgtaatttcctgcgcatgtcaaagctaacctctctgcaatatgtagttaaaaaattttctgctccatataggcatatactgttcttgttcatgctttccattggaggattccaggtcttctgttgtacatgctgctctggcgacattctttataatcttatgcactttattcactgttagctatccaggagaatgaactactgaccttacatgcttcattctgtccagtgtgtatgtgtttgggcttgctgacgtgtagtttggtgtatattattgctcatcattatattctttcctttttgctcatggaactgtgtttgtctgataaaggtttatcttatacttgacgaattcattcttgctgg

SEQ ID NO: 12162 - DNA, 6015 bp, Vitis vinifera
  Intron number 1 from transcript GSVIVT01014688001 (locus G SVIVG01014688001) derived from phytozome v7.0 (chr-ID chr1 9; pos 8637758 to 8643772)
ttctgcaggaaaaagtaaaaattttctctcccattccctcgttttctctcatattttcttgcctatccctctactttgtcttgtaagttggtgtattagttgaaaaccttgatgattgctttgaaactgcaatacccattcgagttacttaggttttgtgcttgagagttggagaaagtgtggtgcaattgttcgcggtgagacctagtttgttttgctgtactgtattgtcatgtgggatctgatgtttgggtgctgacattcatacctattgtggctgaatttcatttggcctaaacaggtgcaatgtattaattttgttggtattgaagttgaaaggtttgatcttgattgcttgcaatgtattcttgtattttagcttggccatgactctgttttcctcataacttgttattagttgattggtttgatgttggctctgaaactgccacacacattaaagttacttagattttgtgcttgagaatgggatgataactggtgctatggttcacagtgagacctaggatggtgtgttgtaccatgttgacatattggatctgatctttgggtttggaattcataggcactttactgaatttcatttgtttaaaattggtgaatgtgtcaattttgttagtgctaaaatggaaagttttgattttgattctttaaatctatcatattttcttgcctatgtctctgttcttttaattttaaattgatgatttttctcacacatacccattagagtttcttagggtttgtgtttgaaagttggagaaagtgtggtacagttgttcactggtttgttgtaccattttgtttgtggtatttgatctttgggtattggatttttacccattgtgtttaattttattgttgttgaagttgaatgttgtgatccaggttaattgcttaactagctattgtagttgaattgtttgcaccagtcttgattgcccacaggcatagttcatgggaataatcaatgccaattttcctttctggttaatgaaatatattgtaggtgaaagactattatggagtaaatataatttagaaaattgaatgttgaacaacggtttgccttgggtctagcttgaatggaatatcacacgaaagcttggggttcatgaagaaccccttaaagtttttttatatagaaaaatcattttttttaatacaactatcttttttctctggttcatatcaatttacgacaaatatgatgtactggatttctcctattatttatgaatttctttaatttatcttgattttttcatcaaatgttgtaaatcaaaatacatcccctcaaatttcagttatactcaagtaaatctcatatattctgtgtgctgtgaatatttcttgatgttcataaattattaggattaatttgctacaaaaatagacattttaatgttttcatcagatgcatttcattgcttaatgtcaaaattcttcttggattcaatgggtgattcctgatattctcttgactgattctaaacttttgaattgttccaatgctggataattcttatatttttttctattgtcatagattctcagaaatatattttttgattagcaagcaaaaaatatgtacttacaacaactagcaaaagggcacaccaagttacatagtgcgtatacaaaaggcatcaaatggtaaaaagcaagaaagaaataaaaaacaactccctccccttacttagcagccaatcaatcaatagtctgtgatagacattggcacctcatgtgtgcatgttctaacctaatccaaaaaagtgcacataaaagaggttttgagcacataatttgttattccatatcttcaaatgactctaatttgcctcattccaaattgtctaaaataagcacaatagagcagccctccctgctttgttttgtctcttaccgataaaggacctatgccaacttaaaggagtgactcttattgaagaatgcgtcatttaaactaatcccaaacaaaggagaaaatcagctgtcatgtgattcttgctttactggaatgaagaagcatgtgattaactggttcttcttcatctttaaacatgtaacatctattcttaatgtctgtgctctccttttttgacaatctagaaagagaaaatattaaaagcgccacaagaaccagcacattggagtacacaggacatatgcaatgggtgccaagaggcaaagcaaaaaagggggaaaacaaaaaaactactcccttccttgacagaaacccaaccattctacaaaatcaattaaagatagaaaaaatcaatggaaacctatattgaagctgatcgagccaattttgtcactgaccggagatccactagtgggtattgcacgtttattggaggcaatcttgtcacatggagaaggaagaaacaattagtggtgaccagatcatcaatggctcaaggtatctatgaactactttgaataaggatgatgctctttgatttgggaatgaatttggaaggtcggatgaagttatattgcaacaacatgtcaaacataagcattacccataatcttgtccactatgactgacctaaacatgtggaaaaagattgacatttcatcaaggaaaaattggagaacagagagattttgattccctatgttgcttcaaagggtcaacttgctgattttctcatagaaaggttgctgagttctacaattaagaatgttctaggcaagatgagaatgaaaaatatttttgagcaagtttgagaagtgttgaaaatatgcaggctgatgtgtaggctgtaaattctccttggtgggtaggctaatttgatagtttccttgaataatttcatagagctgtaggtatatccctattgtaatctcaatatctatatgaatgaaattcaaatttctccatactaacttatctatactagatcaattcttttctcatacatatgcaaattatctttagttattcaaccacaataatattacatttggtgctttatttaataaacacccaactagacctcttaaaccactccacatataggcagtagtctcattttaaatgatattattttactaattaataataataaattacactaaaggttttcgatgcttcagttagtgtataccacttcgatttgttgttctctctctctctctcattgtctgtctgtctctttctttttcttttaatttttacacaaatggttttgttggtttgctagattaatgggaagatgctttaaaatctaatggctataaggtaagtagaagtaagacgggaatatgaggtctcaggtttgagtccttagattatgccatataaattttttggggagaggaattatgtatatgtatttgccctagtccttgtgcgttttcatgttatgtaaaaataaaatatggattacgtgaaatttagctttagtagagctaggaacataattgagggatcaataaagtcattcctaatgagatacacaaatgaggggtcaataaaaaatggatgcacatgagatacccaagatgggagagcaaaagaagagcagtttatttattctctctttttttgatcatccataaagagatgtagattgaggtggatcttgctcatagaataagatgagatatattatgctatgagcctatgtagaacctgacagtactgttggtcaattgcatctcgaggttcttagactagactgacctccaatggcaagcttacaatactcatccaaccttaagggatgtgatggttttcttttcctcttattacttgaaggatatatattggtagctgctagaaggatacaataattatattctatatttgttctatctcaaagtagagtggaatccatacgagctatgcacatgacttgaagtttgaggaaacaacgtaaaacttcttgttgtctattttcaacaatagttgtttttcataacaggatggacagactggagaaatgcattaatggtgactagggagctgggagcatagccttaaccccttttttagggcttaagatcaacttagagaagggcagtcttttcagtattaatataagccaagatccgatatttaggttggctttgatgcttgactgtaaagtttcaaaaggacactgcacaagttttacaagacttttcctcacaaactcgctttgtgatgggtaatggggagagaattcatttttggaaagatttgtggtggggtgatctaccattgtattcataattttcaggtcgccatagagttatcacaatgaaaatctcatcattttagttgtccttgggaactcctctccactttcttggaaccttaacatctgctgaaatctcactaataaagaaattgaaacctttgaaagattcatgtcctcactcacttttgtgtacttgtctctttctgccgcagatttaagagtttggtctttatcctcttcaggtttattcttagtaattttttttttccctcgccttatccaatttattaaatccattcttgtcctttccggccaaatttttatggaaatcaaaagccccttcaaaggttaaggcctttgcctggttaatgatgcacaagaaggtaagtaccaatgatatgctaataagtctcttagtctttattggtgcatcttatgcatgggaagtggagaattgatcaaccatttttttctacattgttcgttaacattggggttttggcacaaactttttagtttggtcaagatggattggattctacccatgagtatttgtgatatgatgactatctcatttagtggtttgggaagttctatcaaagcaaaggctttttggcaaattgcttatctcattatactttggattgtgtggcaagaaagaaatgctagctttgaggaaaactagaaaatggaagagatgttgtggaatctacttcacttctatttctccttatgggcctcttgtaccgtcgcatttagagacgttccactcaatgttattcaactctgttggcttttggtttctagttcaaaaggggtggataacattgagaggagttgagtctggtcttgaggagatttgtgtatgcctttgtgtatatttctccttctatattggaggtgtttagtcttattgtgatcagtaatttgtattttgtgaggaggacttctcatccttctcttgtactttttatcataattgacatatcttttgtttctgattaaaaaaaaaaaaaagcattaacagtgttgtgtgatcgttgacaattgagttgaaggaaaaattttgaaatgtttgtatggcatgccttagttatggcacagaatactacgttgttacaaaacaaacatccagtaagatgaatgtcactgaaatgaggatgtgaaaatggatgaatgttaagaaaaaagatagaatgggagatgaatgcatggttttgaagcttgaggtagcgttggctaagggtgggatgggaaaatgttgtctgagatagtttagttatattcattcaagatcattgtttgtattactatggaagaatgatttgattcaggttgaaggctctaaaagaggtaaaagcaaaagtgggttatggaattgatggaaacacacaataggttatgatttgatagaaggcatgggatctaaaaggtgaagaaaaggatttgcataccagtacaaaattagttaggatattaaacttctacaatcatgttcatccatattatttaaaagttatattgagtattagtaagttcaatatggttagcttaaaaaaacaattgaagatctattctcataactagggacattgctttttagtagggaacgctgctaactagtatctactttcataatagctttgcatttttgttgactaatttacctttttggttcttcttaaggtttcttatgtttgataaattgagattatgagatttcccttctatttgcttgttatgctaacctaatcttgtttttcattttttgcattgatagattgaacgacttgctgtg

SEQ ID NO: 12163 - DNA, 22596 bp, Vitis vinifera
  Intron number 3 from transcript GSVIVT01012850001 (locus G SVIVG01012850001) derived from phytozome v7.0 (chr-ID chr1 1; pos 6088448 to 6111043)
cctcactgaaggtaagatgcaattatgttggtaaacaaaaatgttctttgttgaaatttactgatataatgattagattgtagcatgccagaaatataagtcaaatttcagtgttccaaagggaccctgataacattctaggaaatccctgttcgcttgaccagtgaaggcattgggtcagtggtagtcagacatgagttggttttacgcatatctggatgtcatttttgtgtactacaccatcaatgtttgttccctaaatagcaggggttggaggccaaatcctggtgtgcgaactctgcttattaagaaccacatctcagttggatgtatgtcactctattactttgcaaaatttcatttgcagagtggcataagactacttattaaagtaacaaaaaaaaaaaaaattgttttcttctttgctaagctgttagtgtttgtgctcattcaagctattaaattagtttgaatttctgcctattggattttgtttatgtttttgtatttgttttttcttttattttttctttttttgtattgttatggtgagctggaaggttgttaccattggtaacaaaatgcttttttagcctcaatatattctcatctgttttgccctttttcaataagataaaaggaagttttttttgttcactctttaatatggtttcagagccatgaatctgttgccccttccttcatcttccttttttccttctatcttctaagttgatggcaagaggccatactgcaaatcagcagatcgttgggacctcctttttgtctcccatggaggattcatgcagcccttatttcctgcacactagagatcacccaggtctcattcttgtttccagtcagcttaaagtattaaattataactattggagttgtgctagaactacaacttttactgccaaaaacaagattggctttgttgatggaagcatctctcaaccagcatttgatggtcttcttttgggtatttggatccattgcaatggtatggtgatttcttggcttctcaatgctgttgctcaagacatagctgatagtctgttgtatatctacgttgctgttgaaatttggaatgatttgtgtgaccaatttcatcatgacaatggtctgcaagtttttcagatcaagaaacacctaattccgttaaatcaaggtgccctaaatgtgaacacctactacactcggctcaaaattctgtaggatgagcttaaggattatcaaccccttcccatttgtcaatgcagagccatgaagtcatgagtggatgactagaaacgggaatatgtaatgcaatttctcatgggtctgaatgattcctacataccaactcgcactcaaattcttctaatggatcctgtgccctccatcaccaaagtctttgctctcgttgttcaggaagaatgccaatgcaccatcaataatggattttctcctttattatactctatactgtttggagacccaaattccttagctactgcttcaacttattttactcttagatccaaatgtgaaagaccaatttgctcgcattgtggtgtttagggtcataccattaacaaatgctacacaattcacgattatcctcgtggttataaacccaaattgaaagcatcttaatctaaaacacaaattaatcaagttgcttctattgttaatgatgatacaacctcctctaacacctctgttggatctctcactgcaagtcaatgccaataactcattgttctcctaagttctcaacttcatagcagctccctagcttttacttaatcttaggagtctgatcttctgtctttaatttcagtggtatcttctctttatcctcactttctgctaagccttttattcctctgtcatcctatattctggatactagtgctacacatcatgtttgttgttctttgaagtcttttctccatcttgttcctactattaattcctttgtcactctgcccaatggtcattttgtttccattagttgtatagggtctatgaaattgtcaaataatttcattatctccaatgctttgtttgttctaaaatttaaattcaatcttctttctattagtgacatcacataaagtcatcgttactcagtcaattttctctttgactcttgtgttatttaggaccattcataggccaaagtgattgggatgggtaagaggcacaacaacctctatgttttagattttccaagttttagtcatcaatttgttacattgcataataatgtagtttagtctcaaactgagctttggcaccatagactgggacaccctccttatgtaaagattcaaattctgaaaaacacattgaatattaatcaaagtttagatcatccttcacattgttccatatgtcatttggctaaacaacgtaaattgccctttatttcttctaacaatttgtctcttgcacctttccacttcatacattgtgatatatagggttcgttccacactctcactatagaaggttatcgttatttattgattattgaggatgattgtactcggtttacttactgcgtgccaattctaatgttgttcatatgtttcttgacttttttctccttaattgaaaatcaatttggtgtgaagataaagtctgtgcatactgacaatgcttttgagctatccttttctgagtttttccatgtaaagggatctttcccttccattcttgtgttgatactccacaacagaagtttgttgcagaacagaaacaccaacatgttctcaatgttacttgagccttacattttcagtcacacattcctttatcttattaaggcagttgcgttttaacttcaatgtatctcatcaatagaaccacatcgccttttttatccaataagaccccctttgaactactttgaaacaaacaaccatgttactcacatcttagagcttttggttgtctttgttatgcatccacattaattcatcattgttccaaaattctcacccatgccacacaagttgtttttcttagctatcctcttgggtaattgaaattcatttatagccttattggtttatgttgatgacttagtgatagccaacaacaattaaagtgaagtcaataatctaaagaaggcccttgagagacagttcaaattgaaggatttaggcaccttgaaatatttttgggaattgaagtggctagatctccaaatgagatttcattaagccaatgacattatgctttagaactcgtctgaagcaggttttcttagatgcaaaacaaaaaaaaaaaaaaaattcccatggatcctaacgtcaaactatcctaggaagaaggttatgaacttgatgacccttctcaatacaaatggttaattggttagttgttgtaccttaccataaccaaacctgatttgtcctattttataaatcggttaagtcaatttcttgctaaactgaaagtccctcatctccaagttgaagaacatgttctataatatatcaaagccactgcaggccaaggtcttttcttctcatctaaatcttctattgagttaaaaggttttgcagatcaattgggctgcttgttctaatactagaagatcaatcaatagtttctgcattttcaatgggaattccttaaagtctcttggaaatctaagaaacaacatatagtttctagatcctttgctgaggttgaataccaattaatggccaatgctacttgtgaaatagtttggcttttatctttactagaagacttgcacattgatcacactcatcctgtcattctgttttgtgacaaccaagctgctcttcacattgctgctaatcctattttctatgaacgaaccaagcacatagcaatcaattgccacattgctcgggaaaagattcaaaatagaaccttgaagactctgcatgtctcttcttagcatcaattattagatttgttgaccaaacctcttttcccagctcagtttcattttcttcttggcaagatgggaattcataacatccattctccattttgagtgggagtattaaattagttggaatttttgcctattggattttttttttttgtatttttatggtgagctggaaggttgttaccattggtaacagaatgcttttttagcctccatatattcttgtttgtattgccctttttcaataagatggaaggaagttttttatgttcactgtttagtacaagctggaaaccaaatcattcttcattattaagagtcacttttcaaagattaaaaagaaattagaagttgcttgtaagtttcacatggacaaaagtataggactatgccagttcagatttcctttatttatattttcaggcgcatagttattaggttgagtggagcaatagacccaattatatgtttcatcttgttcttttttctattctgttctgacttatggtgtatttatagattctctctttaggttgtagtcctagggcttctaggctgggacccccttctttcaaacatagcaggagaagtcttcatcgatcaagtcagggaagtggataggtggagggctttatgtaggtttaggagcatcttcaatactggttttttaggatggcttactgctcttttggcatacctcacattctcaaatgagaattatttggtgcattttaataagttaattaatatgctttgaaatggtgtcaggcttgagagtgaatctgcaaaatcataattggctgaatttgcaatattgaacatcatagattttactattgaaatgagttgttgagttactagaaaggtaaaaaccaaaacaggaatggattataattgtaaagaagtagattgaacatgttaaaaatggagtttaaataaataggagttgagacttacaggattgtagaaacaatcatagacatttttgttagcatgatataaattgttaactcatttcctagtagcatagcttaagctcttgaggaagtgatagtcttgttggaaatctcagcagatcctaggtgctgttaccctaggtgctagctgtaaatatttgtacagctgtagagataattgctacatctgtatagatattttctagctataaatatttgtatagctgtaaagattttttcctatctattcttttgtaatctacctatataatgtattcttgtatagataaaaactagttctctctgtaatgtgaaaagatgaagtgcaaagttgaaaggattattgtggagaaaaagtattatcaggtagagtttgaaggtttgaatggtggaacttgggtatcggtaacagagaggagccgaagtttcgtagtttcaataggatttgacatggaggagctggtttggttgatggagcatttgaagaaagctgtggaggtggaggcttctaggggttttgtaagaaagatcaggggcaagactaagaccctcttgatggagatatgcttcaataacagagggaggttcatgaaaattacagaaattgttacaaaaaggaaacctttagtacttgtcgtccccgagggcgtcaaagggaaaggatgggaagatctcaggaaggcgatcctatcagtgcaagagtattatgaacgagacggaggagcttcgaaggagaagaatggtgatatccggatgaatagggacactttcagaggaggaaggtcatacgcagaagtggtggcagaggctggtttgaggactggaggtacgttgtcagctggaaaatgggccagagctgtaatatgtgaaagccaagaagaagtccaagactggactcacgaaggaagagccattgcaaggatgatggggatgaaaggaatggtgtccataaattccatttccgctttcaaaggatgcttctttgtgagtacaacaaggagagcggaaagtgttcatgatcagggatgaatttcagtgaaaggaaggacgattctgctaaggaaatggtcgcccaaggaaaacatggtggttcaaggaaagttcaggaggggctggctagtattgagaggtctccctttccatttgtgggatgaagttcagttgaatttcattttgaagaaatgggggagggtaacgaaggtggcaaaggaaactttgaagctggtggacctgacgagggcgaagctgtgggtggagatgcttccaaacgtcgtgttaccagcgttgcttgaggtggaagatggggaatggtcctatacagtagcagtttcagtcaccggagaagatgaagatgccgacgttgtcatgtctgaggtaaaccgcaacaggaacgagtgggtgagagtgggaggttgcgtctctcagtcgtcaaaagctgcagaagggctacgaggtagcgttagggacattgagtgctacagtaagaggcgtcttccccgggcacgttatcggcagtcaaggacgtgtttggatgacaaaggggagacaggagggagattgagcagatcgggccaagctgaagcaaattttattgggccagagcatgagtcctcttttatagcccaaaaggttagggcccaaagtgggatgaggcatcgtgggcttcaagatggcccagatgatcctcaagcccaccagtctgcatcggcttcgcctctttctccccagcgagctgcttcttctacaatggcgattgcgacgctctgtccagacggtgcaaggtccggcgccgaggttttcttcggagaagaaggtcgggccgttgagctaaaggcccagtcccttcccaactctaggccattgtcagacaacatcgtgggctgtaactttaaaagcccgtcgaggttgggccaaaaattaggaggaacgaagccctctggtatggaagcatggtcgcgaagggaagaaatcgaagcgaggaaggggaaagcccccgcggttcacatgagagacgctacgcaggagaaagagacggcaatttcaaagaaggcgtggtctaccctcttccctccaagcaccgatcgatgacagggacatcggtgctgcagtgagcctattttcacaaggggttcgtcatcgtcaagggaagaccgcaacatggaagaggagtttgggatgggctttcagatggagcgaggaatcagagtgaatcctctctccagatgtcctctttctggtaagcttgcgaaggaggacacctcggcgagccgcgttgaagtcaaaggagggctaatgggacgagtggggtttgatcctcgtggcttttcagacatgggctcaccttctatttcaataatcagaggtaaaggactcatctttgaggggttttgcgaaattccgggagccaaaaacttggaggtatgtcagccctctccttctcagccacccgagtcactttcttttccttcctgtagtccggattctcctttgacgaatccctctggtccaattcttcccaattcagtcccttttccttagtctcctacggaaaaccaaggcatctcaaaaaatttttatgaaaaaggtggtgttgacaatttaaatcatggtgacatacctaaccgtgttgaggaggagaaccagtgtgctttatctaaccagatgtcagagagctgtatccctaaggattctattgtcaggtcgcataaggaggtttcgggtgatttccttattgatggcctgtctcccgggaaaatggccaaagtgcgagaggtattatgctctctagacattaaggtgtattctaggaggaagagcagaggccccacagggcattgagacatgttggttttggctcggaaggctagggtctttgtgttttcccatgaaaattatcagctggaacgttaggggtttgggttcaaggaataagcgtaggatggttaaagattttcttaggtcagagaatccggatgttgtgatgattcaggaaacaaaaaaggagatttgtgatagaaggtttgtgggtagtgtctggacggtcaggaataaggagtgggttgctcttccggcgtctggggcatcaagtgggattttgatcatctgggattcaaaaattctgagtagagaggaggtggtaatagaatctttctcggtctcagtcaagttctctttggacggttgtggacccctttggatttctgctgtttatggtccaaacagtccctcacttaggaaggatttttgggtggaactttttgacatttatggattaacttatccgctatggtgtgtgggaggtgattttaatgtcataaggagaagctcagaaaaaatggggggttctagccttactccaagcatgagggactttgatagttttattagtgaatgtgaattacttgacccacctcttcggaatgcttcattcacttggtcaaatatgcaagagtctcccgtgtgtaagagattggaccgttttctctactcaaatgcgtgggggctgctctttcctcaaggccttcaagaagccttaatcagaaggacatcggatcattggccaattgttatggataccaacccgtttatgtgggggccaacaccttttaggtttgagaatatgtggttacaacacactaatttcaaggagaactttagagattggtggagtgggtttcaaggaaacggatgggaaggtcataagttcatgaggagacttcaatatgttaaagctaaactgaaggagtggaataagttttcttttggagagcttaaagaaaagaaaaaaagtattctcaatgatttagctatctttgacgccattgagcaggaagggggtctcaatcctgatttgataagtcaaagagcctcaagaaaaggggagctagaggtattaatattgagggaggaaatacattggagacaaaaagccaaagtgaaatgggtcaaggaaggggattgcaactctaagttttatcataaagtggctaatggcaggcgaaataggaaatatatcaaggagttggagaatgagaggggtttagtgctgaagaatgccgagagtatcacagaggagattttacattactttgagaagttttacacaaatcctacaggagagtcttggggtgttgaaggattagattggtcccctatctcggaagagagtgcgttaaggttagaatcctctttcaccgaagaagagatttctaaggccatttttcagttggatagggacaaggctccggggccaaatggctttactattgccgtattccaagagtgttgggatgtgattaaggaggatttggtgagagtgttcgttgaatttcatagcagcggaattatcaatcaaagcactaatgcctctttcattgttctaatgcccaaaaagagtttatcaaagagaatatcagactttagacccattagtttgatcactagtctctacaagataatagccaaagtgctctctgggcgtctaagaggggttctacataagaccatccactatactcaaggcgcttttgttcaagggagacaaatattggacgcggttcttatagcgaatgagatagtggatgagagaagaaggtcaggggagaaaggcgtcgtattcaaaatagactttgaaaaggcatacgatcacgtgaagtgggattttttggatcatgtgttagaaaagaaggggttcagtcctagatggaggaaatggatgagtggatgtttatcttcagtatcttttgcaatcttggtgaatggtagtgctaaagggtgggttaaggcatctaggggattaagacaaggcgaccctttatccccttttttgtttactttagtcgcagatgtactgagcaggatgctcatgagagctgaggaaagaaatttgatggagggttttagggtgggtagaaatagaactagggtgtcccatttgcaatttgttgatgacaccatattcttttctaactcaagggaggaagagctgcagactctgaagagtcttttgttagtgtttgggcacatttctgggctcaaggtcaatcttaacaagagtagtatttatggcatcaatcttgatcaggctcatctttcaagattggctgagatgcttgattgtaaggcgtctggatggcctattctatatctgggtctccctctgggcgggaatcctaaggcgtgtggtttttgggatccagtggttgagagaatctcaagtagattagatgggtggcaaaaggcctacttatccttaggggggaggataactcttatccaatcttgtctttcccatttgccaagttacttcctatccttatttaaaatgcccgcttcagtggctgcaaaaatagagaggttgcaaagggattttttatggtcaggggttggggaaggcaaaagggatcatttagtgaggtgggatattgtgtgcaaaccgaagacaatagggggtttgggtttggggaatatttcttggaggaatctcgctcttctagggaaatggttatggaggtatcctagagagggttcagctctttggcatcaggtcattttaagcatttatggttcacactctaatggttgggatgctaacactttagtcagatggtcacatcgctgtccttggaaggctattgctcaagtctttcaggagttttctttgattactcggtatgtggtaggaaacggggatagaattcggttctgggaagatttgtggcggggggaccaacctttgggaatccaatatccaagactattcagagtagtcgtggacaaaaacatttctatttcttcagttctcggtccatctcgacctttcttgtggaatttgaatttccgccgtaacctgtcagattctgagattgaggacttagaaggcctcatgcggtctcttgatgatttgtatctttctccttcgatcccagatgccagattatggccattatcctcttcagggcttttttcagtcaaatccttttttctagcattatctcaatcttctggatcttctcagaactttccttcaaagttcgtgtggaattcccaagttcctttcaaagtgaagtcctttgtctggttagtggcacacaagaaggtgaatactaatgatatgttacaagtgagaagaccctacaaagcccttagtcctaatatttgtatcctgtgcatgaagcacggggaatcaacagatcatctatttcttcattgttccttgatgattgggttgtggtacaggttatttcagttagccaagatggattgggttcctccaaggagcatatatgacatgatgtccatcaaatttaaaggcttcggtaattctaagagagggatagttttgtggcaagctgcgagcatagctctaattcgggttgtgtggtgggaaagaaacgcaaagattttcgaggataaagcaaggaattcagaggtcctttgggactctatagttttccttgcttccctttgggctttctgttccaaggcatttaaggggattccccttaatgtgattcatctggattggatagcggtgtgtactccatagggattggtccttagtgggtgttcgtttgttttatgtgtattttcctgtaatttagttgtctttggttggaggatttctcatccttcttcttgtacttcttttttatattaatatatatttgtggcgtttccaatcaaaaaaaataataataataatgtattcttgtaaatgtattagaaatatatcaccagaatattttcttaattagcccaaatgggattctttagggtatcaaatcagaaaagttctctggtattttttttctgccctacttctttggcttaaatagccaactgtgttttctccagaaatcgtactagcagtcccagaaatactgtttctcattccctgaaaataacccatgggcgatgctacctctgaaacaacttccactatttctaccataccagcagtcctaaaaggtaccagttctgaatcccattcctacttcgttcagattacgagtattcgattaaatggaaacaactttctatggtggtcttgggcggtttgcatgtacataagagggagaggcaagattgtttacaaaggagccagcgaagaccgatgcagcatacgcaacctgggatgcggagaattccatgataatggcttggctcgttaatgccatggaggaagacatcagtgccaattatatgtgttattcaactgctaaagaactatgggacaatataaatcagatgtactctgattttggtaatcagtctcaggtttatgaattggagatgaagttgggagagattcggcaagaagataatattgtcactaggtattttaataccctcaaagggttgtggcaggaccttgacttgtttaatgaatatgaatggaagtgttcagaagatggaaatcactacaggaagatggtggagtgtaccagaaatttcaaatttcttgctggccttaatatagaatttgatgaggttagaggaagaatcgcttcaagttgttcatgcacatgcgtatagcttcgaccaccctgccgaaaacttgaatggaattgagattttctaaagaaaagaggattggaagacaacctctaccctttataggagaagtgttctttgaagtcagcagggaagaaagttgaagaagtgtgatgctggggaagaaaacggtgactgctccaattgaaaactcagctttagccatgcctattgctgttgtcgccattagtcggaaccccaacacccaaaggcagacagaagaaaagactcgggtttggtgtgatttttgcaacaaacctcggcatactcgtgagacgtgctggaagatccatggaaagccaatgaattggaaaccaatggagagaaaaaacaacaaacttggaaaccagtccaaccgaaatattgttgttgccattactgccgagatggcttctcttagcagggaacagatggagcaatttcttcaactgttgaaatctaatccaccggctactactcctattggtttgttggcacaaataaatagtgttttttccattacaacttgttcatctgcaccatggatacttgattcaagtgcatctgatcatattaccagcatatctaattggtttcaaacttacgtcctttgtcctggcaataaaaaggtccaaattgcagatggtagcctctcacccattgtaggcaaagactcaatttctatttctgaaaacattgtacttcaatcagtgctacatgttcctaaacttactgttaaaaagaatgattgatttattcataattaattcaaggtacaggtctagctcatatacagctgctgctacaaaacgaaaaaagaaactaccctatgaatccctacaaatcagggattgatatcaatacagttgactatacatgggatccaatatttacattacatagtttccttaactaaaaaatcctataatcgtgtgactttctagcactccccctcaagcaggtgaatagatattttccattctcagcttgcttgtgattgcttggaatgcagttcttgctagccccttcgttaaaatatttgctatttgaccccttgtaagcacataaggtgtgtagatcaagccactatccaatttttctttgataaagtgtctatcaacctcaatatgcttcgtccgatcatgttgcactggattatgagtgatattaatagctgatttgttgtcaaagtagcctcattggtaatcaagaataatcttcagccataacaactcacatacaccatgtgccattgttctgaattcagactcgacactagaccttgcaaccatagtttggttcttgctcctccaagtgatcaagtttccaccaacaaaagtgcaatatcccgatgttgacctcctatttactactgagcctgcatagtctgcattcgtgtaagcttcaagggttagttcagttcccttttttaagagaataccctttcttggagaagactttagataatgaagagctatgcatgaattggcttatgactcccactgcgtaagccatatccgaccttgtatgggagagataaatgagcctctggtacattcccttgtccactaccatgtcttcacttgcttttacagttcggtgattctgttcaataggcgttttagcaggtttacaagtgagtttccctatatcttccaacaaatccaacacgtatttgtgttgggagataaatattcctcgcttagagtaagctacttcaattccgagaaagtattaaacttgctaaggtccttgatctcaaattcctttgccaactaacatcttacagtttttctttcctttaaatcattctcgatcacaattatgtcatccacataaactaacaaagttgtgactccccctgacttcgagtgtttaataaagagagtgtgatcaccttgactttgcttgtaccctattgccatcatagctttagtgaatctgtcgaaccaagtccttggggattgtttaagtccataaagggccttctttaatttacacaccctttttcctttcaactcagctctaaaaccaagtgggatttccatgtaaatttcttcttcaagatcaccatgtaaaaatgcatttttcacatcatatcgttgtaactcccaatcataattagcagctagagacaagagaatccttactatattcatttttgcaactggtgcaaaggtctcctgataaaccaccccatatgtttgagtgtagccttttgcaactaaccgagccttatacctctcaagtgatccatctaccttatacttcaccgtaaagacccacttacatcccacgaggctctttccttcaggcaagtcaaccaattcccaagttttgcttttctcaagttcctccatgtctactcgcatagcttgtctccattcctcactgtttagagctttagatagagtgttagggatggatatactgtttaggctcatgaggaagcttatatgagacggtgataggttcttgtatgacacaaaatgtgacagtaggtagagtggatgcttggtgcattctttaatactttcctaatggcaatgggcagatcatggtcaagactatcaagaggtgcaagtgaattttctaaagtaaggtaaaaaatgggtgttacctcttttttcagggttgattcggactcttagacttgcaagaggtcaggaatgcgtgccttcctccttgaatacacttgcaaaggccatgtgggaccaaggatttcatttaccttagtcgaagactctgaattttgactcggaggttgagactcaagttcttggatcgagataacatgtggatttggagactcagaccattgacttggactagattaagactcgagttgaatagacgaggaagaagaaagctctaacaaaaacaaatctcgatcctcgtcttctatcaatgatgtctccccttgaagataaggagtgagaaaatacggttcattctcgaaaaaagtgacatcggcaaacacataaaatttcctcgtaggaggatgataacatttgtaaccttttttagtaaagaaatatcccacaaagacacactgaatagctcttggatcaagtttcccctagttttgagcatgaacatgaacaaatgagacacaaccaaagattcaagaaacaaggttattggaggtattgaagttcgggtagaatttagaaaagacttccataggacttttgaaccccaacacacttgaaggtaatcgatttataaggtgggtagccatgatgatagcctctccccagtatgtctttggcacattgttttgaaacaaaaaaactcgggttaaagctagcaaatgaccattcttccgttcaatgaccccattttgttgtggaatgcttacataggaagattcctaaatgattttcttcttttgaaattgaggagataagacctgattaaagtaatcacgagcattatcagacctgaatctttttattgccacaccaaagtgatttttgacaatgctatgaaacattaggaacacaatattaacatcagatttttgtctcataagatagggccaagtaacacgagtgcaatccttaataaaggaaacaaaccaacgagcaccaaaaacattgggaatggtagagggaccccagatatcactatgaatcaacgagaaaggaacaaatgttctattattactgatgagcaaaggtacacaatggtatttggaaaattcacaaatatcacaatgaagactttccacatcaattcctttgaacaataataggaacaaaattttcagaacactaaaagacgaatgccctaaacgacaatgatgtagccaaattttagctttattggaaacaatttcaaaaataaacaacctaggtaaattattttcaatcctacttggattgcttgatgcttcagggtggtacatcccatccttttctctagcacgtccaatcatcctccccgagtcctggtcctgaaaaacataatgagttgggtgaaaaatgacactacaattcatgtcctatgtgagtttatggattaaaacaagattggtagacaatttaggaacatataaaacaattttcaagactaggaaatgatgtattttaatttcaccctgaccggcaacagtgttcaatgacccatcaaccgttgcaatctttttattgttgaggcatggattataggtactaaatttgagggacgaatttttcatgtagtcttttgctcctgagtcaatgacccaagagtttggaaaattaatatccgaagcacttaacgcatgagagataagagacttacccacgagtgccaatgagcaagcactcgagggtttttctagagtttctcaatcttttctttgttgaactctccagtgtcttgggaactttcattatctgattgagtagcagaaagatgagcctggccatgattaccttgttgtccgcctttactgtttcagtttttcccaaaattaggtgattttccatgtaatttttagcaacgatctttttcatggcttggtttttttacagtaattgcacaaacgattatctttgttgtctgctttggacaaatctaccctgccattcccataattggaaacctgatttggtctaccattggaaagcattgtcggatttccattcgagaccatagtcgagccatctgttgtttaggattcaatcattgcccctcaccttccttcttctgcacaaatcatagagatggtctcattcaatgatggcaactcatccctgcctaagacttggcttcgtttctaatcatattccacattgaggccagcaagaaactcaaagattctctctttctccacaaatctcttgagcagggctgcatcctcactacacatcatcttaaggcattgataatgatccaattcttgccatagacttttcaaaatattggcatattcagtgatagaacgatcaccttgtcttgtagcagaaattcgcgtcttaatctaaaaaatttgagtcgcgtcacagaccttagaataagtctcgtttacaacatcccaaatctctttcgtcgtagtaaaaaacatacaagatttctagaaccatggaattccacaatcatgacattatcatcgaatcctcctcatcccagatgtgaaacttcgggtcactcggatcaggtccttttccaaccaaatggcttagtttccattttcctttctagaaggttcgcaccaattgtgaccactgcaaatagttcttcccgttcaacctatacgtcacttgaatgtttggaagctcgccaagtgcatgaattgcaagtgcttcagatgcagggacagtcgacgtgttggttgcttcagacaccttagacatgacgaatagttctttgagaaaggacaaaatacgagaagggaaaaatagaaggaaaaaatttatcacaaaaaaaaaatgtggatctagaaattccgaatataaggaatatgatagaagaagaaagatttatgagaaaaatttccaagagacccaatcagcaagaaggaaaagaaaacaaaatcaatatgcagaaaacaagaaaaccaacaaaagctgagaataacaaatcgcaaaagaacatgacacaaaacctacagtaaagacgcaaaagaattgctagaacaaaaagaaatagcctcatatatatatagctactgctacaaaaaaaaaaaaaaaaaaaaaaaaaacctcctctataaatccctacaaatcaaggattgatatcaatacaattgaccatacatgggattctatatttaaattacatagtttccttaacccaaaaatcctataatcatgtgactttcaacacttatttacaatttgttgtctgtcaataaattgtctaaagattttaattgttgtgtcacttttttttattttcattgtgaatttcaggaccagaacacagggaagatgattggcaatgctaggatgcaagatcgtctctaatattttgatgaaaaggtcttcaaaaataaacaagtccagagctttggtggtagtgtcagttttacttctgcttataatagaataatgctttggcatcttagactaggacatcccggtttttcttatttaaaacattttttttccaggattattaagaggagttgattgcaatttgctgcactatgaagcttgcgttttatcaaaaaatcatcgaacgtcttattacacaaaggcatattctccatcaaaacctttttatttaatctatagtgatgtgtgagggtcttctaaaattcataatttgaatggaaaaagatggtttgtgacattcatagatgatcacactcgactgtgttgggtttacttgatgaaaaataaatcagatgttgaacaaatcttcaaagatttctatgctttttttgaaatacaatttcaaataaaaatcagtattttaaaaaccgataatggtactaaatatttcaatgactgtttggggacttttttttttttaaggaaaagggcattcaccatcaatccacttgtagggacacaccccaacaaaacggtatagttgaacgtaaaaaccgtcatttgttagaagtggctaggtttcttatgttttccatgcatataccaaaatatttgtggggtgaagcgattttaacttcttgttatttgatcaatagaatgcctaatcgtattttgaaatatgatacacccctgcaatgtttgcaaaaattattccctacaaattggttgactgcagaattatcttttgaaagtgtttggttgcattgcttgtgttcacatacctagtcatctaagaaataagttagaccctagggctgaaaaatgtgtttttgttggttatgccacaaataaaaagggttacaaatgtttcaatccaattacaaggaaatttcatatcactatggatgttcattttgttgaaaataccatttttttttcacaaaacttctcttcaaatggagagagaaaatgaagatcagttttgacatatttcttctccaacaccaaatatttctcttaatgatactctttttattgttgggactgaattgtttgatagagaaaaaataagagagcctggtctacctatgtcaaagtatagtgagttgcaagcaaggggagaaacactccaaaataataataatcctactgaactatgtgtttatacaagaagaaaatttcgtcaaactactggagacaatccagctatcctggaaggtcaataatcaaccccaccgattcctcaaggtccaggtatatcagattcctcttctaatcctattcaatccactaatctcgatgttcctatcgctcttaggaaaggaattagaacttgtaccaaacaccctattgctaattttttatcttaccataaactatctgaaaaccataaggcctttacttctaaaatcactaatctgtttgtgccaaggaatgtttaggaagctcttagtcattcagattggaggacaacagttttagaataaatgaatacccttaaaagaaatggaacaaaggagattgtagaattgcccaatggaaagaagattgtgggttgtaagtaggtgtttacaatcaaatgcaaagttgatggtagcgtgggaagatacaaggcacgtttagtggcaaagggcttcactcaaacattcgggatagactaccaagaaactttcgcaccagtggtaaagatcaactcaatttggattctactttctcttttagtcaagtcaaattggcctttgcatcaactagatgtgaaaaacgcttttttgaatggggatctagaaaatgaggtttttatggaccaccaaggtttgaagagaaatgaggtaggcagagagtttgtaagctgaaaaaatccctctatggattcaagtagtcacccagagcttggttcgagcgctttgggaaagcagtgaagagtcacggttatactcaaagtcaagcaaatcatacgatgttctttaaacattcttgtaaaggtaaaattgctatcttaatcgtttatgtggacgatattatattaattagtgatgatagcttggagattgagagattgaaagggttgcttgctcgggattttgagatcaaagacttgggaaccttgaagtatttccttggtatggaatttgcaagatcaaggaaaggaatatttgtttcctagaggaagtacatactagatttacttgagacaggcttattgggttgtagagctaccaagactcctattgactctaacttaaaattgcaactagtcaaggtcgaggatgttgtcgatagagataagtttcaatgtctgataggcagattaatctctctctcccacacacatctaaatatagcatttgcagtgagcatggttagtcagttcatgcactcactaggataggaacactttgatgctatttataggatccttagatacctaaaaggaactccagcaaagggtcttttatttgaagacaggggccatttgagagttaaagtttacacagatgctgcttgggccgggagtgtaacggataggagatctatttctaggtattgcacttttgtgggaggaaacttggttacatggcagagtaaaaagcagaatgtaattgcttggagtagtgcaaaagcaaaattcagagtagttgctcatgctgtgagatcctttggatcaaaagactacttgaagaacttagggtaactagtagtcttcctatgaaggtgttttgcaataataaggcagcaattgcaattgctcacaatcctgtcctacatgataggacaaagcatgttgaggctgacaagcaatttattaaggagaaattggagggactcatttgtatgccccacattcctactgatgaacaagtagctgatatactcactaagggactaccaaagaagcaatttgataagttagtgagcaagctggccatggaagacattttcaagccaacttgagtgggagtgttggaaatctccggaggtcctaggagctgttatcctaggtgctagctgtaaatatttgtacagctgtagagatattttctagctgtaaatatttgtatagctgtagagattttttcctatctattcttttgtaatctgcctatataatgttttcttgtacatgtattagaaatatatcaccagaatattttcttaattagcccaaacaggattctttaagtctaatacattatggttcctggtcttgggttagaccactctgaaagcatctgtttgttccctattttttctgttgttttttgataggaaacgacaacggaatatattgataaaaagaaggtacaattagaaggatgagaaatcctcccaccaaagaaaattttaagtgcaagctctcttttttctcctcgatttccaaggcctcgcaagaagaatttaggggaaggggcttcggcgccgagaaaggaagagatttcgaacaaagcttcatctgacgaagatatggaaggatttttgggccgagtggagtctgatcctcgaggctcagcagtcatgggtatgccttcttcgccagtaaccagaggtaaagggcctaacttgttggggaattgtggttcgatggttgcggaatctctggaggtaacgccttcactttttcagtctacccagcaatatattccctcttctagtggcttcactaattccctcttgaacccttccatccccattccgagtccttctacccccttgcttcccgtttcagcttctcaatccttggctcctacggaaaaccgagtaaattccgaattttttttcaaaaaagtcaacgatgctttcaaaggtcaaattactattttttctgttgttagtcagtcaatctgctccaccaaatgtgggagagggctgcatgtgaggagttgtgatagcagcttaaacttttgctgcataatgcccctaacagttccaagtgaagtggttggaaaaactgtagttaccggggaacataattttctttacatagtcctactggtgcctccatttgttttattaccatgcatgactgcataactgttattcgacctgtttagatttttcatttttttttttctgccaatacatgtgatagatgtagttaatggtctaggaaattttctgttggaaaataatatgagtctgctcagaatagaccattattatattattgcctttaatttaatattctctcatatattatagg

SEQ ID NO: 12164 - DNA, 1920 bp, Vitis vinifera
  Intron number 2 from transcript GSVIVT01025422001 (locus G SVIVG01025422001) derived from phytozome v7.0 (chr-ID chr6 ; pos 930602 to 932521)
cttcgttgtctcctcaaaacaatcttattttcaaggtagctgtgagctttattccatgtttgaagtgggtttctgattggttgctgagaaaaatgtggaaagtagaacaaaaacgtgaaatttgatgtctttcgttttctgatgcttgacttatgcagacgttggacataactttgattgggttttggctctccctttttttttttcttttttttcttcaggattctcagcagccaaacagaaagctaaggaaattttagtaaactaatatatggtttaggttgggttgcttgatacgtatgatgttaaccctttctagtccaaattggtagttaattccaaatggggttttgtttaaaacttcaacgataatttgagtttgtatgagaaaattgaggaaatagggtctgattcttttggaatttgataggctctaatcttacggtattgacctcaatttcagctggctttctgttaatatttgtgctaaatcattggaagttatgtttttttctcagcacttcaatcctcacttttttggtcttcactcgtgctcttttgccactttcaatggaaattactttcctcctgtaatcttggaatcactggtcataataggttgtggacaaagttattcttcattttgtataaagattaaacaatccccaaagtactgcaacttgctgtaattagtaatggtaggggttgtcaaacaagtaatttctggcaatgcatgctccaaactgagcattcgaaatcatatacacaataatttttagtttctaactgttgaactaccaattttcctaaaagcttaagcttgtaggatttcggctcacaatgtattatatcgtgcactctaacaccctccctcactcatacccgcacatggagagacacacatatccataggtaaacaaccacaatcaacctcttttgagcttacttaataaggcctcttttgggcttacttgataaattggggatataaatatacagtagtgaggtttgaacacatgacctcccaacaattgaagctctaataccatattgaactatcaattttcctaaaagtttgaacttattggatttaggttcacaatgtatatcatgcactctaacactaactatatataggccagtggacagtgtgctatttatggagttatttcaattttcaaataatacagggttttggttactttgagtggaaaaaaaagtcaacaagaagacatcatgtttacataaatgtgcagaatgcaagaggcataggatcaactaattctagggtttccatgattcctattctgtatttgtgcacatgttcatcaaaccatctccttcaaaagtctattgttttatcaggttccattttgtatcaaaaatcaacctaggaggtagggacgtatcaaaaacaacatttttaggattctcatttcaagtgatggaggcatcaaatagatgacctttatagaaaggtgaatatggtaaatgagcacctgaaaattgcaggcacccacacactcataaatatattctctgtgtgtgtgtgtagagagagagaaagagagagagatgtatgcacgatttggatatgcttgtaatgaaatgtgtggcttatggatcctattatatcttttggttctaaaattgctttcggatctagaatagctgcttgacaacaattttgttgatttaaaagcctcaatcttcttaatacaacagagaatggtatagatgtacactacatgatggtaggcaatcgtttattgtaatacagtagcagttggatcgtatgtatgttgtttatcttgtatttacactggtagctgctatcaaacattttgttgattttgcatctgcagctatgacacattttatgtatgattgcaagttttttttcttcagattttcaggact

SEQ ID NO: 12165 - DNA, 8400 bp, Vitis vinifera
  Intron number 1 from transcript GSVIVT01029393001 (locus G SVIVG01029393001) derived from phytozome v7.0 (chr-ID chr1 7; pos 16138761 to 16147160 reverse strand)
ttgggttgaatccctccttgtttgaccaggtaaatttcaaacggtttggtttacagtttgagcatggaattggttgttttgtggttatttggcttgatatacaatattgcctcattacctaaatccttgcttgtcttagtaatgagtaagttaacatgaatttaagtatgatgttcaaggatttgaatatatagtataatgttgggttgaatccatcgttgtttgagcaggtaatttcaaatgttttggtttcttttgtggttatatttttagttaaaattgttaagtgttggcaggcttgatgtgtatgactgtccattacttaaaaagtccatagacttttgaattaattggttgtttaatatgatattcttccactgattcctccatttgttgccaaatgtgactccgtttgttaaacttaattgtttgtgaccattacctaaagcttaaacttttggattaggtggtggtttaatagtaacccaattgtgagaattatgacattgatgatttggatatggtaaaaactcaatatgaacaagaatttagggtatgtagaagatggggaatcagtgggcattgagaactctaagacttttagtagcgggttgaagggtttgaaattctgaatattgagtatgatgtcagattaaattccttcctgtttgaacgggtattttttatttttttggggtatttcggttttgtttttgacttattagtaggagttgttgcattatttggcttgatatagggtgttggctcattacttaaaaggttagggttttgggttaattgttagtttaatatgacgttcctctatttgttgccaaatgtgaagtgggatattgagtgttaacttccatgagacatgtttctttgccattatgtaaaagtttaagctttggggattagttggtaattaaacaataatatcatgagaaatacggcacaaaatttttattatgacataaattcaatgcatctcaagattgtgctatcagttaagttatattttcaaatgtttctggttagattttgaggaaggaattggttgttttttattttattagttagttgtaattgtttaagtgttatctggtttgatatatagagttgacttgttacctaaaagtttaagcttttggtttaaataggtagttcaatatggtatttctccatttgtcagtgcatgtcaaatggggtgctaattgttagttagcttgacatagattggtggctgataatactgaaaagtttagattttgtggtacttggtagtttaacaagaatagcatcatgagaattatggaatcaaatattcaaatttgtccaaaaatccatacaagtaagaattttgccgttggtttagatatagtttccaattgacttgcttggtatttggaaatccataaagccataagagtggattcatttctagtgtgattaattcattggatctactttatattctaagcaagttttgtttcactttttgaagcgctctaaactttgtccaaaattttacatattttttttgtgatggttagaatgtttgtatttttgactaacttatcttcatgaaattaaatctgtaatcatctgaataacctttttttttggataagaaatccttccaagcttcaatgcttctcttattttgttcccattttaaatagagatgaaaactaagtgaatttgatctctctctctctctctctctctatatatatatatatatatatatatattttccagatattggattatttcctagcccttagcagtatctaatcacatactgctagattgcattgatgttgtactaaacagatattaattccaattatagccatagttgttaactcgtaaaacgtatcatgtatcattttcctatttttccatattgcgtattgtatcgtgtataataagcttttttgtatagagaaaaataaatagaaaaatatgtacatgtgaatatctagtaaaagtatgaagtatagagtaatatatatccaattttatggaagatagtaggatctaaagagttaatctatatcatataatatgaaaacattgaatgttaatgttttgacaagttcaaattaacaaaatataactttaacatatagattcatcacataatccacaaaaataaactttttcaatttttggctatgattgttagttccaaattctaactaggtatatgcatttattgtgttgctaattgatatatgcgtgtgtgtgtatgtgcatgtgcctttatgtgtcattttcaaagttttagcttttcctgtttgtcatcattccttttccaccaaaaaagaaattaaaaaaaaaactaattcattaagtaaaaatttttattcactaatcaccatcattttcatggtcaacattcaaaccattcaaatgaaaattttccaatattcattgtaaaaataaacttaacttctaatataacatatgacaataagaatgcaacttttcatattgaagaatttctgaactcctttattgataatgaatcggtacacaccatacacatatatatacacaaatgactgaataagaaacaatcaatctagcttaattctctcctaaaattaggaaactaaatcataaggaaatatcctaaatgatctctccttttttattcctaaattaaagtcctaactttggcattatttcaacactccccctcaagctggagaatatatatcatataatcccagcttgcaagttaagtcttcgaagttaggcctaggtaaagctttggtgaggatgtctgcggtttggtgcttggtaggaacatagtttaatttgaccgtctcactagtcaccttctttgtgataaagtgtctgtcaatctcaacatgcttggtcctgtcatgatgcacggggttctttgctatgcttatagctgcctgattatcacacatcatcagaattggagatgaactcgtttgtcccagttcactaagaaccctttttatccaaatcccttcacagattccctgtgcaagagctctgtactcagcttctgcactacttctggctacaactgattgcttcttactcctccaggtaacaagatttccccagacaaaagaacaatatccggaagtggaccgcctgtcaatgatgtttcctgcccaatccgcatctgagtatacttcagtgtcacggttctctgtctttctgaagaataggcctttccctggtgtcatttttaaatatctaagaatcctgtagactgcttccatgtgttcctcagtggggctgtgcatgaattgacttacagcactcactgcaaagccaatatctggccgagtgtgtgagagataaatcaagcgcccgacaagctgctgatatctccccctgtctaccggtgtactttctttctcgataccaagtttcttctgactctccataggagtatcaattggtttgcatccaagcataccggtctccttaagaagatcgagtatgtattttctttgagagactacgattcctttccttgatctagccacttccataccaaggaaatatttcaaatttccaaggtctttaacttcaaactcttctgacaaatacttcttcaaattctgtaactcccccatatcatttccagatagaataatatcatcgacatagactatcaatatggccaatttcccggcatgagatttcttgacaaatagagtatgatcagcctgaccttgtttgtagcccagcttcaggactgcttttgtgaatctatcaaaccaggctcgaggagattgtttaaggccgtacaatgatttttggagtttgcaaacctgattctttgccatactttcttcgaaaccaggtggtatttccatgtagacttcctcttctaggtccccatttagaaacgcatttttaatgtccagttgttgcaagcaccaatcttgattgacagccaatgagagaaggatcctgatagtgttcagttttgcaacaggagcaaaagtctcctgatagtctatcccataggattgtgtaaaccctctagctaccaaacgagccttgaatctttcgactgatccatctgctttgtattttatggtgaaaatccacttgcaccccacaggcctcttcccaaccggcaaatctgtgatagtccacgtcccattcttctcaagtgcatcaatctcatcttgtactgccttcttccattctgaaatttttaatgcctcttgtattgtgttgggaacctgagtatcatcaagagaagtagcaaatgctctgtaagatggtgataacccttcatacgtaacataattcccaattggatgatctgtacatctcctaacacccttcctcaatgcaattggcaaagtagaatcatcaatgctgggaattaacacctctccagccctatcctcacctatgttctcttcaggaagacttgaattggagtcaatatattggccacatgttgactgtgatccgtgctctaattcctgtcttttcctcctcctgatgtaaacttgtaagttctcattagcaagttgtggggctataggttgaataggcatgggagactggatggtcacgggagaaggaacatttgtgtgctgggctggctgaactgatggcggcatgggtgtggacaactcagtgggcgcgaattgggaaggatttggtgactctgagtgaaaagaaggtacaccatcaagaaaagactcccaaacttgatgttcattcatgctctccccctgaacatgagatttgggatagaagaagacatgttcaaagaaagagacgtccatggtggtgtaaaatcttttgttggttggagaatagcatttgtaccctttttgggttggagaataccctagaaaaatgcacttatttgctcgaggagcaaatttgctacgattttgaggatacacatgaacgaatgccgtacaaccaaatactttgagtggtaaatcagaagaggcggcatgggtgtgaggaaactgttttaagaaaagttgacgtggggattgaaaggtaagcactctggatggcatacggttaatcaaataggtagctgtgagaatagcttccccccagaaatagtttggaacattagaggaaaacataaggcaccgggcaacctccaagagatgtctattcttgcgttcggccaccccattttgttgtggggtgtcaacgcaagaacttatgtggataatgccatgattttgaagataagtactgagactactagtaaagtattcctttgcattatctgacttgaggacttgtattttggaattgaattgattttgaaccatacgattgaaggtttgaaaaatgtgcccgacctctgacttttctttcataaggaaaacccatgttacccgagtatgatcatcaacgaatgtcacaaaccatcgagtgccagaaatattttttatccgggagggaccccacacatcactatgtactagagagaaaacagtcgaaggtttgtatgggatttgaggatatactgttcgagtatgctttgcaaactgacaaatttcacagtgataagatgctggatttttattgataaataatctgggaaacaattttgcaaggtaaacaaagctaggatgaccaaggtgatagtgtaacattataatctcactatctttattgaccttagaatttgacacagaattgaaagactctgacatactctgagactgtacgcaacttgcttgagagacttggttggagaattggccacatgaaaggaggtagagcccggaacacagttcagcactgccaatcatcttccccgatttcaagtcctgaaaaacacacaagtttggatagaatttagtaacacattggagatcatgagccaatttgctaatggacaaaagattgcaatccaagtttggaacatggaggacagagtcaagatataagtctttagtaagttttatagaacctgtcccggcaatttttgactttgaaccatcagcaatatggacggatgaatgaccattacttggcttgtaattttgaagaatggcagcatctcctgtcatgtgatcagaagcacctgtgtctactatccacggcctcattcctcctcgattagcagtgaaggctacaccggtagtactgccactgccaacttggcttaataatttctgtagcatctccatctgctctttgttgaatggactcggctcgggaacagaggtgctctcagagttggcagccacgtgtgctctgccatctctgtcaaaccgtggctttggtttccaatcagcaggtttgccatgaagcttccagcaagtctccttataatggcctggtttcttacaataatcacaccaaggcctatcccgtttctgacgatctccaccactactattaaatgaccgagccgcaagggcagaggcatccaatgttggggtaggttgctcttttgatcccatcatcactttctttctactttattcacgtctaacctctgaaaaagcctccctgagacttggcaggggtttaatgcccatgattcggcctctaacatcatccaattccctgtttagtcctaggaagaacttgaacagtctcttttgttccacaatttgcctgtatgttgctgcatcatccgaacatttccatgagtgagtctcaaataagtcaagttgctgccaataccttgtgagtgtgttgtaatactgagtaactgactgctctccttggcggaagtcatgtagagctgattcaacctgaaacagttctgaagtattttcagaacttgagtaagtttctttggctgcatcccatatgtcctttgcagtcccaaacagcaagaaattttcgcctatgtcattgttcatggaattgataagccatgacatgatcatgctgttttcaatcttccacttcctgaaacccggttctgtagtttctggcatgactgcttctccagtgaggtactcatcctttcctttaccgcaaatgaacagcaacacagattgtgaccactgtaaatagttatggccatttaatttgtgtcctgtgatgagaataggagaggaatcattgccaccaaggtttggaatttcagatctgccccctgattctggtgacgtgacgctggatacttgtgatgatgccattccgtattttgtcatggaccggaaaggtagaagaacacttttcaaggcacgtgcagggactggagttgagaaaaaatagccgaaggacgccggaaaatctgatcagagggcccgcggaagcaaaagaaccccaaaagaggcacgtgcagggctcggattgcacaaacaggtaggaagggtggctggtcggcgtcaggcgagcctggaggaggaagcgcgtcgccggaaagtggctcacgcgccctcacgcgccggcgcgtgagatgcagtcgccggccggaaaaacgcgcgtgggcggcgcgtggatgggtttctggttccggtgctttgggacaaattggagatctcctccaggcgctccttgcggtgtagaaaaaaaaaccgtcgccggaaagttcgccggaaaagttgccggcggtgagtgttttctgacgactattcgactgactggaaagtgttttctcccttggctctgagaacagggactgatggccggaatgagagagagagagagagagatgatcggattgagatatggccagaaagatttggccggaatgagtgatggcctgaataagaggtggccagaagggattagggtttcagaaaactggctctgataccatgaagaatttctgaactcctttattgataatgaatcggtacacaccatacacatatatatacacaaatgactgaataagaaacaatcaatctagcttaattctctcctaaaattaggaaactaaatcataaggaaatatcctaaatgatctctccttttttattcctaaattaaagtcctaactttggcattatttcaacacatataaaattattttacctatttctcctttttatgatcagtttttaatcttttactatattttaaatagttaatataataaattattttaacaaaaaaaaaaattgattttttcacaaaattatggaaaattgttgaagatgtatgtattgttgtatcataatatcatgtatcgtatcatgtatcgtatttgtatcgtaagatatgctttaaaataagatagattgtgatatgtatcgattttcataaaaaaattattgtatcgttgtatcgtattgtgtattgtaagtttttaataactatgattatagcacaatgctttgttttgtgtggcttttggttgttttcttatacttttgattaaagaggaatttataaaattctttcagctgctttctttggatcttgagactgtgatca

SEQ ID NO: 12166 - DNA, 13618 bp, Vitis vinifera
  Intron number 1 from transcript GSVIVT01007857001 (locus G SVIVG01007857001) derived from phytozome v7.0 (chr-ID chr1 7; pos 8299280 to 8312897)
ctggtgagccatttctccgcaagaaaggtttacccgttactgtagggacccctccccttgatgacacgtggcacgcatttctaaccagatcagcttcatccggatttccccaagagtacacatggcgcgctctcctatccggactccctcaaggagaggcacacaacactcacaaacataacatccggacaaccgacatataatttttggatatgttcatccggatcattgactgaagtgagcaagtcttgcacgtcatcacaacagcctgccatggctcacgttccgccacttgcagagtgagatgacaggaatgaagtgatggcaagtcacttcccacgatctttgacagctgcggcgcctcccacgatctctgtcagccgccctatgagtgatgatggccctaccaccacctagagacatcatgacaagccaaaatatctccctaccattaaagagggaaacaaagctccttatacgatatatatatatgaaccttcacacaaagaggaaggtaaggtttctatacctagtaaaaggccaactgatttatctctctgaaccatggctaacaaaaccatcggagggtgcgtccggacaccctgtccgaacgtcttttgtaagaacgactaaaccaggaatctatattggttgagatcgtgcgtccatccatttggcaactacgtggatcaccagggacgcgaggcctcaacattggcgctgtctgtgggaacatcgctgattcagtcaccggcaaacatggtcacaccttcccgaagtcgctcatctggtaagggagaggaagatcattctgaatggcgacaagccatcgaaagaagacagttggcaagcgaacgacaactgcaaactctcctctgggagacagaaaggttaagagaagaaaacgcggtgctacgcatccaagcttcatcgacggggcctccccgtcgccagcgttcgagaggccagatggcaaactcaaggccggaaccagagtcaatataccctgggacagtaagagccatcccaaaaaccagcaacgttaagccacatgagccacacactcccatgcactgagctccctgtgaggaaaactcagactctactcatttttcagcaaaaagacaacgcaacaaaaggccccagttgtcaaactcgatgcgcgcaagactaggcccacaggagcataggaggccaaggccactagcagccacagcctgggaagcgcaccctgaccctatggtcacccctatggtgcaaaacgttctcccacatcgtgaccccatggtcacccctatggtgcataacgttcaaccacacctagtggtacgacaatctgggagaaacctcccaaatgagccacctattggctccatcagcaaaagactggacaacatgctctccacgcctttctactctcatatcattcattacgagcccccaaggggattcctcgtacccaaattctccacatacgatgggtccaacgaccccttcgatcatatcatgcattatcgacagctcatgactctcgatataggcaacgacgcgttgctatgcaaagtatttcccgctagcctacaagggcaggccctctcatggtttcatcgcctacctccaaattctgttgacaatttcagggacttattggaggctttcgtgggacaatacttatgctccgctcgacataaacagaacatcaacactctacgaaacataaaaatgcaagataacaaatccttaagggagttcgtgaaacggtttggtcaagccgtacttcaggtagaggcttacagtatggatgctgtcctgcagatcttcaagcgaggcatctgtccaggcactccatttttcgaatcacttgctaaaaagcttccaacaacgatggacgacttgttcagacatgcaaacaaatactcaatgctcgaagatgacgtacgagcaaccacccaacaagtcttggttgctggacaggcatctagaagtggcgcggatagaagtgtcaaacttccggaccggccaaggccgtccgatcgaaggcaggaagggccaggtcgcccggaaagaccgcccctcacgcctctctccatatcatatgagaaacttctccctatgatccaaggcatgtccgacttcaggtggcctagacccctcggaacggacccatccaaaagagatcatagcaaaaaatgtgccttccacaaggagcatggtcacacaacggaagaatgcaggtgcctccattatttggtcgaaaagctcataagagcgggacacttaaaacaatacctcccctcagatgccggaggtaaaaacgcttctcaaaaccacaacactggagcccccagggccccagccacccccaaagtcgttataaactatattaacggaggtccatctgacgaggagtatgactccaaatgaaaaagacaaaagttgttgcgggcctgtagaccctcaattttgtccatcgacactggcatttattcttcaggtgtcacatccacccatcgttcgcatatggcaccactagggccccttttgggcttagtcggtgtccgagcctcgtgtgggtttgtctgtggtccattgtggtgcatatgtggttcattttggagggtcaccatggccattttcctagtcgttcacatcacactataggaaggaagtggggtcatctcgatgttttagcttagttggagtttataggggcatgttgaggttcggagcactcgggcttgttttgatcgtatctccctcatccaaactcggaatcaagaaccgtttctttttatggatttcttattcttccaggaacattctgtaaaattttcagattttttttcgcaaccggtctgctggttggcagccggttcagccggttcatcgagtcagccggtgtagaacactgatttttggtaattgttttgatcatatctccctcttccgaacttggaatcatgcaccgttttttttaatggattccttactctactaggaacattctgtcaaattttcagaatttttttccatcggtttgaccagttggcatccggttcggccggttcagccggttcagccggttcattgagtcagctgaggtaaaacactaattctagtaattttgaggcctaaatcctacatggctcaggcccgtaagctccagatcggttttgggcaatgttgtgggtccattttgggccttggtttgggttccttgtaggccactacgaatccatatggattcttggtggtgaagcaagctgaaaactgaaggagtgagctggcctcgtaagtttaagagaagtaatgaggggtgtggttcccatgctgatgaaggggatttcggtgttgaaggggaaggaatctaggaggctcaaatgctaagaggggtatgagtataaaaggtgagaggataggagagcaaaggataggaggggacattttggagaagggaaattttgctggtgagaaaaacaaaaggtcagtagcatcttctgagttgagagcgtgggagaaagcttcagcactgtgattttttttaagaggagagtgacagcatctcagttttggaagtcatcatctgaatacacggatcatatttggtggagattctgaggtaagcatgctgaattttctttacttacagtttatcttcctcgtcttcatatgctttttctccttcctcattatcttttcttccatttgatatgaagattgtattgcttgggtgtggataataaaggccacacatgattgttgttgattggttattaatcatttaggaactttatgaccgaatttggggttttttatcaaccggctgaaccagttgggaaccggttcaaccggttcagcacaatagctggttgcctatgtcagccatgaagaacacctacctttctttgtctggttctcactcatccaagctcggaattgagaaccgtttcttttttttgcttcattaatcacttagaaactttctgatcgaatttggggttttttatcaaccggctgaaccggttgggaaccggttcagcaccatagctggcagcctctgtcagccatgaggaacacctgcctttctttgtctggttctcactcatccgggctcggaattgagaaccatttcttttgtttgcttccttaatcacttaggaactttttgaccgaatttgggattttttatcaatcgactgaatcggttgggaaccggttcaactggtttagcacaatagctggctacctctgtcagccatgaggaacacctgcctttctttgtccggttctcactcatccgagctcggaattgagaaccgtttcttttgtttgcttccttaatcacttaggaactttctgaccgaattttggattttttatcaatcggatgaaccaattgggaaccggttcaactggttcagcaccataactggcagcctctgtcagccatgaggaacacctgcctttctttgtctggttctcactcatccgggctcggaattgagaaccgtttcttttgtttgcttccttaatcacttaggaactttctaaccgaatttgagattttttatcaaccggttcagcaccataactagctgcctctgtcagccatgaggaacacctgcctttctttgtctggttctcactcatccgggctcgggattgagtgtcgtttcttttgtttgaatcctcactcatttaggagttttctagaaaaatttgggaattcttctcaataggttgtactagttgagaacgagttcaacctgttctactggaggactttaggtagccctcgattttggcatttttcgagcccttatctattggggctcaaacccattttctatagggcacttgtgagccatcttgaaggtttaagtcagtgtttgatttcagttagtatgggcaattttgaagttatgggtggtgtggtctagatgaatctagttcgatttgtatgacatttggggagtcccttacctcatttcaaccagatatcttcctttttggcacaatctttgatgcttgattttgaatacatgttgcgtgactgactcaccctctgctgtagcacatggctagggactacaggtacggatcgttggttttgattgttgaatcatatgcatgcatggtgcttaatcttgaatgtttgttatgtgtttatcgaccttttatgcagcgcttggctagggaccacaggtacgcacccattattttagttggttgaattcatatgcatgccaaataccaattaggattgtgtgattcatgtcatctatttagcctaggtttcatttgacctttgacctatatgctcccacatacccaattcattagtagagaccgagtttcgggcctagaggggtgctacctcgcatgaggtaccttcccaacgggtaacctgatccccggacccagaatctagtttttgtagaccgttttttccatactggggtcattaggggtttttgttcttatttaattttccccattttaaaaacaaaaataaaaagtaagtggcgattccaaacaacaccgttcctcatcgggggcgggtttttcaaaactggaaaacaccaactttttcatttctttcttttcttttaaaagcgagtcgcgtcggtccggtggatcgggtgagggtccacagggccgcatcggtacgcgaatgtatcaactccatccggcctgggatatctggagggggcccccaccccaaagatgggacaatcatttttccaccagtacaccccacccagatattgcatccgcaccgcgacgccctcatcctgtccctagagataggagacttcgacgtgaggcgcatcctggtcgacccagacagctcagccgatcttgtacaagcatcggtcattagccacatgggacatagtctcacaggcctcgaaaaccctgggcgaatcctatccgaattcaacgggtcgtcaactacgtcattgggagacattgtactatcggtccaagctggcccagtcactctcaacatacaattttcggtggtacaagatttatcacccttcaatgtcatattggggcgcacatggctacactacatgaaagccatcccctctacatatcaccaaatggtaagtttccttaccaaagataggcaaattgacctatatgctaccaaatagcacgagaagcaaggaccagccaggaggatgcatccctccctgagtccagccttgcacgtgactaataacaattattgggtccggcggacaaagatcccccggcagcggatcccttgcaaacaatccaaatttcagaagaaggtactcaccttacgaatatcagttccctcctgacaccagaagagacccagaatatgcagaacgccctcagacaaaaccatgacgtcttcgtatgggcacattctgatatgaaaggaattcatccctccattacctctcatagactcaacgtcttaccaacagccagacccatccggtagagggttaggcgttttcacccagacagacaaaaaattatccagaatgagattgacaagttgctagaagctggattcatcagaaaagtggattacctagactggttagcaaatgtagtagtggtacccaaaaaagaaggcaaatgacgggtgtgcgtcgattacaccaacctcaataatgcatgtccaaaagacagttttcctttgccacagatagatcaaattgtcgattccactactgggcaagggatgctctctttcttggacgccttctccggataccaccaaatccccatgtccccgaatgatgaagaaaaaatagccttcataacaccacatggtctctattgctataaagtcatgccattcggactcaaaaacgctggcgccacttattagagactgatgacaaagatcttcaaatctctggtcggccgcacagtagaagtatatattgacgatatcgtggtcaaaagcaaaacccgagaggagcatgtcttccacttgcaagaagttttccacctcttaaggaagtatggcatgaagctaaacccttccaaatgcgcctttagcgtaagtgctagcaaattcctgggatttatggtcagccaaagggggatagaggttagccaggatcaagtgaaaacggtcatggacacaccaccccccaagaacaaaaaggaattacaacgcctcacaggcaagcttgtcgcgcttgggcgttttatagcccgattcactaatgagctgcgaccattcttcttggcaatacgaaaagctggagccaacgggtggacagacaattgtcaaaacgcttttcaaaaaattaaacattgcctcatgcaaccgcccatcctgagcagccgcatcactggtgaaaaattgtacatgtacctagctgtatcagagtgggcgatcagcgctgttctattccgctgcccctcacccaaggagcagaaacctatctactatgtcagtagggcattggcggacgtagaaaccaggtattaaaaaatgaagctaacagccttagttcttcgcagtgctgcccagaaactccgcctctacttccaagcacacccggtggtcatgctaactgaccagccctttcgcaacattctgcacaaaccggacctaaccgaaagaatgcttcaataggccatagagttaagcgaatatggaattgagttccaacccaggctgtccatgaaaggccaagtcatggctgacttcgtgctggaatactcccgaaagcctatccaacacaaggaatcaagtgaaaaagagtggtggactttgcgggtcgatggagcctcatgatcatccggatcctgtgtagggctcctgctgcaatcaccaacgggggaacatttggagcaatccatttggctagggttccccgcctcaaacaatgaagcagaatatgaagccatcctattcggattggacctcgccctggctctatccgtctccaaactccgtgtgtatagtgattcccaacttgtggtaagacacgtccagaacgagtatgaagctaaggatgcacacatggcgcgatatctaactaaagtaagggacaccttacaacgattcaccgagtgaacgatcgaaaagatcagacgaactgaaaataggcgcgccgacgccttggcaggcatagctgcctccctccccatcaaagaagccatattgttgcctatacatgtgcaaaccaacccttctatcgcggaagcttccacttgcaacaccattgaggcaaaacaggcagacgaccaagagtggacgaacgacattatagggtacctccggacaggcactctacctgaggatcccaagcaggcacacaagatccaggtgcaagccgcccgtttcaccttgattggggagcacctgtacaagcgatccttcacaggtccctaccttcggtgcctaagtcattcagaggccttatatgtgttaactgaattgcacgagggagtatgtggaaatcattctggaggacgatctctggcgcatagagcccattcgcaaggatattactggcccacaatgaagaaggatgcggcagcctatgtcaaaaaatgtgacaaatgtcaaaggcatgcccccattccgcatatgccatcggagacattgaaaccaatttcaggcccctggcccttcgcgcagtggggcatggacatagtgggacccctcccagccacacctgcctagaagaaattcctacttgtcgccacggattactttagtaaatgggtagaagctgaagcatacgctagcatcaaagacaaagatgtcaccaaatttgtatgaaaaaacatcatctgccacttcggaatcccccaaaccattatagctaacaatggtccacagtttgatagcatcgccttccgaaatttctgttcggaactgaacatccggaattcatactccacaccgcgttatcctcaaagtaatgggcaagcagaagccacaaacaaaacgttattcatggctttaaagaaaaggctcgagcaagcaaaaggaaagtgggtggaggagctacccggagtcctatgggcttatcgaaccacacccggacgccctataggaaacactccctttgccctcacatacggtatggacgcaatcattcctactgaaataggactacccactatccggaccgaggcaggaacgcaggatgatgcaaatgaggagttaggaagaaatttggactgggcagacgaagtaagagaaattgcatccattcggatggcagactattaacaaagggcatccgctcattacaatcgcaaagtaaggtccagaaacttcaaaaagggtacgctggtccttagaaaagttttcgaaaatactgctaagacaggggcgggaaaattccaagccaactaggaaggcccctatataatatctaatacaagtgaaagtggagcttatcatctacaaaagctagatggaactccattactcagaccatggaatgtgtataatttaaaatagtattaccagtgaaggaaagatacaaatacaatatggataagtatgtcttacttgcgaagttgtatgcaaaaagttatccggactacaaagcatagaaagaaagaggcaagtacaatatgaataagtatgttttattgatacttatgaattttgtatacaaagggtcctccggactacaaaatacaacgagaagatagcaatacaaaaattattacaaaaagaaaagctctcattgagcaggcttgctgcgcaacttctcttcctcacccggaggaatcgaaaggacatcccgcttgatatcatgtttcttcatataacagcgatagctgaagaagtacatgtcgtctacttgcttttggtagtccgcttcaagttcctccctttctgcagcaaactcagcctccaactcttctttttgcgctgataaacgcaactgcaaatcttctctttgttttttctcgatggaaacctccgtccggagttgcctcacctcacccctcagaagggtcatctcattttccgcctcaagcaggcgggcatccatggattcctcccggctctttgcctcagctagctccatcaggaggccttcgttctcatctcgagcggcggataaactggtctcagcctgctccagtctcaaacgcagctcctcttcactatttctacgctgagaggcgaaggccttcatataatcagcggtccgcagcaggtcagagaagagatcatgttgttggaccatgccgcgaagaccgctcaccagctacagaaaaacacacaagcaagaagagcaaagttacaaaccatgccacaaacacatcagtatggcaagaaaaatcaagaagtgaaactataccgtttccaccacttcgaacattttcgctgaaggcatgacaacgtctgagccgggtggaatccgtttcagcttctcttccaactctgcgtagctaaaagcgctagcagagatgcaagctgcatcatcaactggattcccccctgatgaagcattggagagtgactcctcctctgggtctggggccccatcagtctcggccggctgggttgctccgagtgaatccccatccggaaccaccaccggggcaggtgggttctctgctgccatctccgcctcgctctcctccggatgatcatcctggacggacgagcagctggcttagatggtttccaagaaccgatcctgaagccgcccgatgaggccagactttaggtctcgcgctggacgcaaccttcttctagctggccccttcaccggcacaagggcaagggggcttggcccgcaaggagacaaactttgactctctgcccccatttcctccattggggatgccgtcggaggcaatgctgcagcacaagaagcctcagctgcgtccccattcggatggggagagccgagttgatttattgaagtagcttcttcaaccaaaagagccaggcggcccgccactgacattgaaggccctgagtggttcagacccgtgagatgtccgggaccgcttgaaacagagggcgggacgggatgttccggctctcttattgttacttccttcacataagtcgagggggaattaccaactccttcggaggagttggaggttttatttctttccccttattattaagaaccagctttctcttattcttctcttttgctggagctccagcaggaagggagggtgcggagcgttttttcctaggagccttccgtagagttccctctttcctcttcccctctcgatcgtcaaggagtgctcggcgtttctgagcgtctaccttttgcacctccttatagaaaggaaggtctttcaaaatgtaatgctccccaggcactaccttttttggcagcctcctagggagaatattggtgatatacgcctgggactcccggacaacggctaacaggtttcgcgcagtgagcagcgtctcatgatgcctcttggcggtggaaatctcaaataacttgttcagcagggcgaacgacgctttttctacccactcgactatgcgacccctcttgtccggacctgcattatcaatgaacaaagatattaagtcaaatgataaccctctcaagcagtacaacaaaatgaatgccggacaagacccgcaacctgacttacccggaagcactaacgaacggtttggggaaaatggcctctccggatgctccagaagaccatcccaagcaccccggaccaacacatgtcccttggctcctcccttcgttgaatccggtaactcagtcaccagttgaagggagggcaggtgggcagccatgctaaaaatatcattcttcctcttcttgagggagtagacaaaaagaacctccagcagcgagaggtccaagttgaaaagcaggctgagaacgctgcatcccattagcacccggactatattggggtggatgtaggctggtgggatctgtgtgaaatgaaggaattccttgaacagtgacgggaacgggaaccggagcccagcgttgaactgctcctttgtaaaaatgatggcattgtcttcagctttctcagtagacactgcctcctcatccatcagctccacgagcacgccatttgggatacagaaacgttcgcagaattcctttgcactcagcttatccacagatttctcatgagcatcgctggacgagccagatgaggtagcttccttattcgcagacattttttagcctagggttgaaatggaatctgcatgaaagaagaccaacagtcaaaaacagcaatccaaccccacaaaatctaacccaaagcagagtcaatggcccacaaaagacacaggggggcaacagaaatcctaaacacagtcaaaaccccccaaaaaagccctagcaaccaaaataccaaacttccagtcgcaaagcaacttgcccaacagcaaaaccacaaaagcaaacacaacgaagaaaagccaaaggtaagcgcacgtaccgagtgtaaactagaaaaatagagttgaaaccgcactgcaatcaccgtcacaacgcgaacgttgccagcagaaaaccctagagcttccctcaagaacgacggtatgcagaaggtagaagagaaagcactagcagaaaaaacgcagaaggaaaaatgcaaaaggaaggaacagtctgctatttatagcgagacaagcctctcggtattttaaacgttcagctgcaccattattccaaccgacacgctgcctgggaatacccagagtcgaaggctcatcataaatgtttttctgtctcttcgcccccgctcgccacgtggtccaatcaagcaaaaagtaacctcagtttcaaaagcaccaattattttttaacccgcccattttgctcaggcaaaataggcaagttaaaaagggggcattgtagggacccctccccctaatgccacgtggcacacattccctgatgacacgtggcacgcatttctatctggatcagcttcatccggatttccccaagagtacacgtggcgcgctctcttatccggactccctcaaggagaggcacacaacactcacaaacataacatccggacgaccgacatatcgcatccggacgattgacatatactatccggatatgttcatccggatctttgactgaagtgagcaaatcttgcacgtcatcacaacagcctgccatggcccacgttccgccacttgcagagtgagatgacaggaatgaagtgatggcaagtcacttcccacgatctctgacaactgcggcgcctcccacgatctctgtcagccgccctatgagtgatgatggccctgccaccacctagaggcatcatgacaagccaaaatatctccctaccattaaagagggaaacaaagctcctgatacgatatatatatgaaccttcacacaaagaggaaggtaagctttctatacctagtaaaaggccaactgatttatctctctgaaccatggctaacaaaaccatcggagggtgcgttcggacaccctatccgaacgtcttttgcaggaacgactgaaccaggaatctatattggttgagatcgtgcatccatccatttggaaactacgtggatcactagggacgcgaggcctcaacagttactgtttttgcatttgctggatcttggcttccc

SEQ ID NO: 12167 - DNA, 13371 bp, Vitis vinifera
  Intron number 1 from transcript GSVIVT01035922001 (locus G SVIVG01035922001) derived from phytozome v7.0 (chr-ID chr4 ; pos 5890345 to 5903715)
tttgttttctttttcctgcacacgtcaaattaatgaataaagatgaaaatattgagatatatgaccataaaaattaaaattttatcttaaaataatggatgataaaaatcaaaattttatcttaaaataattggagacaaataattttaataatggatgataaaaatcaaaattttatcttaaataattggagataaaaattaaaattatttatattatgagaaggtatctcaaaataatttagaaagtaagatgctaaaatattgaagtgcggtagatgatattggtggaagtacctacttcaacttcaatggctgaagaatctttcagtttcaattgatgagagatgattccgaagtctataatttctgataacgccaacagaatgaacattaaatttcctttacacgcattactgttacaggattgaacatcgctcaattttccgatcctcaatccacatttacaacgacggaaaacaactcctaattttcaaccacacgctacgatctccggcattgccacagtcggatgcaccgcgcacttcccctgcggcggtaacgccggcaatcccgccgaaaaactcttcatcatttgagcctcgtcattctctccatcgtcgaaattgagagcgtagctcaacggatcgtaactgaaatccaccgagttccggtgccttttccgcatacgagccatcaggttccggcacttctccttaatcaccggtaactcacgcgccgtcgatctcagccacgcggacgaccgtcctaccaaccgcctcttcgataacgatccggctaattccagcccccggaaacagcaacaaagacacatggaaaacttaatcctatgattcggcgattgcgccggagtatcaccataagactccatattgaaaagagtgagagaaaaagagtgtttgagtagtgagaaaaaagtggatatgattgatgagacaatgaggtggagttgttttggatatatatttataggttgatggaaaagagcagaaagcaaggggaacataatggataaggacgagagcgtaagatgatgcggctccccttgctggaaaaggccagataaaccgcgggccgggcgcgttgtggttttttctgattccgcgttcgcgggattttattccaattatgaatgaacttctatcacattttattcactttattttcgggttttattaattatgggtttctaatttatttccattactcgctcaaaattttgacaaacacataggtaagacatgagaattaattatatgaacggaaaaaaggcatgtgacattaatgatttcaaattaaatagtgtcatatgccattaatatgaaacttgaccatatcaaaattttaattaggaatgatacctcgcctacttttaatgagaaggtttgagataaaaataaatgagttcaaagtgggtttaataaatttttaaacccacccatcagcaagattcaaccaccttctactcgttgatgacccaatccttcattaatcctgcaaaatcgagtagaaaaacaaacacgtgcaccatccacttctctgccaatcccatcatcaaaattaagcgcataactttgcatatcataacgaaactccaccaccctcttcttctttctcattccatcttccataaccctgcatttcattttctttaacttcttccctatcttcgccaagcaattttctcttgatgacttctgcctctccaacaaaactacgtacgagccgccactttttccccgcagcctaagccaagaaagactctgaaaacagccacaagcattggcgtccatggccctctcatcgtcttcaacgctttttataccttctaattctgaagatgtagccgcagagactggtttttcatgtgggatggccatgaggatgaggatgagaatgagagagcgagggagagagggcgagaggctttgttacaaagaaactcaaagctacggtgaacactaaaataagggtatttggggaatataaatattcttggtgagttggtatgttactggaatcggatttggaatgctcacgtgacatgcgaatttggacggcgaatcagaaagcctaatttgattgggccgcgtggagagaatgagttcgggttgtgttttctggtggcgcctgcgtcttttgctattggtctgtcattaagatatctttacgggttgatgagatttcgtttgccggcccaatcgcagctgtacgacagttgaacctcaaacagctgcttggtcctgggccttgcttggtatgcacttactcataatgttgtacttgtcctcacgtatttttttaatttttatttatttatttattacttatttttaaaatgtttatttatttatttatttgttaaagatgatacattctgctaagaaaaatttaatgtaaacaaaatccaatctatcgtagtgggaagagttaatcggataaatgtaaggatggattctttctttaagaatgtgggatgttatttgtttgccccgtgagtaaaaacatcttcttttatttgtgtgttataataaaatttaaagaacacttttaaaaattttaaaaattatttataatattaaaaaaatgtatttttttagggatactgtagaccccctagaggtgacaagtttttgcattttggctattattattttattcatcttgtcgacccgaggatgagctgtatggagggcggcgagacaagactggaaaggaggactgatgtgggtggcctagggcagagaaaatgagaggctgccacgagaaaaggaagaaaaaacagagtaagctggggggattttcggaggagagttttttttggagagaaaaggagaggaaggattttttaggggacggaaccagggagagctatcgaaggggcttttcttcaggcgggttccagaggagatggacaggagagaagcgagcaggagggatttttgatcagaggagagagcttgctggcggcgagaccacttcgactccgttgggggaatctctcaggtttgactttccggcacttaggttctccatttttacagtcacaccatgcctcttattgatctatggtttttatttttatttttgctgttggtatgtggatgcttgttttggccatcaaaggtcccgtttgtttgatttttgcttcacttgcatgagttacataagggatacgctgctgttcatgtgttaaatccactcgaaatttcctcctagctctcaaatcttttcgatcttcatgcatcctcttctaccaccgtcctagttgttattgtcttggagaagattatcgtcacccttagatctctctccaaacctccctcacccccttccacgaccccggcatcctccactctgtcggccagcattccgagggtcacctccggcgcgcccaggaggcggcgactgctgctgctgcatgccgccatagctgccctccagttcgtcgtcggattcaagcgtcattcggatggcggcaattgaggtgctgaaactccagccggtgccggtgatattggaggtgcggagatggaacctgagaagcccatggtttctcttggagacctttgggcggagaagtcgtgggtggcagcgcctgcatgggagatgcccgcaatggctaatgggcttgagggcttaggtgattttgctgttggttttgagcttgtgatgaagcccaggcccaagcgaaaagataaaaaaaaataatgaagaagagaaggcctcactgagttattcacccattttaaaattggcccatttgcttgcatctactttatatgaatcactttctttaaagcactaatttcttaataaattttctaacttccaattccccagcccaatttataaaattttaaccttcaaataatacttcaaaattcctacatttaaaattcaattccaatttccgaaaattctcatactcactttaatttatttaatcactaatactttattcatttattttaaaactccattcttaatctatttatttaaaatttctgtttgccgaattaaattccgaaaattcccattctcactttaatttatttaatcactaatactttattcatttatttttaaaactccattcttaatctattctttaaaatttccatttaccgaattaaattccgaaaattcctatactcacttcaatttatttaatcactaatactttattcatttattttaaaactccattcttaatctatttatttaaaatttctgtttgccgaattaaattccgaaaattcccattctcactttaatttatttaatcactaatattttattcatttatttttaaaactccattcttaatctattctttaaaatttccatttaccgaattaaattctgaaaattcctatactcacttcaatttatttaatcactaatactttattcatttattttaaaactccattcttaatctattctttaaaatttccgtttaccgaattaaatttctatttttgaaaattccaatattcacattaatctatttaattattattgttttatttattgattctaaaattctattctaaacaattcatttaaaactttcgatctccgaattaaatttctatttctgaaaatttcaatattcatattaatttatttaattattattattttatttatttattctaagatttcattttaaatcattcattaaaatttccaacttccgattttaataattccaaaaactccaatattcacattaatctatttaattattattattttatttatttattctaaaattctattttaaacaattcatttaaaactttcgatctctaaattaaatttctatttctgaaaatttcactattcacattaatttatttaattattattatgttatttatttattctaaaattcaattttaaacaattcattaaaatttccgactttcgattttaatttctaattccaaaaactccaatattcacattaatctatttaattattattattttatttatttattctaaaattttattttaaacaattcatttaaaactttcgacttccgaattaaatttctatttctgaaaatttcaatattcacattaattcatttaattattattatgttatttatttattctaaagttccgttttaaacaactcattgaaattttcgacttttgatttaatttctaattccaaaattccaatactcacattaatctatttaattattattattttagttatttatttcgaaattccattttaaacaattcttcaaaattcaaaattcggaacttaatttccaatttccaaaattctaatttcttttaaatttaatatctaaaattccaattcttaaatttaattctcaagactccaatcttcaaataattttcgagactccgatttccaaataaatatccaaaatactccaatagttttaattccatttcagttcttaaataatcttctgatcttcttgattttacataagcaataatgaattcttcataattctaaaacacggaattttttagactagttcatgaacaataaattgggcatatgattgatccctattgattgtcaactgttgtgcttgatatattttgctcgatcttcattttgcgctccgatatgcatgagctataattcgtattcgttaattgtgtactaatcccgtttcttgatagcgcattgtggcttgtggctcaggtacgcatagattttcattttgatcattctctatgcatgttggattttcatatgtgcatgatttgacttaggcatccattgactttcttattgattgccacgtcggtttcattttattagtagagacccgtctttagggacttagaggggtgctacggtttttaccgtaccttcctgataagtaacctgacccccgaacccgatccggtttttcacagaccacatttttcaaagtaaggagtcacacttagggtttttctttcttattttgtttaccctttaaaaataaaacaaaaataagtggcgactccaagtcagtttttaattaataaaagtcatgttttttaaattaaaatcaagctcaccatcgagtgggaaacacattgagccgaaatgcggggtccacagatacacttgataattaattttttttaaattttttaaagaatatttaattttttttaaaaataaatcatacttgaaataacctaatctttcttttgagattaaatgtgaaaaatatacccaaaattaataacataatataaccagttcagattattatggattttttaaatgagaaattttgaataatgatcacttgaaaccgtttcaatcagttttgtcgatttgattcgattagttttattggttcaatcctcaatgcaatcaattcgaactgatttcattctatcagttttattaattgatgtttgttttctttttcctgcacacatcaaatttattcatgaaaatattgagatatatgaccataaaaattaaaattttatcttaaaataattggagataaaaattaaaattatttatattatgagaaggtatcttaaaataatttagaaagtaagatgctaaaatattgaagtgcggtagatgatattggtggaagtacctacttcaacttcaatggctgaagaatctttcagttccaattgatgagtgatgattccaaagtctataatttctgataacgccaacagaattaacattaaatttcctttacacgcattactgttacaggattgaacatcgctcaattttccgatcctcaatccacatttacaacgacggaaaacaactcctaattttcaaccacacgctacgatctccggcattgccacagtcggatgcaccgcgcacttcccctgcggcggtaacgccggcaatctcgccgaaaaactcttcatcatttgagcctcgtcattctctccatcgtcgaaatttagagcgtagctcaacggatcgtaactgaaattcaccgagttccggtgccttttccgcatacgagccatcaggttccggcacttctccttaatcaccggtaactcacgcgccgtcgatctcagccacgcggacgaccgtcctaccaaccgccgcttcgataacgatccggctaattccagcccccggaaacagcaacaaagacacatggaaaacttaatcctatgattcggcgattgcgccggagtatcaccataagactccatattgaaaagagtgagagaaaaagagtgtttgagtagtgagaaaaaagtggatatgattgatgagacaatgaagtggagttgttttggatatatatttataggttgatggaaaagagcagaaagcaaggggaacataatggataaggacgagagcgtaagatgatgcggctccccttgctggaaaagcccaaataaaccgcgggatgatggcatgcggctccccttgctggaaaaggccagataaaccgcgggccgggcgcgttgtggttttttctgattccgcgttcgcgggattttattccaattattaaagaactcctatcacattttattcactttattttcgggttttattaattatggatttctaatttatttctattactcgctcaaaattttgacaaacacatagccaagacatgagaattaattatatgacaaatggaaaaaaggcatgtgacattaatgatttcaaattaaataatgtcatatgccattaatatgaaacttgaccatatcaaaattttaattaggaagttcagagtgggtttaataaatttttaatataaataaaatattactttttataaaaagaaattataaatattttataaaaaaaaattattttaaaattaaatttatttttaataaaatttaaaattcttaaaattttaaaaaataaaattaaatgagataggatgagtataagaattttgtttcacacacaatttgggtctcaagtttttgcatatgtgtggcacctagacacactctaggctagcctttctccaagccacaagatgtgttgtattttattgatcaccaacaaaatacaaaagaatacaaaaggttatttggcaaggactctcacaataagcatcaagtagttcacttgtttttttgaaggcagttgtaccaagtgaactagtgtttgagtcctagtctgacccaaactcaaactcaacggattccacattgagtaggacttcgagtcttactctatcccaacttctcgtgccacaagtctctatctccttgtgcatgaagacttagtttcccatcctgattgggagtctttgtgtgtcaaagttcttctcctcctcagttccctagtttgactaagagtctcatgcgataagagtcttacttatgcaatgcattagcacactacaccttgcttaggctcatattgatgctaagacatatcttacatgactcgtgtgttgctgttttcatgcatgttgggctcacacatcaactctattcaaagatcctcatgacattttcaaatcttatgataaattctaaaggattgggaagttgacaaagaaacacatgatgctacttaaccctacattggtagttaaattgtttgatgtatggagaattgatttcattggatcaatttcatcatcttttagatattcttatattttggtacgagtgtgctatgtgtcaaaatagttggaagcaataaattataagcataatgatcacaaggtggtggtaaattttttcaagaagaatatatttacaaggtttagagtgccaaaagttattattatggagtgatggaggtagtcacttttgcaactagtcattcaacaaccttcttgctaaatatggagtgaagtacaaagtaaccacatgttatcatccatagacaaacgagcaagtggagctcgcgaaccatgaaatcaagagcatcctgataaaagtagtgaatgcaatcacaaggattaggttatgagactttgggtttatcgaactacctttaagacaattctttggatgtcaccatataggctagtttttggtaaaacatgtcatttacctattgaattggaatataaagcatggtggactatcaagaaattgaattttaacgttcaaaaagcaggattgaggacatttctaaacttgaacaagatagaagaattaagaaatgaagcttacatgaattcaaaattttctaaaggacaaactcaaaagacaacataatcaaattgtccttagaaagcagcttcaagaaggacaaaaagtgctcctatatgattccaaactacatatatttccaaaaaagctcaaatctcaatgaaatgacctatatttggttcataaggtgctttcaaatggggttattaaaatttgtcaatccaaaaagtggaattgcctttaagatcaatgaacatcaactcaaggaggaacttttcctccttgatccttccatgacttagtataatttttttagaggggttagtcattttaaaatgactaattatcccaattcttctattttttttttcaatttctttacacttcattccatttgtttcaatttttctttctttttctaagcgcatatatctttttttttttggtgatcttgtaacactccataaatcaaaggaagaaggaatttccaagggtctaaaagctcgaaagatgacaatttggagaggacctagtgcaataagagtaccctttgaagatttcacatgactatgcaaaatcaccaattctacgtgaagttaaatgaatttttttaaagctttgaatgccaaaatctcatacctttggtatgttttgcaggcccatacgaaattagaagatgctatgtgaaaacaaagttttagagatatatttgaaagtgaaaatattcatctctcaagtctactttgcatccttatgtgaaattgataaaagttatgcaaaattgataaaaattgtgcaaaaattgaatattcaagtcctcttggaaaaacaaaatatgatggctcagatttgttttgcatggccatgcgaaaagatgaaatactaaagcaaagtgtcatgcatttgtgagttcatggaaattcgacaacctcattatgcatgtagtaatcagcatgccatgaacaatggaactattctcaagaggtggagtttgtcatttagtgccatataaaattcaaggaaatatggtagtgcttatattaaaatcaacaaccttgtgaaagattgaaaaattcagcaactatatgagttcggttttcatatttttaagtagcaaattttgccattttgtgacccatatattgcagtcacacatgaagatatgttcagaggtgcaaatggcttgtatgaagaataattctcatgcatttcaatggctttttcaaaggcttttcaatgtagactgctacatgtattcactcaggttgtgcgatatcctcaatggcaccacttttgttgcaattagtagcttaatgtgaaacttccacaaggtttcctaagtctttttcaaagattaaaaattgaaagtatgaattttttttttcctgaaaataactcttcaatatacttttgaggaggtttggtcaaattttttccctaaatgcaatatttgaaaattaggctattatggctaattgttgaaatttctttggaatgttttattgatttagctcaatggagtaattaattcggtgttattcacttggttatttggtttatcatatattggaaattcaattgaagatgtgatatgctaattcgttttgtaaatcgaatactattttaagtaatttttgaatatgatagagctagatttttacttaatttctaaatgacatttattttaatcttttctagaaatattcaaatataaatgatcatttgttcatttagaaaatttccaccaattatgcttatccatttgttttaatttatattgtctaaatttcatttcaatttgctacagatgatagtaaaaaaaaaaaaagaaaaaaaaatactattgaagaatagaataaagaataggttgtatacgatgaaaaaattgagatttcaatgcctacagtaactcctattaatacaatggttgccatttgagaatctcactcaaattagctaagaccaaagccaccaaaagacatattgttgcacaagcttcaattttagaaaaaggaaaaaggacattggggcaaccatataaaattccaatgaaaagaaagaacaaaggaaaaaagaaaaataagaaatatgtttggcataactcggaatagaattttgaaaaaaaaaaaaagactcaacaagcgcgtagatatcaaaatatagctcctcatgaaatggtctagtaaagcaatcatatggtttaaatggctaccctaatgtcattttttcctttttctataactgaaacttaatgcaatagtatatcttttggtggtcttggtcttagctaatttgggcagagatttgcaaatgacaaatgttgtagtaataagagctactataagcattgtagtctcaatttcctcatcatgtctaaccaactctctattttgttctttagaactctttcattttcttactaccatttgtagcaaaataaaatgaaatttaaattatataaattggaacaaatggacaagtataaatggtagaaatttcttaaatggacagatgacaatttattttagaatatttccaaaaaaattaaaataaattccatttagaaattaagtacaaatccagctctattagatttcaaaattactcaaaaatggtcttcagtttgcaaaaagaattagcatatcacatcttcaattgaatttccaaaatatgataaaccaaataatcaagtgaataataccgtatcaattatttcattaagctaaatcaacaaaacattttaaagaaaatttaacaattttccaaaatagcctaatttttagatagtgcattcaaggaagaaattacaccaaacctcttcaaaagtgcaacaagagtaatttcaaaataaaaataaaaattcataccttcaatttttgaacttcgaaaaagacataggaaaccttgtgcaatgaaatggcgagtggaagaatttgtaccaaagttttgttgtctagggcaaatagaaactctaaataaattagctgtaaatgtttcctatccatttttgaacacttttgcaatagttaaggtaacttcaaacccgattttagatctccaatagcaaggttccttaaattatgaggttaaattgcatgttgctcctggcttgcataagcttaaaccacttgtagtgaaaataaaaaatgtttgttaagttaaaaatcataaggactttttagggacaaaaaaaaaaaaatgcttacaaaactaaaagtggaaaaaaaaaaccctagtattggcaaaagttagagtgaaataaataaataaattatgaacaacataacaactcgatcccttcatcggtgtgtaagtacattggggttcattccaagtttactcgtagccaaaaaaaggtatgtattagaaagaatgctttaaagaattaaatgaaattggaataataaacatgacaatgcattattgcggcaaaatgtccaactaagtaaatcaaaacaattttagagttaacttattctttatctatattttatttactttataatactatcaaaattttaaaattgaaggtagtaaatgttttttttttagtaccttagtattttttaacaatttttaaaagttctttttaagagtttttatattgtatacttttgcttttttttttaaaaaaatggaaagaccgatgtatcaaattaacactcgagtgtgtttgataaaatataatatttattacttaatgatttaaattgaattttaagataaattattatcaagttgttgaattaaaatttacttattgatttatattttttaaatattaaagatatttagtaaaattaatttaaaattgattctaaatcaccaaatcaccaaattaacgtattcacccttgttaattttaactaaaatttatcttcattgattttaactaatatttattttcaatggttttaaataataaatttatttattaaaaaaatttaattatttatttgaatgtgaaatattatttttaaatttaaattattatttttaaatatatttaattaattcaatgatttaaattaaattattaaattgatttttcaaatactaaaaataaaacaaagcaaagaaaaagcggtcaatttaaatataattttcccaatattactatgcagaaattaaatgccacttaaaattaaaacgacgccttccagagggtactagccgctgaaacactcccccactttac

SEQ ID NO: 12168 - DNA, 407 bp, Vitis vinifera
  Intron number 1 from transcript GSVIVT01007742001 (locus G SVIVG01007742001) derived from phytozome v7.0 (chr-ID chr1 7; pos 9687253 to 9687659)
accacctactcctctcctctcttaagaaattagtctgtccatagttcaagtgttcatgcatttttaatttgtatttcgtagatttgatcttacactattctgcagttctgatcatctccatttgaattatcagttgatcattctgaagaaacccactattcatttccttgggtatttttcaatttgcatgcatatatgctattaggctttcccttaattttcttgaagtccaaaggacaactacacgcatgcagctttcagattcctattgaaaaaagtttgaattcagaaacggagcttcacaggaaaaaaaaaaaaaaaggaagaaaaaaaagggaagctatatatatcagtagcactactaatgtttctcacttcccaattttcaaaatttgcagcaacacaac

SEQ ID NO: 12169 - DNA, 13382 bp, Vitis vinifera
  Intron number 7 from transcript GSVIVT01038788001 (locus G SVIVG01038788001) derived from phytozome v7.0 (chr-ID chr1 2_random; pos 922667 to 936048 reverse strand)
cgagctgcccttcatagtctcttaaaggtatccccaaaatctcatttgcatgattatcgcatttccatcctgtgtttcagtaatgctatgcattcctgttctactgtattctgtttttgtaatcaggatgcctttgtggcataatataattatcctgataacaatacagaactaaaagtggttgatgaaataattgtgacataaatgttacaaataaaaacctttagctcattctagatgaagtatgattctcatctgacactttatttttgtccttagaaagttgtagtggtgtatgataaacttgtagctttaaaaagaggtgggaatagagactagaccagtgttgtcaaaagcaaaaggtgatgtcaaggtgataagactccttttagcctaaggtgaaaggcgaaaaacaaggcaatagcctaactattgtaaagcgataaaatatatacatatatttacctattcgatgctcaaccaatataagtgttgtcttcaacaatcaacactattaatttttcatcactcacaatgccttataaaattaacaaaatagtaattattattcaaagtatttaattttatatcccatattataaaaaacatcatattgtttaaagatattcaccttatctaaatgcatattctaatttttcaaacatttgaagagcaaaataaaaaacaaaataagagattgaacattctagagaagccttaggcatcatcatcaacatagtcattgttgaaatcaaaattatcatcacttccatcaagactagattgataaggatacttgggcggggaggtgcatggggctttcgcaggctgttggggatgaagtagcgtgctctagtggttaagtcggagaaagggaggtggttgttgactctgacttgcatggtttgggtgttgctaggggtgcaggagaagttgcaagagaaggtgggagggggaaagcagttgttaaggaaaggagctcttttgcagttgttggagagagattgagtgggtaggggagtgggcctaaagacaattgggtcggggttggtaaggagaggtgtgggctggttttttggagcccaggggcccagataggaatgggcttgtggcccagttgcgttttagagtggaccataaattggtggaaaaaggagttggtgggcttgtgtcttttgtggaagagggccaccctagttgttctatgttgagcctagggggcctggtcctggggaatgttgatggagatttaaaaaagcctagggctcctggaggaatggatgtcaacttggagcgaagcatcgatgaggagattctcagtgttgcgttgactgttgaggcgattgttgcgcctgtagcggatgaatccctgtgggaggaagcttctaggtactcctctcttgtgcctcgttctcttcatagttgtgggggtcgggattctccttctttctttggggggaataaggcgatggtggttgttgatttgggctttggggcgctcgatgggttggctgatgaggatgggttgacccattgagggtgatatgggcagatgggggggagaggggaggtttatctgagttggaagggggggttgaggtggatggtggaaaaggttactggtgagagatttggaaggtgggttgaatgaggtagaaggaagtgcattggattcatcggtgaatagtagcttgtgtctttttgccgctatttggggatgcctaccaaggggtttgcgggggagtttttgtcccttatgaaaaggatgcaagagagaaaaaagatgaagggtaagttggttggaaaaagaaggaaagtctagaagacctcaagatttgaaagggaattgaaaaaacttgactgttcggtgaactacaatggtgtagagaggtgtgtgggggaactaaagcttgctaaatgaagttgagaatttttggtgcagaaaggcctgtggaggaactatagcttgctaaatgaagttgagaattttatcgtggaacatgagaggggccaatgatagtgataagagaaaggtgattaaggtgttgattaagtctcagaaagtggacttggtttgcttacaagagacaaagattcaggagatgtctaagaggatagtctggagccttggagtgggaagatgtttagagtggggggttgtcaactcgaggagagcctccggtggtgtgttggtgttttgggacaacagggtgttacatttgttggaggtgaagtggggattttctcactgtcgtgccggtttaagaattgtgatgatgatttctattggaattttacaggggtttatgatcttacacgtaagaaggagaggaaggtttctggggtgagttaagagttgttagagggccatggggtggtccttggtgtgtggcggacgattttaatgtggttaggttccctatggagtgcagtagaggaggcagattaaccttttcaatgaggaggatcttcgagattattgaagatttagagttaaagaacttacctttgtaaggaggacccttcacttggagtgatggcctgaatgatcagtctaaatcaaagcttgattggttttttgtttccgaggatgggaaggtcacttttcaagggttgttcaatgtgtactccctagattggtctttgaccattgtccaattctgcttgatggtggaggtttgaggagaggcctaatgtcttttagattcgaaaatatgtggttgaaggaggagggctttagggataagctgcaggcctggtgggaaggtcccaattttagtgggtttgcgagttttgttttggttgcaaagtttaaagccttgaagcttttattgagagactggaataggaatgtttttggaaaagttgaagtcaataaggctttggcttcaaatcaagtggacttttgggacaaagaagagatagctcaaccacttgctgttcatgagatggaagttaggagagaagcaaaggaggattttaaaaaatgggttctcctaacttatcaaaaaaaaaaaaaaaaaaaaatgggttctcctagaagaaatttcttggagatagaaatcaagggaagtgtggctgaaggaagagaatagaaacggtagtttttttccacaagatggctaatgctcacaagaagaggaattcgatggcttgagttaaaatcaacggtacttgggttaacagaggagaatgagattagagaaggagcggtcagtgcgtttaaggttctgttgtctactgcaggaaattggagatccgatattagtggcctttcctttacaagactggccttttactgaggaggtttttaaggctcttaagggttttaatggggacaaagcgctagagctaatggtttttctatggctttctgacaattttcttgggggtttgtgaaggagaaggtcatgggatttttcagggagttttatgaccacaactgttttgtcaaaagtttgaatgcaacctttttagttttgatccaaaaaaagggggagtccagcttaagggatttcaagcccaattagtttggtgggagggctgtataagtggttggctaaagtgctagcgaataggttaaagctagtggtgggtaaggtggtttctaaggcttaaaatgcctttgtggagggtagacaaattctggatgctgctcttgtggctaacaaaactatgtactcgattttgaagagcaatgagtgtgcggtgatgtgcaaacttgatatagaaaagacatataatcatgtggattggtccttctggctctcagttttgagtatgatgggttttggggaaaaatggctagggtggatgtagtggtgtatatccacagccaggttctccgttttggttaatgggacttcctcagactttttccaaagttctaggggtttaaagcaaggagattctctctcaccgtacttgtttgtgattgttttggagacatttagttgcctactaaagagagctatgaatgggggctttttaacagcttgtaaggtcaggggtagaggtggtgaaggggctcaggtgtctcacttattgttcacggaggatacacttgtattctgtgaggcttctcaggatccaatgacgtatttatgttagaccctcgtgtggtttgaggccattttggggttgagaattaatttggataaaagtgagtatcctagtgggatgtgtgggaaatgtggaggatttgactgtaaaacttggttgtaaggttgggagtccgccttcctcttacttgggattgtcgttgggtgtgccttttaagtctatggttgcttgggatggtgtggaggagaggttttaaaagatattgtcaatatggaagagatagtacatcgccaaaggagggaggattaccttgatatggagcactttggctaacttgcccatttattacatgtttgtactttaattacccaagacggtcagattgaggttagagcagattcaaagggatttcttatggaaaggtggggctcttgagaggaaaactcatcttgtaaggtgggggactatttgtttggacaaaaaaaaaggggggttgggggtgaagtgtctttttttgggataagtaaaggagtattgtattaaaaagtatacacgatgtatataaatacaaaaaccaataggggcgagaaaacacaaagaacgactgcaccctacagggaacttaaccaatccataaaatatatcaaaaagtaataccattccccatgtacactcttatcccaatcccaaaagatatacaaaaagaacttttgattgtttgatttatgctttccctatcctcaaaggctctcctatttctttccttccaaatagaccaaagaatgcaaagtggggcaatttccaagcatttttctttttttgcctaccgagcaactcttccaacttaagagcacccctcgcatagaagcatagttttaaaaggctaaattcacaaagtccttctaaagcctaaggcgcgggctttagtgaaatgaggcgcaccctagtttacatatataattttatatctctggaaaggtacgttgcttcttcttcttcttcttcttcttttgcatgcatgagatagggagccctaatctgggttgggccttttttttcaaatttttgttgagtcaaaactggttgagccctttttttttttaagccctaatatgggttggacctttttttttaaaaaaaaaaaaaaattgttgggtcaaaaccccattctgggttaggccctttcctttttttaaaaaattttttgttgggcaaactgtagcattttgggttgtagatgttctaaagagaaagggaccaaaacaatgttgttttggccctttcttctttaaaataagctgcatctcaaaacactgcgttttgacccaattaaaaaaaaaaatcaaaaaaagggcctagattagggctctctacttcgcctctgcaactcgtttaaggtttgtggaggaagaagaacagaagaagaagaagaatggagaagggagaagaaaaagcgtacctttttggggttttgtgcctagccgaaggtgagtgccttgcacgcctaagccacgccttcttcaacaggtgttgccccagtaaggcgaggcgtcgaaggttcgcgttgcattgccttgcgcctaagtgcgcttgaaacacgccttcacaactatgcatagaagaatgcatcactcactatacatgaaatagagaaaagaccagttgccataataagcttgctttcaggcaagggaatagaatatgatctcccatttcctctgtagccttacagatgtagcatctgttaggcatcctccatcccctccttctaagctggtcctatgtcaatatcttagcccaagttgcctcccaagcaaaaatgctaactcttacaggggcttaagagttccacactatactatgcgggaaagattctgctctcttgccaaagtgaagtaataagactgaactgaaaagactccattcttggtccccaaccagaccatgtcatcaatggtactcgaagcaatgaagtggttatgcaacctcccaaaaaaagaatcaacatcctccatctcccaatcattgaattgtctaataaaccttggaccccaactaccaccattccaaacatctactacccaagcatccttagaagaagcgatagaataagggcccaagaatgcatccctcaacaatatttccccacaccacctatcatcacagaccttcacttgagtccctgacccaacttgaagccttgttttaactttgaatgcctcccaactatttctgattgccttccaaactcctataccaaacctccctctcacctcctttgtgcaccatgccccttcctgaaccccatacttactaataattacccatttccaaagaggatccctttcctaaacaaatctccaaggccatttccccaacaaggccttattgaaaagagatagacttctaaaacccaaccccctttttctttctccgtacaaacaatcgaccacttaaccaaatggggctttttcaccaaatcccctcttcctcataggaagtctttttggatctttttcaatttggccgccactcttttgggaatatcaaagagggacataaagtaaatgggcaaggtagataatgtgctcttaatcaacgtttgtcttccacctttcgaaagatgttgtctttttcacaaagcaagcattttttggaaccgttcctccaccccttcccaaaccctattggacttgtaaggagcacctaaggggaggcctaagtaagtggttggaagagagcccaccttacaacctaaaacctcgacaaactcctccacattttggacattcccaacaggaatcaacttacttttctccagatttatctgaagacctgtgcaagcctcaaaccatataaagacctaactcaaatactatcacgacccaaattccgggcaacccaaaatttggcccatgacctcaagtcaaaggtttgaccctaagggtttctcttactccatgttggcagtcaaccaaaatactctgaaatttttttttccttcatgtataaaacacactagagttcccaccaattaacaacatactaatcaatactcaaaagcaacaagatataataattatcattacagtccaaaaataaaagttcacagttgaacagtttaatcaaaatagagtctcattacagcgcatagtccacagtttgctcaaaacaagttccagtaccacaaacacaataaacacaacaccctccactaggcctctccaggggcatcctaaagtcctccctgccccacctgtggatccttaggagtgatatttgcatctaaaaagatataaaaaggaaggggtgagcattccacattgctcagtaaggtgcctaacacccaaggggttaatgagaagtactaagtttcaatgagcacaaacaaaacattcatcaacattgatcaaaccactatttgaatctctataattatacacaattccaccatttttcaacaattaaatgaaatgcatatgaacatgtgacacagtcatacaatgcattgtggttctcgggttttcaccgaaggatatgcatctgcacccaaatacactccccattcggaatcttcccagggtaaacttttgggtctttcaccctagagatctctctcccttcttaattcgcctcacatgagactttacttttcatcactatttcatttttttttttctttttccatttcatacacttttcacaatttgtatcctttcttcacacaaccatgatgtaaatgaatgccatgaggttaattactctcatttatatgtatcatcaatatcattggaattacaatcatgctacaattctaaaatttcccaacaattccaacaatcccaataatccaatataattattttcccacaataaaatcaccaaaaatattccaacaatttctcaaaaattcacatatcaataaattataacctataccacaattttataattttccaaccattccaataatttccaataatcaaacatgattatttttccacaataaaatcacaaaaaatattccaacaatttctcaaaaattcacatatcaataaattataatttataccacaattttataattttccaaccattccaataattttagcaacccaaaaacaaccatttatgaaccaaacaaaattttccgaaatcacaaaaattccaaaaaattcccaaccatctaataaaattcctacaacacaaacattacctatttaactcataacgacaagatctacaatttttttccaaggaaaaatgcatttaattaaagttttagggttaggtttctttaccacagatctatgaatcagatcgttaaaatcaagatcggctactgtagaatcattcctctcgttgagtagaacacctcaaattttcaggcgaaacagacatcgtttggccgtccaaacggctgaccaaagatctggtagaaaacttttgccacttctccccttttctctttttcctttcttttctttatttttaaaaaggccacttccttggcttttaacccagccacaaccacgacccaacacccaaaagcccctttgaattattttatttttcttttgattccatttgctttgtttcatttccaattcatttcatttttatttttttttaattttttaatttttttataacacattaatttattaaacaccaactcaaaaatttatttttttcaattttattattaagcaatttaatttaatttttacttaattaattctaattaattttaattaattcactttcattttcgttttcatttttcatttccggaaattttcaatttctaaaatcttaagaaattttctaccataaggctgatgtgacacaaaattttcaacttgcctaattgaccaacaaaataattcgaatttcaccaatccaaaattaacacgtgttctccaatcacttttctttttgacttttcaaccaccactcaaaagaagacttttcaaattagaatttctaacgtggcctaaaaacgcgatcattacaagtactctagatttttcttgcttgcatcacaaaaaatgagagtatcatttgcaaagaataaatgggagacctctacacccacatcatgcctttccttaacccgaaacccctaaaaaaggccaccctcctttgccctagagatcaaacaagataggatctccatcactaaaataaacagataaggagacaaagggtctctttgtctcaatcctctagaaccgctgaagaaactaggagtgccattgaccaatacagagaagcggactgtagagatacaccatctaatccaacccaaccacttggagccaaaacccattttatccatcattgcaattacacaattccaatttacatggtcattcaccttttctatatccgacttgcataataatccactcaaattatcttttaagtctagaatcaatggcctcattacctatcaaactgcatctaagatttgtctccccccaacaaaagcatgctaaaaatccgagaccaaagtgcccaccacctttttgagtctgttagttagaactttggtcagcaatttatacaagcccccaaccaaggtaataggcctaaaataactctttagctccccctttcttaggcactgagactataaaagtagcatttaaacttctctcaaagcatcccatctcatagaagtcaccaaagaagcccatgacctcacttttaaccacatcccaatagttttgccaaaaggccaaagtaaaaccattcagacccaaagctttatctccacacaaactagacaatgttgaaaaaaccagtccctctatactcagcctccaatcccctgtctctgaaagcaacagttgaaaagcacctgccaccccctctttaatattgtttccccctctagtaaagcaccatatatccttaacttttctagaaaattcctcctcttacaagcattagccattttttgaacaattctagtatttttatccccttttagtcacaactctcttgatttctacctctagaatatttcctccaacactacccaatttttaaactcatctaccaccctctttttaacctctaattcctccactgtgagggttctaactcttccattgcatcccattgtcctaactgcgctagagcctcaagtttttttatagacacattcccaaaaacctccctattctacacttcaagatcctactttaaacttttgtgcttaaccaccaaaatatggttgtgggtcccatgaaccctataaccctcccaccacttcctcatgaggtctttgaactcgtgtgcctttaaccacatattttcaaatctgaatggaatctttccatttctaatccctccaccatctaacattattggtgtatgatcagaggctggatttggcaggattttctgaaccaaaccactgaactggtcttcctaatcgtcagagactagaaaacgatccaacttagaggctaaattgttgtttaaaccgccacagtatgcatactcgccatcggacaagggaaggtccttaaggctcaacttgataaacattgttggttgtttaaattttgtagattggttgaaactaaagtaaggagaggggtctttttgtttctttcctttcttgctagtgggcaatgtactttgctacgcctcctttttggtgctactaatacatgttttcccagttgcctatcgatttataaataaataaatattgttggttcattccttacaagcgtaagcttttaagataagtggtagtttaacatggtagttgagctttggttcttgaagatcttgggttcaaatcatgttgtttttttcttccctgatttattgaacccatttgtgcaaaggtcgcatatgggtggtgcattaagcgttggccagtctaataaacatggttggcccgtttcctacaaaaattaagagcctgtttgggaactacttcttagatttgaaaacatgtttggtaattttttgataaaaaacattatttgagaacttgttttgaaaatagggtgtttttttagcacatattttaattattttcaattgttttttggggggttgttttaaaaaataattgtacaaatatgtctttagattgaaaataaagtgctataaataaaaaaattatttttaagaaagatttgtaaacacaaaaatagattgagaacattccagagcttgtttgggaatgttttcaaaaacaattcttaaaaaatagttttttagaacaattctcaaaaatggttctctaatgttttctagaataaaagtatgtttgtgaacttggaatgttctcaatgttttcaatttttttaaagaataaattttatgtgtaatactatcattcttcatatttgtataattattttttaaaacaattcatagaaaactagtgaacgattaagatatgttcttaggaaacaccatattttcagagcaattcttaaaacccttttttattttaacaattgataactaaacgcgttttcatgtttttgaagttcccaaacaaatttttgttctataaaacatcataatttttttttttttcaaaaaaaataaaaaactattctcatatactgttttttgagaaccatttttgaaaatactcccaaatagaccctaggcttttggggctagtggtagttcaactaacctcatttctgagtaattgctttaaatttttaagagaggaaggatatcccatgatacatgttttgctaaggatacagtgtttagcagacaaaagttaaagtaggagttaactccaagttagcactttttagagatactttagaattacaagatattaggctgagtaggactaagacaagatatgtgggaacataattttaaatcaggagaggatatgggggtctgtctaaaattgatggccatagattacccaaagcaacacatttgcattatactggttgatcagccttaagaacagggagattgaagaggacgttcccatctatcatttgcagcttacagcaggatggatgaagtggataaattcctgttgtcatgcaaatgtggtagaaaagggaaaatttgtaaaacaactgtaagatgaccaatgttgtattctataaaacgttgataagttatgaaacagcatgttcagaatacaagataggttgttgagatggataattggtactgtaagaaaagatagaataagatgcaaatgtgtttttgaggacaatatgaggaaagttgctggttctatcatgttaagagaagatcacctataaataatgactcaatacaatttgtatgtgtaagggaaaaaatgaaaggtgaaaattatatggactaaggcagtgagccctgccagccaccccaacacacaacacacacacaaaaaaaaggacaaagattttatggtgcatatgaccctaatggagtcaaatggggaaatggaatgcatagtctggtaagcaatgaatatcccacctctttggtgaccctaataagttggggtaatggtttattgaggtgtgttgattgaatttgaatggaacaattcttttgctaatagacattctcatgacctttttcctctccctttttttttggttctattgatgatctgtgttttgagttccataaataaaatggctatgtcctgagtgcatatgtttttgtaatctaaatccaaatagagtttaaaaaaagaaaaaaaaaattgcccagtgttctagaagtttgcatcttgttccttagattgagctgatctagtgctactcagtcctctttagaagtgtataattcttctgcaataatttttgctgcatcaatagttgattcatctcttatccggttgtccttgaattacaaaaattcattggtatatcttgtggtccccctttgcttatcttttgttaatgctaaaattttagtcatgtccaagagttttcagaacttgtaaagatgtgttggagtgtcatgtcctatggagtgttcgacatggacaaggtttctccttggaattgtatgtgctatataatggaaagataaatgtaaactagaatcacaaggagtttgaatcaagagcatttggttcaaaaatccataaccatctgattgacttattgaaattccaggctagtacatgctgttgatgatctcttaagtacttatgttgattcctaaattcttttgccattttttttattgatatttcattcactttcttgattttttgagccccttactcttttacaatatttattggtataccctatgggccactatcttcaatctctttttttacccctcgtctcagg

SEQ ID NO: 12170 - DNA, 5896 bp, Vitis vinifera
  Intron number 1 from transcript GSVIVT01021447001 (locus G SVIVG01021447001) derived from phytozome v7.0 (chr-ID chr1 0; pos 5461997 to 5467892 reverse strand)
cttcaaggtctctgcctctctctctctctctctatttttcaaattggattttatctgaatttgaattgcattaatctgattctcttttggttgatggtagggagtgatcttgtgatctgtgggtttgttggtttttgaattgatcttattagtgaagtgtgaatctttgatcggaactgaatactaaaccctgtgaaacttcgtttgcttgatttctaggtatataattgagattgattttatgaattttcaaatttaacttgcgcttgtttcaatacgatctaatatttgacttttaggttccttttggattgttgaagcacctattcgctatttacatgaagattcatactataatattttgcgtttactagatttgattgttgtgaatggaggattagccaatgtaaggattaggtagggattgtgtacagcatatggtttattttctgaatctctttacaattgctgccgtttttaggaattacagagaaattcctttcctgataggggaggactgaggggaatataaaaatgttcatgcctcaagggtaccatgggttccaaaattggggactggaaaaggcgctttaaggaatttgtgctagaaagtcaagttgggttgtaaggttgcatgttctctatcaccaagcaaatgtagggtgttcatgcaaagggtgagacttgacttcttgcatatggtaaaaacgtgttgctgactaacttaccaagcataaaaaagttttagtgagatctgttttaggagcgcccattcttccaacatcagtgtttcaccttccttgcttgttgtcaaactcagcactaggctcaatactcatcttgactggtccagtaaccagcatattgtctttcctaataaattatgacatgcttccacaatataactaaaaagcattacatgatctggttgcttctacaaactgatcgagatctttcatatggaagtgccaagatgagtcacgaatgttcaagtcatcactactaagccctcttttgggataacttcccctttttggctttatcggaaagctgaaattgaaacccaaggtacaatttttaaaggacaatattggtattgtaaaagttttattaaacaggaaagaacttcctgcatgaactaaaatagagcttaaaaaaacaacatttttctagtttttgtatttgagttttttttttttttttaaaaccataagctctttgaataaaattagttaaacaaatataaaagcttttattaagcttaaaattgagcttttgggttcttaaaagttgatccaaacataatctaagcagccacttcttgaaacaataatattgttaagatacaccaaagaaaaaataaaaaagaaacagaaaataatgatcatgccactttgctgatatccaaatatgtgtatcaagtcatgcattgggagagtactttagcccataaatttctttttcttttatatttacttgatcagctctgttgaagaaagtatttaaagaaaagcattcttagtattgatttggtgagaagcaacaccaaccccatgcattcctaaacaacacacacctagcttgatatagttacaactcacaaaatagagccatgcaaatagaattaacttgggttcaacttctagagaggtttcagagaagtcaatttcaaacatttgggtgtacccagtgcaatgaaccctctactattttaagtggtgctactaaaatgatggtgtagtactttatagcatctaaacagcttccaaatgcatgtttatctggtgggtaatttgttgatttcctttatcattttgaataacgggttaccatcctcaaagcctttgttcatttccatcagcaggaagataatacatgttgataaggctttggtggtgaaattggaaattgtgtggggtgaaatggcactaagaagtaggtagataaagtttagatcataaaattgattattggatgctaagtagctaagtacaagaaccttatatagagcactctaaaagccaattggtatttcatatgtatcttttgtgctttgaagtggcttcaagtcttagaattaaactagcgaacaatgaacttattcatgtatgctttctagagcaggtggaggttttatgcttgttccttgatttcagagtagactagttctcattcatctagttaaggatcctgcaaggtgcttttttttttttaaagcaatatggattggatctatgaagggtggaacatgcaaaaaggcgtgtcttctggaaaatggtagtatctttgtaagggaagaagagtcacaattatcaagaataccctttctagattgactatatacttcatccttttttattcctacgttattttgcgttaggtgagagaggtttttgaaaggaaatgacatctgatcaactagtatttagctgaagataagggtattaagagttcaatgcttttaaacaaggttttgttggctacatgcctttttaggtttaccattgatagaaatagattctggaggaaaatcatagtgggcaagtttggcaccctaggttaggtgaggctttccctatgctactctcaatagcttccttcaaaggtgcatgggtagctgagatgtgggagcaaattggggagagtggatgttggaaccctaggtttttgagacagatccatgtctaggaactagataaagtggtgcaagcctttttcaagaaactataggcgttgtcgatttgcagttgtatagaggataagatggtttctattaagtctctctactcctctattgaaaattctgaggcattccccacaagcttggtttggaatccatgggtcctggtgagggtaagtttcttcacatgggaactactttgggggaggattttgacatcagaacgacttaaaaggaggtgatggagaattccatatagatgctatatgtgcaaaggtgatgaagaaacaactaatcatagcctccttcactattgaaagcagtcatgttatggcttcttatttattctccttttaaggataggatgggtgatgcacttttttgtgagagaggtccttttaagttggaatggttcttgtgtcaagaagaagaggatgaaggctttgagacttgcccccttgtgtttcttttggataatctggaaagaaaaaaatcagaaaacttttgaaaacattgaaaaagggaatcaggtaatcaagtgtacttttatgtatattttttttgagtgagttagattgtacatagatgatagctctttgtccacgatggacttcattgattggctaagctctaagtgaggcaaggggagttgttttttattttcccttagcttttttagccattggatgcctttgtatacgccatgtataccttttctcgccttttattaagcactttaatatatcctttctttacctatcaaaaataaaaaataaaaatagtgtgagagtttggcaataactatggaggttgatgttccaagtggtggagggtagggttgggtccaggaatttttcaaacagtgggctgtgggtttggcaggaactggtaatatgaagaaacgaatctaaaaaatatacaattctgttgtatattcaaattatataacaaaatcttagaattgagtactcaacttgcaactccttgattgcttagagaattacattgaaccaattttaaaaaagatatgtataaaaatattccccaaaaaaatataataatgataagtatcttcatcatacatttagcaaaatatgatctagttatgtatggtgaacaaaagaatgaccaaaaaaaaaaaaaggaatgaccaaatatcttgtatcaatgttctgcttgatgatcttgcaaataatttttttttttattatgggtttgatgatctttcaaataataaatattgtctaggagtgattctgaactcaaactgtcagaaatttctctttcaatggaaacaaccaagttatttgcaataaactcaccctctggcttgttcttgtctttggtgcataggtgttacctctcttatactccctgtttacatagggtgctcccttttttcaattggtgccttccaatgtatctttgtgtttgcctgttaaaaaagaaaaggaaaaaaaaaagggaaaagaaaaagaaactcatcctccaccttgttccaaggcatggttttaacaaatttaaaaaaaaaaaagaaaaagtcaaattctaggacataacatgatatatcaagtaaaataagcaactaaatagtgatagtgctagacaacatatatctatggttccatttcccaataacaaaaaacatccaggcatgaaaaaaagttaggagactctaaaatttcaatcttttattcaaaattactgaaaattcatgcttctttctaaaattgatttttataaccataccattttgggactctagccggggtcaaggaggttggaatctcagcttggctagagatttcaatgattgggagctggaccagataggagatatgctgaatctgctgagggacttcaggacttctcctgaggaggattctgtgagatggaaaagggaaggcaatggtgtttttggggctaagggtgcttacaaaatgctgattggctcctcagcttgtgacttcccgaacagacgcatttggatggataaggttccaacaaaagtgtctttttttgcttgggaagcttcgtgggggaagatcctcaccttggataagcttcaaaaaagggggtggcagctccctaaccggtgttttttgtgtggctatgaagaggaaaatgcgaatcacattcttttacattgtacagtggttaagactctttgggagattgccctcgccatttttggagttcagtgggtgttcccagagtcagttaaagaggtgttacttagttggaggggttcttttgtgggaaaaaaaaaagaaaaaagaccttgaattctatcccgttgtgcatattttggactgtttggaaggaaatgaataggttagctttcaagggggggtcgttagatattcagaaattcaaaaaaaattttgtatgtaatttgtggagttgggctagggtgtacattggtgaggaaacctattctctcttaggctttttggagtggcttgcagccacttgagggtgggcgaggtttttcccctcttttttttcagctctttgttttgggcctttgtgtatacccctgtatacatgcggctttttagccttttctaatatatttggttgtttatctatcaaaaaaaaaaaaaataaccataccattttgggtgtttgtgagccatgcaaggatttcttggttcatcatgctttgtactcgggaaaggagaacacaatcttttacttgttggggtttgttttgtttcttggttaaatccacacttatttgaagtatgcagtaatcacattactattcactgttgctcctataaatctcggttagacattgtgcactaatcaactgagggaaggaattcaactctgatcattgctaaggatggaaccattctgataagaccattaggatgatgattgtttctctctacctggatctatagtaatgatttggagcatccatagatatttttgctagtttatgttgggaaatcaactctgaattttctcacagtgataagctcaagcatgaagccaaggcaagttattacaaaaataggaacaaaaggaaatagcttgtatcactaaattcaccaaacaattaggatgacctttcaatattccttttttccttctgttatcttatcttttcattctttttttaacttgtaagccatattttttgctctcctctagggtttgatatgctcctttgaattaactttcatttattatttctttctacag

SEQ ID NO: 12171 - DNA, 1695 bp, Vitis vinifera
  Intron number 1 from transcript GSVIVT01021464001 (locus G SVIVG01021464001) derived from phytozome v7.0 (chr-ID chr1 0; pos 5699094 to 5700788)
ctaaacaggttttattccctacatagtgtaacttttgccgaaaattaatgttttagtacggtgggatttggagggaattgaaagaaactgcttagatatttttttattctattgcttggaacctattggaattcataatggaaaggaattagaaggtgattcagggaaatccattacaagtttgaatggaatttaatcacttgcattgacaaaacatttttgctttcacattttacacgcagcatattttaaccacgggtagaatgtctgagtgtaggttccttgccttcaattcctttctttttccttgttcactactttctatagttccaacaaaaactatatttgactactcgttctactaaagtaatgagaagtactggaaacctctagcaagtaccttcttacatgctttattaggctcatgaacaatttgaattttgcgtcttctgcggggtaagtttggaatgtgtttgacagtgattctagaagacgtttttagtctttctaatatttgaaagacgaaaattttcaaatgttagaaaagataaaagtgtttcctaaaatcacttacaaacggattcttagctatcatagtaggaaaacaatagaagaaaacttgacctagcagtaatgaaactcaggttttatgattgagtacttctaaatatattgctatgctgattgatacttatatagttaaaaaagatgatcgaaatctagtagtgatgtgaatatgtgcttgcactagtgaaagagtaagctccgcttgtgagtatcctcaaacttaagagtgtaacctcagggtcatgctgaagcccaagaagtactcatccaagggttatcagcttgatgattagccaaattaatttcaccctcaattttaaattgttagtgtggtggtaatatcttctatctggaaaatcagaacatgattttactcgtttgaattttggtcatatgctaactcttacgcgagtcagtactgaaacttcgcattggaattcaagccctaaagagaaggatgctggtagtttttagaattattttagaattacgagaaggatggtgaagagttctccatgcatcataagatgtccagagatttgactaaattaccttcagtcaactaaccccgcctctaccgttcaaaagaagatttgttttgtcctttgcacctactaaaatcatttaaacccctaaaataactttacaagaaattaacatatgagattggaattgaagccctgaaagatctcttcttgctaggactcttagcacatgaccagttgcttgtcagacaattgttagcagggattcactatattattcatccccttaatcccctatatcaaactcactctaccactcttgatgtctggtgacaaattctatgattccctccatttcaattaattcatcacattcatggaattccaaatccaaattaatatctagccctattcttccatatctttactaatcaacaaaaatgcgcccaaatctttaaatttgtaggcttattagcaattgaaatgagcatctccaagtattaggtataacggaacacttgcgtgagcatctctaagtttcacgggcataaatgaagctaggatagaggtcaacctccactgaactattgagcttgatacattctccatcttatttcatatttttgttttgcagcttttcgac

SEQ ID NO: 12172 - DNA, 4553 bp, Vitis vinifera
  Intron number 3 from transcript GSVIVT01020517001 (locus G SVIVG01020517001) derived from phytozome v7.0 (chr-ID chr1 2; pos 4897316 to 4901868)
gattcatgtccttctggaagtggcgcatcccgagatgtagagcaggctgagcattcattgctgagaattgttaacaaagaaggaaatacagtgttgcacgaggcactgataaaccgttgcaaacaagaagaggtggtggagatccttattaaggcagatccccaagtggcttattatccgaataaggagggaaagtcgccattgtatctagctgcagaagcacactacttccatgtcgtcgaggctatagtaaaatttaaagttgaggagcacatgaacattaacagagaccgcgaagccaagccggcagtccatggtgccattctgggaaagaataaaggtatgacctgcccctttctcaatctccatttaattctcctgctcttcttcttcttcttcttcaaacttaaaaaacaccattacaatgatctagagaaggaaatgattcaagctcgccacttcatggcactttaataatctgttgtttaattactaacctcatcttttcctattagacaataaagggaaaaaaaaaaacaagaagctacccactgactcagctctacggtatcaatccgaggtggcacagaattgtacactgtcatgtgctaaaaaaatttctcaaaattttatattgcttgaatatttaaatatatatatatatatatatatatcagatgagtgcaagtgatatattaataatattaattacataaaaataaaaaattaaaggatgggcatcacatgtggtacaaccccatgcttttaaaagcctccaattataaattccctctttggattttaaaaagggagaattgtcttttgggcccagctgcgcccaaaaattaacatttggtccatataactttcataattgatggaaaggatatgaaatgttaaaagaccaagatatccttcaaatttctatacattaccttttaaggacataaaatagtggtggactaaaatacccaatgacctttcacataaacttttttttttgtctttattacaccattattcatgcaaccataataattctattttaacaatttggatttttcattattttaattttttttataaataattgaatatcaacattattttctattttaaattataaataaagaaaaattatgttcggaagctattttaaaaaatactttctaaaaaatagtaatatgatttatattttttatattttctttttgaaaaaacatttatttaaaaaatgaaaactattttaaaaaataaaaattgaaaaccttgtttagtactattttttatatgaaaataataaaaagaactaaatttcattcattgattatccatttttattttttttcattagttattttaataaaaaaaaatatagtatgtttacaattaaacaaagaaattgatcaattatgtgttttttgtgggactatcttttacatgaaaaataattaaataactaaattatatatatttattactctttttaattttattttctttatttatttttaatcgaaaattttaatatatccataattaacaaagtaataaatcaattgtgcacattttaatcaattaaaataaattaatttctaatttaataaataaaatgaaataagtaaataaatttggggttatttctattttttaatatatcttatatcaatattttttatgattaaataaaatttttattttttatttctttaattccaaaaataaaatgaaataaataaataaatttagaattttccaactgatcttatattcatatttcttatggttaaataaattttttattcttttttctttatttccaaaaataaaaggaaataaataaataaatttggcttaaataatagtttttaagtaatttctttgtcttatttttaattacattttgcattgaaaataaaataaaataacgtttttttttagtcattgtacaaggtatttacactaagtgtacatgacaaatatactaactatacaagggtgtacaagactattatttgtgaaggattttaagtgattctaaaaaacttgtttgtttatttcccttaaccaatgataaatgacattccttacacacattggttaagcatacattcatctcatgtattttatctaacttgtatatggtcattttaataggtacctcacttatgatgattgtaaaacaaaattatataacaattttttttcctttttaaaaccaaaccgatgcaaacatggttaaccgacctattgttagatattcataaaatgatgtatgaaatttgagttattgtacaagggtattacactaactgtacaagacaaacttattaattgtacaagggtgtacaatactactttttgttaaggatttaaagtgatttcgaaaaactttcccatttttttccactcaaatattttttccccactcaaattctctcactcaagaattgtttcgaattttatttttaaatttcatcatcaaatttttgtaattgcatattttgtttttgtagttttagcaatgttctttctttccactattttttttttttttttgtgaaattttatccacatgaatctatatttaaaattataatcatatttatcaaatttttttactaagattatctttaattttttttaatatatttatactcattttttttaaaaatgaaaaactaattttttttgtaaacatgttctattacctttcaagtaaaaaattagataaatttcaaagtcaataaataaaaaaattaaataccactttcaataatttttagataaaattttatataatatattttatttgaaacttaatttttaaagtttaactaaaaaattgtattgacaattttcttgttgtgggtcaaaatactttgcattagtctatctagataagaaaaattattaatataatattagaacttcatatcttagttattttttttcaaccaatttatctttttaaaaattttaaaataaaaacattaaaaattaaaaagctaaaaagatatatatatatatataataaagtgaagtgatagttaattttaaaattttttaaaatatggttaatgtagaaaatataaaaaataagagaaaaatatagatgaaagggtaatataaatttaaaataaaaaatgaaaattaaactaaaagataaatacataaagataaaaaatatttggatgaaaaatcccaaaatttttatcattgcttttaataagagcaaaaagattcaatatctttaaaaatgaaaaataaaaaaatattattgttttttatttgacataaaatagaaatatatattggaataaaaaggaaaaaaaaagttagaaatgagtaatatttaatagggaatagaaaaggaaaaaaaaacacaaaaaaaattaaaattcacactcaggcatataagggataagggtattctaggaattaatgaaagacaatatccttcatcttaattttcatactttgtttgggtcttgggcttaaatatgggtggttgaaggaccaaatgttaatttttgggcccacctgggcccaaaacacaattctcccttttaaaaattctataaattttgttaatttattattgcccttatcattctcttaataatattgcagcagttaaattgatgaataatagaaaatcatgacataattaataattttttaaagaagaagaagaaggagccctaactatatcctaaagctcaaaataaaatcttaaaactgattctcataattgaaaaaaaaaattattaaggaaaatgattttctaatatgttgttttatcataaaaaatatgaaagaaaatgaaatataattaaaattaataagaaatttatataatttaaaattatttaatttttatatagaataattaaataagtgaaataaatttaaagtaatatataaaaatgacttattgatttaaactatccaaacaattcttctttctttgctctttttcttatggccctttttgcccccctctatttaaaccagccaatatgcagacaacaaagccacaacagcaaattttctttagttaattttaaaattttgtgatttagaaaagaaaattaagaattaggagtggggttttgaagaagaataagaagatgacaaactaggattaggattttgaaaacaaagatgaagaatatttacagggacggatttgggccgggaagaggagttataaacattattgatctcccataaattaataaaaattttaagtttttaggaacagggaatattgaagcaaaagctgaaaaaaaaaaaaaaaaagccaatagactttttctataattagttcaacagaaaaacataaatgtgttctcattttaatttcttttatatatgatgaaaaaatgccagagatgttgggaaaaatactagccctgaagatcgtccaccaaagagatgaacatggaaggactccacttcattatgcggcatcgattggatatcttgaaggagttcaaacgctgttagctagagaccaatctaactttgatcgatatcatagggacgac

SEQ ID NO: 12173 - DNA, 3996 bp, Vitis vinifera
  Intron number 9 from transcript GSVIVT01020822001 (locus G SVIVG01020822001) derived from phytozome v7.0 (chr-ID chr1 2; pos 1527655 to 1531650 reverse strand)
agagagatatttctgacataacgcacataattgtggtactgatctttctctcacttaactcataaagtttccagaatcctttctgagtatgatgatgctttttctactataggatcatttttgcattcaggatataattgagtgaattgtcttcctttgcattcattagagaaagctacatctggcttagtgtctagttgtttagtttttcacttcctcttagtcaaatcgccatctagaattaccaagttctaccgtctccttttattgttaatctgatattttaaatttccatctcttgcctcaattcttaagtttaaaggttgtaggaaatctccttttgagtatcaaggtatcatttaaatgtaactactttttttgtaaaaaataaaaatattattgaccaacgaccaaacatacagggatttataagaaggatgaacaatcctttaaagagaaaaccagaagaaacgaaccaaagccccaataataagtgcagaaagaagggaaaaaaaaaaaaaaaatctctcaaagaattcaatcccaggggaggagacaaagaatctaactctcctctttgactggatatccacatttttgttttttcaacccaagtcttcttaggaaagagactccttttgctctagatatgtgaaagatcatcctcatcaaatggacataatgataggcacctctatttcctttttcaaatcacaagacaaccactgtagaagctcttcaaccatcaggttcttgatcccttgtgggcagaccttgatgaggccattgacaaaaggctagacatttagcttcagtggaagacttgagtaacattcctcttttatgatctctgataatccttccaattcctacttggcttggagtccccagaaagcaacctcatagttgcagtttcactgtaagacaagagaatcttgcctcttaaatcctgaagagattaatgtccaatccatgtccttggtcatcaagagccaaagagatgtaagaaatgaaatctaccccatgcctatccttttcagtttcttatttgtcctaaaatgtttctagcattccttttcatccagttcactcaactgtagctaaaagatcttacttccctggactccgccctccttttcatgccaaagctgtcaaagaataaaatcatgaattttagaaatgccttttcaggctatgtaaaggatcaatgctgaataaaacaacctctgggaaagctcaagacaagtctagcaatggaggtataggtggctcactggttcaccaactgaacgtgtggaaaactttccaaggctaaatggctccataatatcttttgatttggagcatttcattggtatttgtgttcttgtgggtccacaatctatggaagagcttttacctttgtggaggctttggttttccaaactagtttggcatggtgggaatttgggctcactatcacttcttgacaagaactgttgggagggcatgggttctatttggttcttggaatagagtaatgggattaagaagccctagattcacccattcacattctagcatttagaaaagtaaatattagtatcagaaaaactgtttcttatcttattccaatgcatctcattcgaatatttggtttggacaagaatctgaaaccaatttttgacgagcattctatattaatacacacttttaaatgtggatgtagtcctgacaggtagtaactttcatttatttgaaataaataaatgaaagtatgattatagcaactttcatatgctacactaaacgaattgggactatttttccacccaaaacctcaactccaatacccttagagctgaacttcaagcttagtgttgttgagagcccttttctctagttccttccttcacgttgtgttctccatgaaaatgaatataacttgagcttgcccctcatccatatgaagaatgtataagggctctcctgggcattgaagggatcttgatttttcacttcactttaattggtcttttaatcttttgtcaacacttgatataattaaaaaaccaattgtatatgactaactctgttaaataaatgttactgtattccaaaatagtgaatattataatgagacactttcatgcaaaaccattccaatcaaatccctttacatccaatatgtataaatgttacttggtttccacataatatttattttttggactgtattatgtggaaacaaattgttttactaatttcataatttaatttattgttgtttcatttattctgtattttgagtatttgtataatgtgattctggatatgcatctggtaccacaagttatattgtaggtggattgtgtttgaggagtgttaatgtatgcatgagatctgagtcaccggtattttatgaactgattcagagctagtgcaaaagtgaaggcacattattgtcccaaagactgtagacatcaacctgcatgtgatagtgtggtctatgttaatcgtgggagttgttgatttagagtcaacatgttagtgtatttggtatacattttgtgaaatcactgatgagaacatatctaggaatctatattttgatgtattctcaccattgccaaaagcaaaagggagtcaagtttctgttcttaattgctttgattaatgaaagagcaacttcttctattgtccaatcctagtgacttggataatcgaggctagaaatattggaacatatacttctaaagatggaatccacttatcaaaagagaggacaatagtccctagagttattataggatttaattactggagtttagtctagtcagttcaataagaggttttctaatatgaaattttggtatgtatgaataaactctttatttatttctaaaacattcttctctgaaaagaattttattagcaattcactcattaatttaaatagtgaggaacgtgaagtataaattaccaatgggttgacagtaaacattatgtaagtcccaagatttatttatagatattgcatggtggtctttgcaaactaatgtagaaaggagttgtcataatattctctcaaaatgcaattacttttattttgtgggcttagttgtaattactgtcttctaattgtgttgatttgactgggagattaaagagtaattgaagccaagagagtgattaataccttggaaaagctcctgtaggttcttgagatttggttcagcaatctttagttcattttcttgttcttccacacaaaatgtaaactagagtgatgagctcaaggaagagagtgtggaagctagttgctttatgtttggtttgatatattttttaaaagaggaacagtataagttttgagggagcatagtaacttccaatttggagatcagagacttcctttttaaagcacttgtttcttggtcttggactcttgtggggattgaaaatgcttcttagatttcattgactacttgggtgtggcttaggctggtgtagggcctacttgtttgcttggtctcagactcttgtggggattgaaaatgcttctttcttagattgcatgggcttaggctggtatggggcctattgttatatataaataacaatgaagaactaaataaattgtgtaaatctactcacagtaaactggtagcaatatcacggtttctagtatggtacctggtctcattatatttggcatgttcagtctaaatatgttctgtgtagcacatctgagcatttctagcattatatgatttgtatatgcatgagaagaaactgaaagaaaacatgtgagtatgctttcaactgcatccctctttcagtgttgctgtcctttgggatttgttggtttcttaaaacaaattccctccaatcttgatattgcttgggatactgtgttgaaataggtactgattgtctccccacattcgtttaccatattcttgcttcggatttattggcatgcccttaatatggccacaatttttgtttggtagg

SEQ ID NO: 12174 - DNA, 6430 bp, Vitis vinifera
  Intron number 1 from transcript GSVIVT01026515001 (locus G SVIVG01026515001) derived from phytozome v7.0 (chr-ID chr4 ; pos 22392218 to 22398647)
gtgggtgccagggaagctttttgaaacgtgagttcttgtccttgcaactgaatttttatcgtaaaccatggtttctttagtatgaattgcttgcatagtcagcttttcctcctcatgaatgttttttcatggacaaaatgcaatctagctctgttgattttataatacagttttccttcatgctttataatcaacactgatttgattttatttgttcaaactacttcttttattagttaccaccttccttaagcttagttcctttatcatatgttaacttttcttctttaagtggtattattatctccattctctctgttgcaaaatttcactaataatttgtcataatctttctctaggaaatttggtgtatactaataccagaaggaatttcacataccaatctctaagatggaccatttaccaaattttctgttttttttttcttctttccaaaaacatacaggatatttaactggataagtaatcatgtaaaagaagttctattagtgcccttcccctagccattgccaccctctttttctgccttatttctcttctctaaaaaggctaataaaaactagtgtagtttggactaattaatttgtatctgaatgtgacttgtgggcagtaggtatagaagaagcaaacaaccatgaatgaaacccttcttgggtggatttaaaatttaatataattttactaattaattcatacaaacatatgctttgtgtatgccacaatgttggtacagaagaaagaagcacccacaaatggaacccttactagggtgaaaagaaaacatggcatgtcattttacatgaaacatataatccacattgataggagataaaagtggctttctaggtacttttccatcatattgtcacttctgcctgcttggattctgattcaccagtgagactttagcggaatcaccttttctccagttagattattccatttaatgaaatgcttgtcctagtctgtaaccaccatttcaggcttattacataaaaaaggaaagtagtgtgccatgtggccaatgtttcccacaattagctcgaaatcctggaggaaggggttgtggttgatagaaggccaaaaagcttatgattgcacctcacgtacatgaattttcaaattttgcaagcacctgtatcagagtgagttgattcaagttaaaaatagtaaaaagaaaaatgaaggccaaaagaaacatgaatcaaggtggtgagaaaaaacatgattattgaggatttaatgaagtatagaacccttgatagagctaaatggtgaaatagtattcatgctgccaaccccaagtagttaggattgaggctttgatgtgtcaaaccatacccaaaaatttatctgagcctctcaatccatcagcagttatattagtggatccttcattcgatacatatggtttaacagaggatgtatacaaggttatgcctcttggtgttttcttttaatatatatcatactactttcttttaaaagaaatggtttaacaaattgtatatgatgcaggagaggattcaggactttcagaaatggagtccattaagaataaagtgtactgtaggaatggtagaatatgtagtagggtacaaattgtaaaatggtataaaagcttactaaagaaacgggtggaaagaaaggaaggttgatatatgaaatggatgtactaggagaaattaataaaaggaatcacactttcgaagagctttacattattggcttgatgtacattggtggctcatatccatacatattaagctttcagggcaagtagttgtttaacatggtaccaaaattctaatctctccatctatttatttcccatttgttttttgagaattcaacacagtttcatttacctcttcacatgtgggttaggctgcgcatgaggggattgtcagcttgatatatattgctgtcccatcctctggctatttgagcttctagggaaagtggtaggttaaaatacatcataccaaataaaagaaactttgatttaattaaacatgttctaccctgaacctttttacttcctgtcatagtggaggttacttcagaggaaaatgtctattccttgaataattgtctcttgtacatgaataactatctaagttattactttctgtttagtagaattaactatcttatgtctcatcaaaggaactatttaattaacttttaaggaatatattattttgggaggaagaaaatacttcactaataattgaagtaattactttacatttaacaaaactaaaatatgtggtttttagaccttggggcttgttttattttcttttttcttttttcaaccattctctttttgtaggattctaatgattaattgccttcaatatggccctaaatggagcttaatggagctcccatatggatgttgatgatcaatatgattttctatatggttgttaactttatattttatggactcatggttgttaacgtgtgttttcagcatgcctaggcttaaggtgtagttgtggcacctttagggatgacaacaagatgggttcggaataggtcacccttatccccaccgcatcccatttatttatatctattttcatccctgtccaaaaaatttttaaaaaaattattaaatggagtggggcatgtataggaaatttccatacccacgctcccctacatcaccccatttaaatttttttaattttaaatcacattaaaaaataaatataatttataaataagtaaatattataaattttttataatatatttttataaaaagtaatttatttatttatatatgtttaaaaaagtgaaaaagtatatatatatatatatatataattaaaatttttcactcaacccgacttgggttttaaaaaatcttgaaccttcccctaacccatttattcacattccaaatccatcttattagggaagcatagcgggtacccaaaaaaaacccaccttattgctatccctaggcaccttgctttgcctgaagtgggatgcctccactcacgcgcctcaattggcttgtggcatgctaaaggcatgctcaccttttttttttaaacaaaaaccaaggcaaaacgacgtcgttttgttctttaagaaaagggaaattgaataggggcaagcaatgtttttttcctcttttcttaaagctgagagcaaaatacaattgttttgtacctacttttaaccccgatctgtgctcgagttaacaatcttttgtctcatcaaaataactatttagttaacttgtaaggaaatatattattctggagtgagtaattactttcactggcaattgaagtaattattttacatctaagaaatgtaaaatattgagttttaggccttggggttagattttttttcccattctcgttttgtaggattttaaggcttgcttgctttcaatatgtccctaaatggagcctaatggacttcccatatggttgctgatgagaaatacatctttttttggtaaaacatttatagcccatagtgaggtcttcacaaaatatatctctacaatgaaaaccttattttatggggccatagttgttataagtttgctgtcagcacagctaggttcaagttgcagccgtggcaccttgcttggcctcaagtggggtgccttctttcaggcacttcaataggtgtatggtgagctaaagggacacctcatcttttttttcttttgcaaagcaaaaaacaggggcaaaaggccatcgtcttgtcttttaaaggaaaaaaggaaaatgaacagcggcaaacgacgtcattttgcccttttaagaattagaagaaaaaaccacgttgttttgtctctgctttttcccccaaaatccagtagaattaacaatcttatgtctcatcaaagtacctattcaattaacttgttaggaaatatattattttgggaagaacctatttcttcactgacaatcgaagtaattattttacttctaaccaaagtaaaatatggtgtttcttggccttggtgctagatttcattttatttttaaccattctccttttgtatgattttaaggcttgattgctttcaatatggccctaaatgagcttaatcaagctttcatgtggatgctgattccatggtgaggtctttgcaaaataaatatctacaataagaaacttcatattttgtggggtcatagtttgttaaagtgtgctttcagcatggctaggctcaaggtgtacagcatgcttaaggcatgcctcgcctttctttctttttttttccaaaacaaattaaggggcaaaatgacatcgttttatcctttaaaaaacaaaaagggattcaaacaagggcaaacgatgtcattttgcccttttattacagcagaagaaaaaaatggtgttgttttgtccctgctttttaaccccaaaatccaacccacactcccctacttttgaatctaatagctttttcaaggcttatttcattgtccctgctttcaattaatttgtttcacataattataatgctattttcctctgagaaaaatatctacaagatgacaaatgatcctgcttggccagccaaatgctgaagtgctgtcccttctggtctagaatattattaggtaggattctgaagatgacatcaacacctattatgttggcacatttccctacttttgattctgctaatcaataatatgttactggaatcacccttccaggaggtagtactcaccttcaatagaatgatcatccttccacgtatccaattttacaaaccatttgaaaggaatggcagatagtttgccttgtttccataaactacctgaacttcactgtccatggagcacaagtgttggctgtcctgttgttctattatgctagtgagcacacataatcttactatatcattgaatcctgagcggaagcttgtacttaacaaacctgtcataaacttcattgcacaggtttgtttgacggaaacaagagtactaagttcttccaaaaattggcaatgctcataggtgtgggcaacctcattattagccttaaggtggatggggatatatagcatctcccaaagttctttaattctagatgctttgagaacatgagacaccctcatggcgcatcttgtcttgcaaatctgtggacaaatggcaccttcttgttgcttaggagaatagtaagtgtaaacagcagtctaaaccatggattcaccaaccctcatagggctgcacatcatcctcattgttgaccaacacttagccatctaaagcttaattccattggctgacacatgaataattctgagtgtggaggtatcctaaattttgtcaagaaaataagcatttgacaattattatgtggcctggtcaaaaacaagttccagcgtacaaggtcagaaatatataggattcttactctttttctgttttctagggtccttgaagtccaaaaaatttacctatgatcctgtcaatgtaaaacagtaagggtctttgaagacatggatctccatatcctgattttgcttttcaatgtagtaatccacactttttctagtacttagtcgatatctaattttctggccatagtacagattgagcttaaatcacgggcttcatctttcctcagcccttttctttgtagcccttttgattagatcttctggtggtgatagtgtgcaaccattacaatgtgggcactacatggacaaaattctttccacccacctgtaatcaaacttttgactcctctgtgtgtgtttgtgtgtggatgattctatgggcagaacctctagttattcgctactgagacttataattttcattagttttgaattaaatatttagttaattttgaagtctatttggagcagattttcattcttcaaaggactatttataggcctctgaaaggggaaaaagatagaaaaagagggagagagagagagataaccatgcatttatggatagcaagtctgtataaatgcattgaagagtgataacctccatgtttgtttcattctgagggtttcatcttcttttacaaccaccttataaagttcttgcacaccatatacttctgtgaagttcaatcacatacaattgatatcatgtgattgtaaaatggttggcaataaaactttggatatatggctgtcactgttagcctttattatttttatacttattatgttttgtatgtgctgtctgcacatgtcatcttcaacatagtaatggatttggaacctgcatctttagatgacatggtaatggatttggaacctgcatcttttttagaattttcccacaatgcattatctgtacatcttcctattatgcttgaaaatttatcctcaattgtattctggacaggggttgctatttccaggttggaggttcattgaggc

SEQ ID NO: 12175 - DNA, 5117 bp, Vitis vinifera
  Intron number 1 from transcript GSVIVT01029593001 (locus G SVIVG01029593001) derived from phytozome v7.0 (chr-ID chr9 ; pos 20983502 to 20988618 reverse strand)
tatttgactctgtgtcaccggaaaaggttattgtttttttgcccctttttttgtcttcagttcagtattcctttgaattttgttactactttgaacttcaagtcttatgcatgcacaaaatttacgcaaattctagttggttgatgaataacagattcttatgtaattaagcattaagtgtagtggactggtcatagagtaaaggtgattttgtgcccgctctagtttccaattttcatggggttcattgaatattattgctgtttgaacttcatatcttatacatgcataatgtttcagctgtacaaaagtcctgattaatggacaagtaactggttcatatttagtaaagcatcaagggatagtggataggttttaaatgcaggtgattaggttttaaattgcaggcaatcatgtgcccatatttaatctccgttttagtgggtttatctgaatattgtttctgtttggaacgtcaaaccttaatcatgcatgaattcttttgtgtttatataagttcaattcaattgataaatagaaaatctttattcaataaagcattaatggtgggtaattttgaaactcaaggtgatcttttggcagtctttgaattacaatagcaaatctccattttgtgcaggtttctttcaatttcaacgctgttttgaatttcattatcttaagcatgcatggaattttttggatttacaaaagttcaagtttctttgcaaatgatttttctttataagtattaagggacgtgggataggttcttcaatttttcatgttaatatgaagtttggaactgagaattggagggagaggaaaataagcaggtgaaaggaaaataggcagtgaagtaaatttcctctcttttttatttttattttttattttatttggagaaaggaaaatgcataaaggaaatatgcttttatgggtatttctcattgatgttgtaatcataaagaaaaaaaggtagttttgttcactggtgaatttacaataatacttaattttgaactgagaattggaaggtgagaaaattatacaaaagaaaagagagcaaagagctgaagtaaattttttcggcttgtttgattggtaggaaggaagatgtggggaggaaatatgtccaacatggattttagtcaatgctctaaagaaaaagagaaaaggtagttatcattagttgtcttcaatgggtgaattaatgatgatactcaatttggagtagagaattggaaggaaaggaaatttaacaagagaaaagtgaaaagaaaataaagtaaatttcctttctcttgtttgattggtagaatggaaaatgtagggaggaatatccctatcatggattttttttgttgatgttataacggaaaacagaaaaggtagttctactagttctcttcactggctgaattaatgattgtgatgatgccttgttttggggacactcagggaaaattagtttgtcagatcttgccacataggcagtagagtcagatgttaaagaaaaagtgtaagccgttaaacgttttttccgttccaccatttccatgttcccatgcaatccataatgtaactgttgccgtatactccccttttccaccacaacatataatgccaactcattgtaatctacttcattgttttcagaataacctattgaactccaaaaatagaaaaaaaattgcccacagatctcaaaccactagacagtggagcaacaaataattggcatgctccctgtccaatccatgtacaacacccatattggaatgattctatctttttaactaactgatccatgttaaaattttaactcaaagtgctgccatcatgaaagatccaatcaatctttgtgggcacattagtgtcccaaatctctttggctggaatattgtcttctcctttcacgacctgcttataatatgatttaagatttttttttttgtctgaacttgggaataattacagggcatcctcccttttgtttctttctctttattctttccatatgttctagccaaaggaaacaagaatctaactaatttccaattcttaaactatggagcttatgattctctattcgtaaagacagtggctgctttttcctttgcggtgatcaaaggaatgcaaagtatattccatgcataagtgttaaatgcatgcctaggcctgaggcacaatgattccctaactgtagctctttgcctgccaaggcacacaccttgttagagaggcacaccttgtctattttgttatttcactttaattgttgaaatttctaattgtatattgaaattttgaataattgcattatttttgtttcatgcttattttaaatacttggaatcttgattcttttttgttgcttggattgaaattatgaattatatttggtgataaatgagttaatgaaaaatgtttgcaagttcaaatttaccatgttttataaaattgatacaactaagttgcacctcactttgctcaagtgtgcaccttgggttgcattttaacttaagctctagaagaactttgtaccttaggtgcatcttgtgcctttgaactataattctatgtgacaaggacacatatgtctgatgaggatatgatttttttcactaagcatctcccaaacgaaataatgcagcgtctgctatggatctgaggtcttagtgcaattcttcaaaatgttctggaatacaaggaggataggaaaaaaggaaagcaaagaaaaagatagaaatgagatgctgttggtagatacattatcataaatgtaaaagcttccttttgcctattaaaataactaaatgcaaatacttccttttctgtgcataggattcaatcatgaaatatatcaatatatctacacatccttcaatatttataatattacaagtttctataaaatttcaatgttgatatataatcgtccaaatctctaatgtcatattgaagtatctatcggtatgatattggcattcttgtggaaggtgattcctgggttattatctcatgcacctccttgggagattagggccactgaagataaacaatggattagaactcatgctcttagtagaggcattgttcttttaattggagacctgaatcagctaatcaggcggttgactgtctggcaaaaggagtgctagatcaatagatatattcaatgggtttactaccctccttgaccattttgaggcctagagtgactgttttgtactttgtcctccctcattgctgtttatatatatatatagatcgtgaaggatatttcatcctctagtctctctttttattcataaattcttgtttcttgtcaagaaatggaaggggacctgatcttatttaaaacttctaatctgtgttggcaaacaaagatgatttttgaaagctccttgcatggaatgagattttatttttattttttattattggtcaatgcaccacttcttgagacccacaagagatactcttattgaggctgcaaaattataatcatgtggtgttatgataactcatagatgtcagcaacatttttcaagaattttgagaatattttcatgatgtcaagaatgtcataactatataagtgggataaagttaataaaatgggaattgttttttttttttttacctcactatttttatatattttctatttatgtttatcataaaaatgataatttattatcaaattattatctaatagcacaagatagcaaaaatcattatagacttattttatccactagaaaaatgtattaacaaaattatattatgttgtggaatatgatatcaaaaagaaaagttggaaacaaatagaaaatatgtaaataaattgtattatggttcccatcctcttagagatggagatgatgatttctagcccttagaatatctatgcatattgtttttttttattttattttttggtaggtaaaagcagttgtattaaaagcgcacctaatgtagggggtgcaaaagtatacacaatgtatacaaggcaccaaaggcctaaaaagaagagggaatctatgcatattgtttaagttaatgaaagtttgtattaagatggtgaatgaatttatcaatgcaacaatttgatgaatgctctttatatcctaattggttgttgttgtaccctatatattcttacattttttgggtaatattttttttttgataagtaaagagaagtatattaaaatgaaagaggagacaccaaactagtgccctctaggtatacagggagtatacaaaagcagcccctcgactctaaaccaaggtagcgggccgaaacccctacctataactaaagcctagccactaaaaaaagctaacaagagatcgcgggctcaaaactataaacaccctaacccatgaccacagattacatacaaaagaatgtttcaacctttggattgacaacacctcattcccaaaagccaacaaatttcttttcttccaaactgaccaaaatatacataagggggccatttgccacgcctttttacggattttccccacaaacgctccatgccacccaaggagagtttccttaactgtaccagagagaacccactccacaccaaagagacatttttttattttttattttatttttatttttttattgtgactctatattgatcattgcattctattttaattttcccaaaagttacattaaaggttttcatgttttactactttggtaatttttgctaatccctattaatatcagcttgatatgacatccaataaatattcttgttccttattctgatataggacagatgtttgattcacacttaattttagtcattatgatgttgtgacctatgaagtgcaaaacatatgcaagctgtgcagcatatgttgttttttgatgggtacccaagatgtaactattggtaaagtgcagcatttgctgtttttaacatctcacttctttcccatgaaatggaatacattttttataatgattagtgaagtatcatttctttatccacaggcaaattttcttcttggtggcttgagttctttttaatgtaattttttctgcaggtccaagctgttcttctgttattgggtggccgtga

SEQ ID NO: 12176 - DNA, 7741 bp, Vitis vinifera
  Intron number 27 from transcript GSVIVT01026355001 (locus GSVIVG01026355001) derived from phytozome v7.0 (chr-ID chr 4; pos 14852401 to 14860141)
gggcttcttgatattgtattggtaaccatcttaaattcattgttcaacagtaactcttttaagtgactaacatgggagggcaacacatttcagaagtgtgctggaaaattactaaatttaaatgctagcacaatctaaaaatgcattagataatattgtccgagtaatccatggtagatttatatatgtattgttgagagagagagaaagaagaaaaaccttaattctcattcatgtgattgactacttacaattgagaagtatatatatatatacaagcctaggagaactaactaccatacatgtaacctatattaaaaaaggaaagactgtacactatatatacattatattcaacactccccctcaagctggagcatatatgtcatatgcaccaagcttgttacaaatgtatttaatcctaggaccactgagagatttagtgaagatgtctgccagttgatcatttgaattaacaaaacttgtagcaacacatcctgatgcgatcttctctctaatgaagtgacagtcaacttcaatatgcttagtcctttcatgaaagactggattgcatgcaatatgtaatgcggcctggttatcacagatgagtttcatctgttcatcctttccaaatctcaactcttgaagaagatgtctcaaccatgagtttacatgttgccagagccatagctcgatactcggcttcagcactagatctggccactacatcttgttttttactcttccaagatattagattacctccaataaaaacacagtaccctgaagtggaacgtctatctgtgggtgagccagcccaatctgcatctgtgtaaccaacaacctgagtatgacctctgttctcgtacaacacaccttggcctggtgtgcttttgatatatcgaagaatgcggattacggcatcccaatggctatcacatggtgactgtaggaattgactaacaacactcacaggaaaagaaatgtctggacgagtaatggtgaggtagttcaatttacctacgagtcgtcgatatctcccagggtctcctaaaggctccccctgtcctggtacaagtttgacattcggatctataggtgtgtctaccggtttacagtctaacatactggtttcttccaggatgtctaaagcatacttcctttgggaaaggaccacaccggaactggattgagctatctcaattcccaagaaatacttgagtttccccaagtctttagtctgaaagtgggtaaaaagatgttgctttagtttctgaataccatcctgatcactacctgtaatgacgatgtcgttcacataaacaaccagataaatacactgctccaaggagttatgatgatagaaaactgaatggtctgctgtactgcgaagcatgccaaactcttgaacaacagagctaaaacggccaaaccatgctcgaggagattgtttcaagccatatagagaacggcgtaacctgcacactaaaccagactccccctgagcaacaaaaccaggaggttgcttcatataaacttcctcgacaagatcaccatgaaggaaggcattcttaatatccaactgataaagaggccaagaacacataacagccatggagagaagcagacggaaagaagcaatcttggcaataggggagaatgtgtcaccataatcagaaccataaacctgagtatagcctttagcaagtaagcgggccttaaggcgatcaacctgaccatcaggaccaaccttaattgcgtagacccaacgacagccaactgtagatttaccagagggtaaaacaacaagatcccaagtgtcattagagtgcagagcagccatttcatccaccattgcctgtcgccagcctggatgggaaagagcttcatgggtgctctttggaagagaaacagaggatatagcagaaacaaaagcagaataggataaagataatcgatgataactcaaaaaattgtaaataggatgaggattacgagtagagcgagtatctttccgaatagcaatgggtaaatcatcaggagaaggcagagccggggcaggagaagccgaaggggtaggaagtgagtcagcaggtgcctcagcaaaagggagaggagcagcgacacgagggcgacgatgataaacctgaagtggtcgaggaggcacgacatcagctggggagacaatgggaaggggcaagacttccgaaacaggaagagactcagaagtggtggaaaagaatggtgagtcctcaaagaaagtgacatcagcggacataaagtatcgatgagtctcaagggaataacaacgataacccttttgaagtctggaatatcccaagaagaggcacttcatggctttggcagaaagcttgtcctgtccaggagtgagaatatgaacaaagcaagtacaaccaaagacacgaggaggaaggaaataaagtggttggtcagggaagagaagggagtgaggaatctgatcatgtaagacagaggagggcatacgattaatcaaataacaagcggtaagaacagcatccccccaaaaacgaaaaggaacattattatggaggaggatagtacgagctgtctcaacaagatgtcgattcttgcgttcagctaccccattttgttgaggagtatgagcacaggaagactgatgaagagtcccataatgagacataaacgaagtaaatgaggctgaaaaatattccctggcattgtcactgcgtaacacacgaatagaaatattgaactgggtttggatttcagcataaaatttctggaaaatagagaataactcagctcgatttttcattaaaaataaccaagtacatcgagaatagtcatcaatgaaagtgacaaaatactgaaatcctaaagtagacgcagttcgacaaggaccccaaacatcagtgtggacaagctcaaaaggagactttgcccgattattcaaacgctttgggaacgagacacgagtatgtttcccaagctgacatgactcacaaggaagcgacgacaaagtggaaaaacgagggaccatcttctggaacttggagagattaggatgacccagacgattgtgaatgaggagaggagcatcagtggaaatgcaaactgcagtagatgaatctaaggtgaggtgatagaggccttgagactcacgtcctatgccaatcgtcttccccgtactccggtcctacaaggtcacaaatttatcagaaaaggtaatagagcaattaagagtacgagtgagtttgctgatggaaataagattaaaaggacattcaggagtataaaggacagaagtgagaggtagagaaggcaaaggaagggccaaaccaatacctttagccacagtttgagaaccattagctaaggtaacagtaggtaaagcagaggtagtagtaatagaggagaaaagatccttattaccagataggtgatcagaagctgcagaatctagaatccagggtccaagagaagatgtgtgggtaaggcaggcagaggcattaccaggctgggcaacagaggcaatagaagcctgagatgtctgagatgtagaggagctcggaggctgaggcagcggagaatcagaggactgggccatatgggcagtgcgaggaggtcgtccatgtaactgatagcaacgatcgcgagtgtggccaagtttattgcaataggtgcaatgaggacgttggcctctacctcgggtaccactgcgtcctcctcgaggtagtttgagaaactaacacagaagaatctgaagtgctatcagatggcaaagtctgagtggacgaaatacggaggaggcgagcaaacacatcatccaaggacagaactgatgaactaccaagaatctgatcacggataggctcaagatccggacggaggccaataagagtaaggaccatgaagaacttgtcaagctgtgtttgttgagccccaacatcaggagtaagaggcatcacagtcaagaattcctccttaagagagacaatctgaccaatataagtagatagatccacgtcctgttggctgatatggacaatagtagaagccaccttataaggacgctggatatcattcgtgtataatcctttggcctgagtccaaaatttaaaacaagttttgtaggcccgaagatgaagaagaatctgggatcaaccgattgccataatacactacataactgtgcatctatcttcctccactgtacgcggtcaacctcagggatatctgcctcctgggtaaccaagtgatcctcatatccttgacccataaaccaaagttcaacagaggcagaccaggaaagataattttcactgccaaccaatttctccgaagtaatcataggagattcagatatgatagaggaaaaaatagaagttttagtagccatatccacttgtctggagaatgaagtatgtttggatcgaagagagccctaatacggcttcagattgcggcgtggcaccaccgaaaaagggagacggccttagatcgcggcgtggtaccaccagaaaggtagaagaacacttcccaaggcacgtgcagggattagggtggagaaaaagtagccggagcttcgccggaaagactgtttggagggccgacggagacaaaaatccccaaaagaggtacgtgcagggctcggatgggagaaccagggatgtagggaggttggtcggcgtcagacgaagctggaggaggaggcgcgtagccggaaaaggcttcacgcgccctcacgcgccagcgcgtgagatgcagtcgccggccggaaaattgcgcgtggccggcgcgtggatgagcttttggttccggtgccttcacaaaagttggagatctcctccaggcgctccttctggtatggtcggtgtcggaaaaagacgttgccggaaaagttcgtcggaaaattttgccagcggtgagtgttttctgacgacgatccgactgaccggaaagtattggaagatggggaaggtgaccggaatgaaacatggtcaccggaaggtttcccggagttgatgacacgggaaactggaaagaattaggttttctcccttggctctgataccatgttgagagagagagaaagaagaaaaaccttaattctcattcatgtgattgactacttacaattgagaagtatatatatatatacaagcctaggagaactaactaccatacatgtaacctatattaaaaaaggaaagactgtacactatatatacattatattcaacatgtatattgctatttcttattatctgttatttgtttatttaattttatatatatatatatatatatatatttttgataagtaaaagaagtatattaatcgagaagaggaaacaccaaaaaccggtgccctctaagtatacagggagtatacacaccaccttccctaactaggagcctatccagtctacaaaacttacaagagaagaatgactctctgctagggaccccctgacccaagaccaaagattacatacaaaagaatatttcaacctttgaagcgaaagatcctcatccccaaacgctaacctatttctctccttccaaactgaccaaaaaatacataaaggcgccattatatatactctgaacttttcccttattattcaatagtataggcactatatatatatatatgtagatagatagatagatggatagatgtggctatgaatactgcagcagccctttttttaattttattttatttaatcagaaacaaacatatttattaaaacgaattagaagtacaaggatgaaaaatccttccaaaatttatagactaataaaatataaaggtggagaaaccttctcaaatatacatcaaaagggtatagtgataggcaatacaaagaaaagtggctcaacattccttaggggtttgtacaactacaaaaaggtcctgaagcattgtttctctctttgttaaattaacccttttgatctacatgtctaattccaatcaagttgaataacatagggaggaatgcccttgaaagctacagttgtaaaggctcaaaaataggaagagaaataaattatgtctcatatcatcactaaagtcctccacttatcctcaaagatctttacacttttttcttgccatactatccaaattagcataagacaagcgatttgctataaaactttgtctctaatagtactccccacaaaataggtgtatgatattgaaccaccaattaacccaaaaagcttaactgttaggtgatagggtcaacaagttatatcaggtttattaagacttgcagcctcctctcaaagtcaataaatagggaatgaataacaaaatatgagatttgaagctagaacctctccaaaatccaagatgcatgggccaattggaatcttttcggatagattcatattataacagtgaaattcagctgaattcaacctgaaataatacaatgcatgggctgacactaaataattcaggcctccatatcaattacatgaaacctggagttgggctcacacctgtacaaagtttaacaaaatgcaggccccaaatctggccctgtgcagtcccaaacccttttctggtccaaaccctggccaagctcctttcattgttgtccaaacccttttgatttacacaatgaatgccaattgaggtaaataacatggagaggaagcttttaaatgtgtgggaataagaagcctagaaagaggaatataagtgaagtagatcccataacatctctgaagtcctccacctatcctcaaagattcaatcatttctctctcaccatacaatccaaagcaacacgagataagctattttccaaagggtcttgcctcaaatggagccccctaaacctctatatgaaatgatcatcatatcacatatactcctgggtataacccaatccatccaagcttacttgaatagactatccaaggctccaaagttattggacaatgaagaaagagatggtcaaatatctctcccctccccatacttaaattcacaactgtagcatatcattggtatttaccttagatgagattttagatttgtaatggagagaaaggaaccaaacatattgccctctatatctcaaatgaaaattttgatttgtgaatagagaaatttatcacaagatagtaaaaatccttttaatgtagaaattccataaaaatggttattcattcaagtacataccagaaaagccactatgagcatcaggtactgaattatcatggttttgtttggatttacatgtaatttgataatctgaatacaatttataaatagagaacatattacactctacatagagaaacatgaccatgagatttacgttaaaatttttgaaggaaatgctcggttaaaatgtaactttgtgaaactagtcatgctggaagtaggataatcattatagggtgagaatccaaaaagttcaagagaaaacacattgttatgtgttatattggtttcaattgcaccaaataacatcatagagcaaaactattctaatcatgttgttgatttgtcaaaatagcaacatggcagattgagtaactgaattaggggaaaatagaaattagtaatgaacaactgacaaggagttagcccttattctagctaattcaactgacctctgattaaattgaaaaacatatttacagttttgagcttcttatgattgtaattgcatgtgtttgacagagagaattagatactacacatttc

SEQ ID NO: 12177 - DNA, 3607 bp, Vitis vinifera
  Intron number 7 from transcript GSVIVT01036672001 (locus G SVIVG01036672001) derived from phytozome v7.0 (chr-ID chr1 3; pos 20080301 to 20083907 reverse strand)
tttccttgccgcctccaggggttcctgaaagtgtggtatgttcatggtgactccttcacatttcatatacattgttcccatgtatgctgtctacttacaattgaagtcagattccactggcaattgtttatactgctggtatttgatttttatcttcatagtatggttgtttgctgttaaccatctaatgaaaatttcatcttctaatactaatttttcttctcatgttttattttggctatgtttttttccctttcctctagcatccctgttagtgggagcctaacaagtgtgttttaactttttgatttctatcttcatagtatagttgttttgggttaaccatcaaatgaaaatttcattttctaatactaatttttcttgtcttgttttcttttagctatgttttttctccctttcctctatcatccctgttaatgggagcctaacaagggtgttttaactttattttatgttcattattatcggctggagaacaaagaaattttcttttttggtattactatttatatttccttgttcttatggagcttttctcatggaatgctcatttgtacatgtgaaatccctcccatcatggtacttcggcagatttgttcagtgatgtgatgcacattgaggcaaagtaggctcctaagatgtcataagtagtttttgatagaagaagaaaattaggaaggagaaagatggaaagcaggaaaatagattgcatcttgttgcctaacaatgttttggttgatatcttaccaaccttaaacacaatgcaatgtagccatatggtccatacattgtatgagaaattctcatgtcattaatcatcttcagcaaagactttatgatgggtatcaatgaggttagtatcaagtagtaccaagttgccaaccattaccttatctaagccttgtttggattagtttttgtaagcttaataagagctcctaccctttttagttagttaattttgttgaaagagcttacgacttgaaaagagtttgataaggaaattagaaaaactgggtacttttttttttttttttttaaaaaaaaaaaactctattggcttatgcaggaagctatttcagtgttacctttttgaagttttgattttggctttaacttaagtgttaagctaaattcaaaaataggaaagctatctaaatgggcctttagttagttgttcaaggactaagacaatgctagggaaatagagaaaaacatcttgctcactacatgtaagaataaggatatctagggttgcaaagtatcgttatcaaccttatgagcaaaatttgagagagattttagtatgaccatgttggattttttgggcccaattttttgaggcccaaattcttttactattggtgcttgggttgattagcctttcatatcctccttttcactatgtcattgggaagggtgtggcaggattttattccacaactttgggttttctgaagcacattaatcttgttgtgcattgttcttttttctttattgtcttcagtaggctttaatgttgttttagattgtcattttagtgcttcgatttttatagacatgtaagatactaatgtttttcatttttaagaaattttatgaaatgaagtgcatgggatcattgccatgctcacaacgcaagaaatctcaaaaaccatatgaaaagggtaacctgtttgtttttgcatttatttattggttacgccacattaaagaaaaaaattttgatcaacctatggatttgggaaatcatcctaaggtgatcacttgcctattactaaatcaaaagctttgttgttctagaggactttttagtagttgaggcttctgatctttgggccagacttagaaactgatttgattgcttcccttgcacgtcagctagattttgttaatttcccaagaaagtaaaggttagaggaggaaagctcttcataagtatgagaagtgagaatctattgcttattgggtaagaaatgaaggcatttgcaccccttttccgtcatgtacaaatatcacatcctcttgcctagtttgtggtagcttgtttataaatggtgtgctagtgagttgcagtgctgccatgtgcttttcctgctaaggataattcatgaaacaagttttatttggcggttgtatgaagagttcgggaatatgtctgtcttattcctctgtatatcagatgggttcaaacttcaaactagatgaagagagctttaattgaaacaaagagctacagaagaaattagagctaagaacaagaaaggctttaaggtctccatggattctgtgcatggagcacgctgctgcacactgctgcatgctgctgcacactcagctctctgttcttttattaacaagcttgattcttggagctacaacagcttgacaccttatagagctcaggacaagctgagaaaggtgagcttgagacctcatggagaaataacaagttgagagtcccaaactcttcataccaatagcaaacaaaacttcatctggggagccgctcttatcattgagaccacatggcatctctagagttcactagcacatcatttacatgcaagctaccacataattcactggcagggagtgtcatttgtatatcatgcaataagaggtatatgcacctcttattccttacccaataggtagcatattctcacttctcatactagagggagaattctcacctctcacttctcaaggaatgaacaaaagcatagaatctttgtcaggctggcaccatactgatgtcaagcacacatgtaggagaagtaacgtatagttcttagggtgtggtttctgtatctgtgcatttccctggtcttgcaagcaggactggtggatttttgagttattaaaaaagccatatcatgaataacttaattggacaagaaggctggtggaaatatgttgtgaaaacaatgagccatttgatagttttaagcaatgctaattttgtggaataagaggactgatttgcctgagaagatccatcactggatcagttaaactgcctactacttagtgttcctttttggagcatgttttgttcaaaagatgaatctgagctagaaaattcaagggaacaataatctttgaatttttctgtattaaaaaaaaaattaatagataaattggtttggaggatggattccttgaagaacagttgactttgacaaaattttccctttctgcaaagatatcatccatttagaccgtgtttggtttagccacattgccacaagtgcatggctatagaagtcgagcaacttgatgaaatatgaatggtgctattggaaggtatcacaataaagtgaaaggagtttatttagaaccctgttcgtattaggatgagcatcgggacaaagtacaaaaaatatgattcctccatttagagtttgtgtaagaggaggatcaagggggttatttaaactcaggcatattattatgctcatctttactgtgttttgggatctttactcgcactgtccaattatgaattcattctatgcacattatgatggaaatcatgataagactctatttgttttcacatttgcaggtgactcttgtgaag

SEQ ID NO: 12178 - DNA, 3193 bp, Vitis vinifera
  Intron number 7 from transcript GSVIVT01000336001 (locus G SVIVG01000336001) derived from phytozome v7.0 (chr-ID chr3 ; pos 11603494 to 11606686 reverse strand)
tacctttgtcttaaagccatcagagaaagatccaggttacttttaacttcttagtactataatggatagactccttggaaaatatcttatcagaggaacaacgaaaaaagagaaatagaacattatctttcctcctgagttgtgatgcatggaactcaaagaagcaaaaaaggatttatttattttatttgggtcattgatgaaacatgtcaatgaaaccctgatagtttgtccattaatcctcatatggatggcatttaaaatatcagtgcatgccttggtgcatgagagaatgagaattgttggatgtcaatgagcactattgatgaattcactttttgtgtacgaggcatttggaccctttactttggtatctttaagaacttctatttgattggctttttactgatgcagacatgtacagcttaggcataacttaaagtcattgctaatgaaaaacagatatgttctttccaacaatgcatatatttatttgttttggggaaaaagaatgacaagcatagtttcttttggcttgttttggaaggagcttagatgtctaaattggatttctaaagaatattgtgttcttattcgtagcagtctgggagtttctgcttaagtgaagccatttagcctctatcattttattagtatgtgttacaaggatcctcaggatgacaaataacaaaatctcgagagttcttgtatttggtggtcaccttataactcctcttgattaagtctcaatcctacctacttgaggttagctgcaagatttatttatttatcctgctttaataattgatgtatctctaaaatctactcaaaaaagagaaggaaagaaataaatgaactttaagtaggattagtattaattggatttaaattaagattagcatttgttggagtcaaattaagaggagctaattaggttattgaagaattcaaattagagtcataataggttattagaatcctagtagaattggaattttttaaagaaggctataaataagggtaattgatttaaaccaaagtattgatttatttatttatttattatttattttgataagtaaaaagaaaaagtattgatagttaatatattatgttttcttgcatactttacaattctcaatgatgagattccattgattttcttgtaccctataactgagactcctagaaggctttagtgagacttaaaggtttttctccctttatcttctcatcctttttctctatatttttatttttatttttttctgctgccataaactttatccttgttcctccccttaaaccctaaagataaaaaacccttgcccacctatttgattgtaggcaaccatcctatggttgtcctacatcaataataatctttatccttttcccagcctctgtgcatttccttttttaaaatctatatcatgtccttttgtcaccttcaacttggatcaagtcacttcattatactagctcaattgtaggtcttcactctatgttgttgaaccatcttaaacaactttctctcattgtgtcctgaattggtgccacctctaccattttctgaacacattattccttattctatcttccctttcagtgacactcatccatcttaacatcctaagtttggctacaatgattatttttaaaaaaaaattatttttaaaaatctatttcttaccttgataacattctgaactgtaagaataaattatctttgtaacattctttagaacctttcctttaaattgatagtgataatttatgatctctaaactactttagatgccattctttgtttatttatctgctctggtactatggaaaatcatgggtaatcggtccaagctataaagatggctgcttctaggtctcttttggctgtttgttttcgtcttatcctgatttctactagtttttgaaaaaaattacgtgtcatatatttggttttagtgatttacttaaaaacttttggattcttctcctaattctaatttgaaattaactcctattctatttgacaatttatccctcctttagtttcatctttcattaactaaaattatgtctgtagccaacaacagtcatcactagatatcatttttataatgcacggtgagttcatccacaaacaatgcaaaaatgtaagggtgcaatgctgatgagcctgtaatagtctgacgagtcttagaaaagaatatattgatgtgatatgtggtatgtatgatacagtagtaactagtctgcagaagatttgaggagacacaagataatcagcaagggggaatgcttgtttccatccttcttctaggttatgtgcctgtggggtttgttgctaagtctgcaactactgttgactagtctccatgcacctcctcatcccaaattccacagcaatcaaacaagttgaagggtgatcttgagttttttgaaagtctaggcctttggtcattgaaagcatgacttcaactgggtgagggagaaaaaagggtgtatccaagtggtctgagctctgctttggctgactgcatgtgtgtcagaaactcataggtgtaaagagtttcatgtggaaattgctatagttagcacttacttacaaaggagaaataatcactgttttagcttttggtccatgtataaatgcattgctatgctttttaagtgggtgagtgttaattctacaacctcaatttgttatgggatatccactgatagtaatagaatagttcttagatgggttttgacttatgtggtatgtcttctttaatttaggtcactgtgcttaattgtgaaccattgagttaactctaccagggatattactttctctctcagggaacctagagggatgtctaattctcatgtttgcaaaatgatcattggcatatctttcttgtaataccacatgcatgatatcaaatggctatgtttcctataaccatcatgtgcaaggtttaattgaaactgtcgacttctattcttttctacccttgaaagttcgcttgcatgtgatttcttgccatcttcccttgctgcatgtatgatgctataggttgatggccaagattttctaccttttatttccatattgtttatgttgaatcagtattcataagacgtttcatttactgtgactttagttaaaagtgagtgttgctgtgttccttcaggggcttcttta

SEQ ID NO: 12179 - DNA, 3990 bp, Vitis vinifera
  Intron number 3 from transcript GSVIVT01024337001 (locus G SVIVG01024337001) derived from phytozome v7.0 (chr-ID chr1 6; pos 1144050 to 1148039)
ctggagcagattcaattgtttgtgtcgtcttagaagtatattaatatcttgtttatgtagtaaatgtaatgcaaattttgaattatattaaaaaaataactttaaaaataaattaaaattgttattaaaatattatttaaaaataataaaatttaaaaacttcaataaataaaaaattaggttacatttggtttacttggtaaaatatgataaataaataaaataagagaagaaaattacaaactccaatttataataattcggcttaatctttgcctacatccacggttttaatatatcaaaactttcaaaccaagatttcaaactttacatttgaatccatgactttaatgacaacttttagcaaactctaaaatagtctatacttaaattttttttcatcaagtaatatgctatacttggactcacatcataaagtatacacgaaaaaattatttgataagtataaaactcatagtttataatttggcataaagggagaaaaaaaacctagagttgaataatgcactaaaatgaaatgcaagtttgaaaacaaatgcactttaaaaacacttcctcaagactccgagtaatattactcttcctccatcaatataagaattttagagcatttaaataggagttataggttcaaattggttgttagagacactctgggtttcactaatcaactagccactaaccattgaggttaccattgttcaattggcttactcaattacttaaccaattgaagtttagtctcaactagttaaatagatgctattagaacaaaaacagtctcaatgtacctcaattaattgagcccaatccatttctccttactccaacgggacgggtttttttaggtaccctgccccgtttacatataaaattaattttaaaattaaatttaatttaaattttaaaattaatttaatttaaaattttattttactatttttaatatatagataataataaaaaaatttaataaaataagttataaaaaaatataataattttattatttataaaatagatttattttaatataattaaaaaatttaaaagtaattttaaaaaaaaaaattaaaaaaaaaaaattaaaccgggtgaggcgggcgggtatgatgggacggagatggaaattgtttttaataaacgaggtgggattgggatggggcaacctgtctcgaacccgcccagttgtcattcttacttggaaacttcaataacttttacttaattttacaaaccctaaataataaatttagaaataattagattcaaggttttaataattaaaaaaaaatgaaatcatcccatttataaaagaataaaaccaatttatacacttaggatgattttaagcacttaaaaaaacatgtaatgcaatataaacctaatgcaccaaccatattacaaagagatcttagagaagatgtcttcattgatcttctttttgaggttttctctttcttcatgattttttttgacttgatttatttttataattatcactttgaaaatcattttacctaaatacacttgaaataaatcattaattctaaatgttgttttattatcatcaaaactaaaataaacctaactttagttttactttttcttaacaacaaatttaatttttttaatcaaaattttgttttataatataaaatatttaatatatatatatatatatgagaaacaaatttatgatttataagacatgtaaacattttttcaatttatttataaaaaatgtttatatatccgttagactaattttattcaaagagtttaagacttaaaaaaaaaaaaaaaccttcatattaaaattaggaaaatactacttcttgtagaactttatttgtgcttatctacgaagttttttttttttagttttttttcatgtttaataaaaaatttacaataccaatatcatcatcctttagaatttacacttttaaattatatcctttgagtgtacttcacctaggttttcgatatgcgtatcctttggacgaggtctatagaataggagatgttatacttgtatagactttttgtattttttgtagtctttcttgattggtggaggtttacttgggtcttttttatcttatagaattttttatccatctcttttttttttttctcaattaatatatatcttttgtttctaataaaaaaaaaattaacttcactttccttgaaaaccaaaaataaaaagttatcaagtatatcttatattttaatttatcatatattcacctttgatggttaattttgttgggtcttggggcttcatatcttagataatattttttataagatttttcatatctttatccctttcttttgtagagttgcaacaccacacaaagtgggtaggttaaagtttttcccaaattcatacaagggcatattttattttcttttagtttgtgagtgggcatctatctcatctcatctcatctcaagccatgtgcaaatatccgtacaaaagtacaaagtgtagtgcatatcagtccttggaaaaaggacgatttttcatcatcctctccccctcacacatgacccacttcaacattaggaaaatggctttaaaaaaaataaaaataaaaataaaaataaaaatgatggtttaaaaattatttaaatttttttataggaatgagggaatccaaatcttctagaggatggccctcaacctttcaatcatgtgggtattattttactaacattacactttttttttccctctttcatgggtgtggggtgttattgaatttcaactttcaaattttttgttttttatggcactttgaccatggagataattttgaaaataagtaatttattaaagtttaaaaaacaaaaattttatgacaataaaaattatgtttatatatgttgcttatattgcaatatgtatataattttttatagcattaaaaggtaaatatttaataaatcaataaaaaataataaaatgttaaatatgatttacgacggtgctataaagttgataagtttgaaatgagatattatgaaactgtttgagaactgtctttaaaaatagttttttattttttaaaacaaaatatataaaaaatatatttgataataaaaactgttttttattttttgtttttactttcacttattttcctattttaagaaataattatacaattatgtagaataattaaaaattatttttaaaatacattcaaaaatattaaaaacaagttaaaactttttatattttcaaacaaacttttattttaaaaaaattagaaaatggttttcaaaagttattttcaaaaattatttttaaaaattatttttaaaaacatttaccaaacagttcctataattttaattaggcttatattttaaatattgttatactttttaaaagttcctctttatggagcttttattgaacctattttttagtgccatattaaaaaaaactatataatcaaaagttttcacttaatcaaaatagattataaaatgtatttttaaaaactataaaaaaaatatattaaatatgtcttcctattatatatcaaatcttaaggctacatttggctcttgaaaaaaaaattaaagaaagaaaaataattttcttagatttagttcccatgaaaaaattgaaagaaaataaaattaattaaaaatttatatattttaaaataatataatttttatataatataaaataaataaaataaaataaatttaaaaaataatataaaaataatttattaaccttacatccttttttttttttttcttctattttctttacctccgttttctctcaatcggaaattgtctcacaaatctaaatatcataatcttggcaccttattttcctttctattgtactttttgcttcccctctctctcttttgcacgctgagagcaaatcacaaggccctgtgtgtttgatcgaagaagaagcctcacaag

SEQ ID NO: 12180 - DNA, 5226 bp, Vitis vinifera
  Intron number 14 from transcript GSVIVT01031528001 (locus GSVIVG01031528001) derived from phytozome v7.0 (chr-ID chr 6; pos 17523648 to 17528873)
gtcttccttggctccgggtcgttttccttctataggatggggctctatgttattatttgatagcatcaccatgccaataagtagtccttctatatatcaatttgtccttgagtattgaggtatagtgatcttttggtggcaagtaaatgatattaccttcattttatggatctgctctcccatcatatagcagactatcatggtgattgggttataacattatcttaatggaaaatttcttaaatgaaggagataaatcgttaaaatcaatgaatcaaattctttgaattaaacaataaaataaaaaagaaatttaaatataattttttaacttcacttataaataaaaaggtaaccttcctaaaagaaatgaaaagaaaaaacttcataaaatgattgaaaaaaagatttcataaggagaaaaatgtttcataaaatgttgatgtaaattcaaggacacgcatgaaatactacatgcatactcttcaccatctgtagagttcaacaaaatcattaaggaacaaatcatgttaaacccttaactaaactttgaattcaaataaatactttctttgtcatcctatgagtcggggtcaaagtgatcgaattaaagtaaataatttttgcaaagaatattattacaaaaaattgtatcctcaaatattttaatataaataattttatttgtatatttttcttattgttttatttatttttatcatacaatttttttttcatgaaaaatatcttacttcaaaagtccaattaagaagtcgaacgtggttattaatggcaacacgaacctttctatataaaaggacatccaacatctttgcaaagggacctttcatccttacagagggacctttcatccttgtggtccagagaaaatgtctaggcatgtgatcaggccggtgacatgataatgatggatgcgtaatccagccacaaatgccaaattccaaaattataatcccctaaaaaataaaataaaataaaaaggaggatggagctgatccataacatcccccacgcggtccctccaaaatgagacctagcaagaattagaatatataaagctttccaaatctcgatgaagttcaattaaatttgattaatttgtttgacggtatgattaaaaacaactttctatttttaaaaatttataatattgtttgactattgttttctatttttaatttttgagaacaaaatgaaataaggaataacttttagataataagtaaaagttgttttcatatgttttttaagacaaaagaaaaaaagaaaggtgaaaattaaaaaaattataaaaaaaaacaaataaacttaaaacatgatatcattcttttttgtgtcttcgattcaataccaatataaaaaattttcacatgtgatcttcctttgaattacacatatttttctattttttttttaacttttctaaattttgtcattaagtaaataaattccaaatcaattgatatatgaaatttattaattttcaaaaataaatttaaactcaaaaattgattttattagtactagaaagttatgtagctcaataatattagaaagtactagaccaaaatttattataaatgactccgttagtttcttctttacatatatcatatttgtagaaaatttttcattaggcaaataaactttaaatcaatcaagacgtgttggatttattaaccaatctaataatttttaagaataatttaaaactcaaatagtcatccaattaatatttgtaatttgtggacaaatattggtttagaacaataatatatatatttttttacatagaatcatatttttctatttttttttcactaagcaaataaattttaaattaaacaaaatttaatgtgttgaattcattaacaaatctattaattttttaaaataatttgaaactcaaataatgaacccattaataccataaatttatcgatgaaaattggtttgtaatgactctattattattatttttacatattattatatttttataaattttttcaataaagaaatgaatttaaaatcactttgtattaaatttactaataggtttaaaaaaaattaaaaataagttggaactcaaaagcagatctaatcactaaaataaatatacaaaaattgaaatatcatgaagcataactttactgtttatcttatatgcacaactatattttttgaatttcatcacttggattttaaattaagtgagatataattaataatttaaattctttaatgattttttaaaaaaaatttaagaataatttggaatttaaaaaaccaattgaattaattgcatattaaatcaaaacttttcggaataccatgttcataattgagtactaaatatatacatgtgagaaaaaatttagctcatttataagtttaaaaagttaaactttattcgttgttcattttaaataaaagattactaatagttattatttctaagtgttgggctcccttgtatgtgagggagtgggccccatatttttggggcccaagttggttacatttcaaaaaaatagatcgggaaaaagaagaaaaaaaaaaacaaagagaagagaaaagagaagaaaaactcatttgcccagatttaatcaacaggttgatcccacttcatctgtagtctgatcgagttgaaatttggaaaaaaggtttaaaactcgagtagctacaatctgaacggtggagatcagattttaagcttgggaactggtgttactgtccgtgaatagtaacgacgtttttgggtattatttctccaattttttatttgtttcttttgccaagagagattatataatccaagactatatgtgttcttgatgtatttgaaagcctctagaaattattttagagaaaacaagtgtaactcattgttgttgatagtggaagtttgaattggactaggtcccgtggtttttcctttcgcattagaggtttttccaagtaaaaaattgtggtatctgatttattttttcattatatgagtttatttatttattactactagttgatattacctatttaattttgcacaaagaaaaggtagaaaaatcttagtgtttgttgaaatattgtagatttaccctaacactaagttattattattattattattcatttttaacaaaaaaagaaagcaattatgcttttacaaagatatccatatccatacttttaacatatgctaaagtagttttttaaatatatatatatatatatatatatatatatatatatattgtaattttattataatattactattcatgtttcactaaaaaaaatatttattttttaatttatttgtaattacaaaactaatttcattttaaataagacttaaattaaattaaattcatactatacaaattaaatttataaggcttttataagaaaatttgttttaaaaacaacttatccaaacaagtttttgttttttatttttaaaaacaatttcttaaagacacttatctgtatcttgtttccacacatgccctcaatttttaaaaaatgccccaacgtatatgtgaattttattgctcacatggatgagttaatgatgtgaaagagaagaagataagaggcattaaatccttggaaaaataatgaataatttgtgatgatgagaaatggcacttagaggttggtaggtattggagaattaatgcaactctactgttgaatccccacgtagctcatggaccacatgtgagtggagccaattcatctaccattttggaatttggactgtagttcatatttttagttactccaaacgaagattatgcaacatccaaaaactttttagatttttcttgcaaagctccctctgggtagcccaaccaatctatttgtcatcctacgcaaataagtaatcataatttttaaattcaattttttttctcagttatagatttatttaggctatatttgattctcatagagtttaaagaaaaacatgagaaaaaggaaaaaaagtaaaataataataataataataataataataataataataataataataataataaaattaaagtcaataaattatttttaaatgtcttttcaattttttatttatttattcaacccttttatataaatgttaaataatttataaatatacaagtttcttaataatctaagttatatttgattttctttcacatttatcataatacaactaaacaggagaataacatttttcttatcattttttttccttaatatttttcgggaaccaattctatacttaatttacatgtgatattcaaatattataattaaggtttaggtcatgcgtaataattgatatttaaatatcataattaaggtttaggtgatgcatcaaggtgtatatgaatgattgatgttcattattagtaccaatatccattattcatctgttcatccagttatcaacaccaccccaccccccaactttacattgtgatgcgccctacattaaattcgttggacgaagaaactaatcatatgatctgtcattggcaaagtatttttaattttgagggatacattttacattttgaagaaattttagaactactatcaaaatgttaccctatctagccattttgataaacggctatctcctctataagcagatatacttggcccctacatatcaaaatcctttcattcacaaattcatatgatgtgctttttcactatctagccatttattttgaagccttatatgcatgcttggcaagttgaactacttttgcatgcagtaatgtatagtatatcatgtgtagattttaatccattctactatggtgagcttataatctgccttttatggcaaggaattcggccagtcaattctcaatgtgaatcaactgaccaaacgctatgtctgcccattactgttcacagcttgaatggtgcggttgctaaataaatcattaatgcatggaagattggtggtgtggagccgatatatttttctttctgatctacagatttattcttcccttccatagcggaagatttttctccaggagcatggagatagaggtggaagatggtgatggtggtagtggtagccgaggaggaaatgtgggggtggtggctcacttggtttgggaagatttgacagtggtggtgccaagttttgggagtggagccaccaggagggtgctgcaagggttgagtgggtat

SEQ ID NO: 12181 - DNA, 7862 bp, Vitis vinifera
  Intron number 40 from transcript GSVIVT01007560001 (locus GSVIVG01007560001) derived from phytozome v7.0 (chr-ID chr 17; pos 12036314 to 12044175 reverse strand)
gaagagtttacctggtaatttaacttaaatataccttcttattttacttctaagttagtctctaactgcacagtatccaggcaaatacaacttaatttgtttctatgacaagtagcgaagcattgcatcagtatcacctgtagcagtacactaaatttttttttttgctcaattttgaaatttctttagctttcttttcttgcatttagtcttcagttttgcatgcttgtttaggaggccccagaaacatgatgtttttacgactatacaagtttcttggcttagttggattttctttttcaaaaaaagaacacaaattaatacatttctgcaaccaaattagggggttaaaaaaaataaaggattgaagaatggatggcatacagaatgggcaaagaagtttcatgtagttttcagggttggagtgatggctaaagaaatggagcaaggcatcaagtggggaagtgctttggatgactttgaaatgtaagtggttcagttttttaattggagatgacatattaaaaggtgtttgtttcaagtgaacaggagatatgggagggtgtttatggaaaatgggtgaaacagtaaaatatgctcccttggttgcccatgcacttattgtgcaaagatttctttaaagcaccaaggtatctatggaggctttgtggcctttgatgaagtgttgatgaaaacaaagagtctttagtgatgtgaattctagtgtttggtttttggtggtaggcactagcaaaggtggtgcagaaaacagtgagtgccatgaaactagggttttacacttgaggagctggtgaaggagatgcattaaagaagccaggatttggattggaggatctttgtagtcatcgacaatgaaggtaggtggagagatagaagtgaggaaattataatcaattgttaaccaagattcaagggggagcagagttgtagcactggtttggagtaaaagggtatgggagtgtcaccatggattaatgaagctccaagttatgtctaggaaagtgcaggatctgaataatgagccatagaggggtaattcattaaatttacactgagcatggaggtggtaatgctttcaggaaactgaaacgaaattgatgcacactgaaggagtaacgagtattgggattcacaatactgttaagaccggtagttcttaggaacatataggacaatgggtttggaaatatagggtggtgaaaaaattggtgtggaagcgcaactgttcttggtttcatgctgctttaggaatctggaagatggtcttatgcgaatttttccaaggttgcatgaccagtggattggaaaagggtggattatatatatatatatatatcagaaacaagagatgtgttaatcatggataaagagttcatgagagaatgaggaatcctccacttaaatacacacaattgatcaaaacatgattgaactcctccactatgcaaggagatctatacaaaatgtgatgaccgcataagaatgtacaaagatatcatcttctcaaaccaaggtgtggtgaaaaagtaattctctcttgataataaaaaactgaacatgatcaatttatacactaggaatgcacctaaggaagattcatttctgtctctattccattaacttaggggtttcctaatagttaggagtcatctaaactaatagagaaaaattaggaactgtacaaggatacaagttgtacaaaaatatctaaagaataaaataattaatttaaactaaatctgcaaggttgacaatcccccctcaaactagtgaatagaagttttacatttccaattcatcaaaaaaagaagttttccatttccaacttgcttgtgatatcttggacactcaaagtagacagttctttggttagaacatctgtcaactgatcattagacgatatgtgtagtgtatgaatcatcccattgtccagttcttttataaaatgtcgatccacttcaatgtgttttgtgcggtcatgttgcaccaggttgtgtgcaatattgatggctgatttgttgtcacaatagatcttcataggtccttcccacttgattttaagattgtcaagtattattttttagccacaaaagttcacaaactccatgtgtcactgctctaaacccaaccttagtgcttgatcttgccaccatgttctgcatcttacttctccatgtcacaagattacccttaaggaagtgcagtagctcaacatggatcttctatcgaccttagaacctgcatagtccacatctgtataggattccaggctaagtttgttattcttcttgaacaagatcccttttcctggtgttgccttaagataacatagaattctgtgcactgctagtaggtgtcttccttcaagatcatgcataaactgaatgacaatacttatagtaaaggctatctctggcctggtgtgagacaagtaaataggtcttcgaaccatcctctaacatcttcctctatatacagcattgtcatcttcttgatgtgcttgctgccttgcaaccaagtgttcctgtttctttcaaaaggtccatcacatacttatgttgagagattttgatacgccttctttgcaatgtgccacttcaattcccaagaaatacttcatttttccaagctttttaatttcaaattgtatggctagacattttctgagtgaatctctctcagccttgtcattcctgtttacaatgatatcatcaacgtaaactaataatgttgtgactccccctaaagatgaatgcttaataaagagagtatgctgtagttgtctctgtttgtagcctattgctagcatggcttttgtaaatcttttgaaccatgctcttggagactgtttcagtccagagagcttttttcaacttgcaaactttgttatctccaaaattttcacgaaaacctagtggaggttccatgtaaacctcctcttttaagtctccatgcaagagaatttttaacatcaaactgttgtaaataccaaatagaattagcaaccaaagataataggacatgtgtggtattcatttttgctgctagagcaaaagtcccttgataatttattccatgtctaagtttacccttttgcaacaagcctgaccttgtatctttccaaggaaccatccactttgtatttcaaggtaaacacccatttacaacccactcatttctttccactagttaaattaataatttcccaagtctattcttctctaacacactcatttcctctctcatagctcatacctagttcttatccctaagtgcctcacctgttgtttgtgaaatgttgatggagtttatggaggtgagaaaggctttgtgttgggaaaaaaatctgtggaaagacaaagtgtgaaattgggtgttcaattcatttatgtgtaccttttctgattgcaatgggcaaatctagatcaggaaactcatataaatcagccttttttccctatagagtaatgagaaaatttggattcagtgcctggtttggatttttgaacttgtataggtttggaaaaggatgttcttcttctagaagagacctgtaatggctttgtaggattcagactaggttgttgtctttccaactctgtttcaggtgctaaatcaggttcggtttcaagggcgagtggaggcttggtttttatgtcattagtgtctttttctggttctatttgattaatttctggaggagcaggtttgtttgaggtagatgggaaagattcggacctggaaaaaaataccaaagtcgataaaaaatttcttatcttccctagacactctccccttgaagataaggactcgagctctgaagaatgactctttttccatcaatgtaacatccatggagatgaaggtttttcttgtagttggatgataacacttataaccttttttggttgttgaatatcctacaaaaacacactttagagctctcagatcaagttttcccctgttatgagtatgaatatgtacaaacgagacacaaccaagcactttacgtggtaacattgtttttctctcagccactccattttggtggggtttatctacacatgaaggctcataaatcactcctatttgaaagaaaggtgtaagagttggattggaatagtctcgtgcattgtccaaattcaccctttcaatggaaaccccaaattgtgtatttatcattttgtaacaaaatggggaaaatattgctcacctcaaatttttctttcatgaaatacaaccaagttactctctcatgcaatcattgataaaagacaaaccattttttcctagaaacattaggaattttggaaggacaccatatactagtatgaatcaaagaaaaaggtttagaagaccttgtattgcttaatggaaaagaaatatggtggtatttggcaaactcacaactatcacaatgaaaatcattaacattgatatttctaataagagaaggaaacatgtttttgagtacatcaaaagatggatgtccaaggtgcaagtggtggagtcaaatttcggttttattggaaggaaaaatttcagataagtaggacagagataattggttgtcattgtcctctttgccattcaaagcttcaagatagtagagctcatttctttacctagcaagtccaatcgtcctccttgtatcttgatcctgaagaatacaatgtgtggaaaagaagttactttgcagtttaaatctttggatatttgatcgatggacacaaggttgtagataattttgggacatgtaacacattcttcaagccaaaaacacttcataagtgaagaatttctgaattcctttattgataatattcggtacacaccatacacatatatatacacaaatgactgaataagaaaatatcaatctagcttgattctctcctaaaattaggaaactgaatcctaaggaaatatcctaaatgatctctccttttttattcctaaaatactttcctaaattaaaatcctaactttgaatgccaaatttcaacaataagattatagtatcctgtgactgaatgtgtaacatgtttagtcgatgaaatcttggtcttggtttcataacataaattaaagctgcatctctcatcttaaagtaggtttggcagatggcttcccagatttcccaagtggttgtgagaaaaacatgctagttgccctgatttcaagttgcattgagttccaaagccacaacataatcatcgagtcttcttcaacccatgcattaaatttcagaccttcagggcttgaccaattctaatcaaatgactcagctttcctcgtcctttcagaaatgttctcactacctccaaccattgtaggtaattcattccattcaatcagtaggagggattaatattttgaagttctctagttgattggttcataagccacttagtaacagatttagaggggttggatgtatttttagagatgttagacattgtttaaggggaaaaaaactccggaaaggatttggatcaagatttggctatggagccaagaaagatcaaaccaaattaagggctaaaaaaaagaaaaaaaataactgattagtaaatttcctagagagtgtgagatttgataccatgtggtgaaaaaataattctctcttgataataaaaaaattgtacatgatcaatttatacaagaggagtgtgcctaaatgaggaagtttggctgctgtccctatcccatgaaattggggatttcctactagttaggagtcatctaaactaagggagaaaaattaggaactatacaaggatataggttgtacaaaaatatctagagaataaaataattaatttaaactaaatctacaagatttctaacataggtaagctcctctcattgctgatccaaccattttggtttacacaccaaatgacattgagaggaatgcctttaaaagcattgggtgcagaaggcccaaaaagaggaatggaagtgaagtagatcccataacatctcaagcatccttctcttgtcctcaaagatcctaacatttctctctcaaaaggagattttggatggaatgaaatgcgcttttggctgtgtctgaggatccttggtatgtagtaaggtttcaatgtgttatgtttcccttttgagagacttcaactagaacataatcccattggccatgagaaggtttttcagattttctagaaattttttatttgattgacttgctacttgaatgaggattcacagggatcaaaattcagaaaaggaggtctatgtctgttattgatgagttctggcttcagtagagttttagaacaatactcaatctttccattgcattttttaagagatttgtgctaggtcatgtcctgattggctaaacatgggaggtctgaggagaagataatgctccctcagatttgaaagtatgtggttagagaagaggaagactgagagagagggtaaggtctatggttctctaagctttagactaacaaagaaaatgaaagtgctaaaaaaggggtttgaaataaatagatgaggaaatgttttgagacattgcagtcagggaggttaagtctttgaaaaaaccaaagagtggaatatgaaggggagggataggggtcaacaaaaaatgaggaaggatgaggatgaggaatatcatagcatggtggagatgaaagaaatcaattggagacgaaattgagtcctgatgaaaggagcaaaaagcaatttttttccatcaggtagcacatgcttgttagagatgaatgtagccagaatattaaatattgatggagtgtggtctttgaggacttgtacacttgtttctgctgcttggaggtccaggtttgggtgggtggtgtttagtttggttggttgagacgatagtgcatgtcttgagagtgtttgatgaaggggtggcagaggccctaaaaactaaagtttacagaatttgatgagcaagttctattattcgtcatagaagtgaataatttggctagaatgatcactgctcatagatactcatgtttcagctttctataaaagattgtttgcattatatcacatccggtcactgcttaatagagtactttgttttagggttttttgaaattttttataagtctggttgcattgcatttaagaggtctcagaggttctcaagagtggggttgtctcattcccatagttttaaaagacgtgtgcgcttaaagggcgtctaggcccaaggcacaaccactcttgaagcacctcgctttccaaagcatgggccttgctggagaggcgcacctcatctactttatttttcctttttagatacttttccttttttaatcatattttataaaattgatatgcatcctgggtcatctttcactttgcttagatgtgcgccttgtgttggcccaagctgtagaagactttttgccttaggtgcaccctttcacctttgaaaactatggttattccaagctgcttggggttttgtagtaacatcatattctgtggttagctgatggctcaaccttgacccttataaaatgtcacccatatgaaggaggattttagagctttgaacattacaattgtgttttaatcccttgttctgagcttgcaccatgatttgtattccccccaattcttgtaccttaggaagaaaatgggtactaaaacatgtgttcctgggacccgatacagcattactttctataaagcttggttatttagtaagatatcaacaacactgagttgtctttttcttttgtcaaatattctataaagaaccatttcttcttaagatgttgaccttttgccaatatgctgccaaaatattcaggctttctctgggcttg

SEQ ID NO: 12182 - DNA, 8688 bp, Vitis vinifera
  Intron number 4 from transcript GSVIVT01034269001 (locus G SVIVG01034269001) derived from phytozome v7.0 (chr-ID chr9 ; pos 13804861 to 13813548 reverse strand)
agcctttagttacttgggttcacaaaaattttcaggtgaatataccataaagtatattattttttagttattcatgtgtttcatttgttaagttgtgctattttattatacatgagggttaaggtatgaagaaatttgaggaaggaaaaaaacttcttttattttcctcaggctattaatactgcttattgcatcaatatttatatatgaatgactgaggtcagctaccttaaaaaaagaaatctaatcctcatagttttaaaaggcccactttaagcgcaccttaggctctaggcaccaccactacctagttatagcgccttgcttgccaagatatgcgtcttattgaaaaggtgcgccttatcaacttttctctttctttttaaacacttttattcttgaaatttctaattatatactgaaatttatataatttcattccttttttattgaatgcttcttttaaatctttcgaatcttaaattttttattgatcgggttagattttgaatcatattttacaaaattgatgtgtatcctaggtagcatttctcttcacttaggcgcgtgccttatcttgctccttgagcttaagctataggagacttttgtgctttaggtgtgccttgcgccttttaaaactatgttaattcttgattttaggcgaaaatatctcaaaaaatcaggaaataaaattataataggaaacaattgtatgtggtatagctagcggtacagttagtggtatagctagcggtacagttagtggtatagctggtggtacaactatgtgatatagctgtatgcataactatactttctgaatttccacactccccctcaaggaaggcaaatggggtgtttggagttggagtttggaaggaaatcttgaaggagtccgcttggtgttgggataacatggtgttcaaggtgggaaaaggcaataaaataaggttttggattgaccacccttggtgtggaaacaatgtgctgtcccaaggcttcccggacctattttccatggctgcccaaaggaacgtcacagtggaggaatattggcatcagaatctgggtcaaggagggtggaatttaaggctgttaagagacttcaatgattgggagttggggttggtgggcaatcttttagtggagttgaggaattatagagtaactgtggaggaagactcgattctttggaaggaaggagcggacgggctgtttaaagtcaagaaagcatatagggtgttggctaatgctgaaggagcgggcttccctcatagcaatgtttgggtggacaaagttccaacaaatattgctttttttgcttgggaaactacttggaggaaggttcttactttggataggctgcagagaagagggtggcaattccccaaccggtgtttcttgtgtgaatgtgaagaggaaacgatcaatcatatcttaattcattgtacggtggcaaaaggattataggatatcattcttgcgttgtgtggtgtacagtgggtttttccaaattctgtaaaggaggttcttagtagttggaaaggctcttttgtggggagaaaaaggaaaaaagtgtggaaatccataccgcttttcattttttggacaatatggaaggagaggaataggctagcttttaaagggggtgtgttagcttttcaaaagttaaaaacttcgtttgtgtataatttttggggttgggctaaagtgtacattgatatggagtcgaattccctaataggtttcttggagtggctagcctccaagtaggggttgggttgtttcgttttttgtttatggggtttgtagcctcgtatacttcctgtatgcttcacggcttcttgccttctttaatatattcgcttgcttatcaaaaaaaaaaaaaatgttaatcattcccagtttggatcttaagtcttcatagttggttctagaaagcgccttggtaagaatgtctgctatctaaagagttggagtgtaaatcaatcgttccttcttctattttcttcttaataaaatgacgatctatttctacatgttttatccaatcatgatgaactagcttcttagcgatacttatagcagcttgattgtcatagaacatcttcacaaaatcaaatttttagttcatttaggagtctctttagctacattccttcacaaattccatgtaacatgactctaaattctgcttttgtactgctccaaactgcaatagattgttttttgcttcgccaagtaactagattcccccaaacataggtgcaatattctaaggttgatcttcggtgaattatggagctagcctagtctacatttgaaaaaatttccatgtttctcttctgtgttcttttgaaataaagtccctttcttggagtcattttgagacatcttaaaatacgatatgcaactttcatatgttcctcatttggattgttcatgaattggctaactattctaaccaaaaaaagaatgtctggtcttgtgtgagatagatagatgagtcgtcccacatatctttgatatctccctttatccattagagcgcttcctttgattgttcctagtttagtagtgtagtccataggtgtgtctataggtttacaaccaagcatcatagtctgctttagcaagtctaggacatacttatgttgggagattgcaatacccatttttgatctagcaatttccatcccaagaaaatatttaagattccccaggtctttaatttcaaactcatgagtaagaaaacacttgagcttgcatgtttctacatgatctccagtcaagattatgtcatccatataaacaatgataatgacaattcttctcttagtagtgtgtttttcaaataaagtgtggttaggctaacattgggagtaactaatcctctttatgtccttggtgaaatgatcaaaccaagttcaagcagattgcttgagaccatatagggattttttttagtctacaaactttgttaaagcttgtctggctcaggacctgaaggaatttccatgtacacttcttctaagtcataattggggaagattttcttgatgtctagttgatgaagaggccaatctcgattaatagctaacaacaacaaaacaagaattgtgttcaatttgatagctagaacaagggttttttggtagttaattctataggactgcgtaaatcccttatcaatttctcgagctttgtacctgtcaacactcccatttgctttgtacttagactgtgaagatccacttactccttattggattctttccttctagaagttcagcaagctcccatgtccctctttttaagagcccagattttttcctcaatggttgccttccattcaggtgtttgtagggattcctggatattgttgggaatctgaatatctgtaagactagtaacaaaagcccaataacctggcgacaaactcttataagagataaagttataaatcagatttgtgtaagatcttactccttttggcaattggaaaattgagttcatcatcttccaactcattaggatcagaatcaatgttacttgagtgtatctcttttggaaccaaatttggtttagtttcatgtactagtctaggatgtgttcgttgctttatatcttcttaagacttttttttttcccttgagtagacaatgaactcattgctattgacagcctgagattggtttgggcgaagaggagtacttggtttggtgtctatggattcaatagtttggagtgagacacttagagtaggagagatagtgttagagttgtgaacaataatagactcaagtgtttgaggttcggtcatagtttctgtttcccaaaactggtattcttgaattctatttttctcctgaattttggttttggagtaataagactgattttcaaagaatgtcacatccatgaaggtgtagaacctttttttttttcgataagtaaacacatatattagcaaaaggcaaagcgccgcatagcatacagggagtatacgaggcgacgaaggcctcacaacaaaaggaccaaaaaacaacaatacccaccaacccttaactggaggctatccactccaggaaacctataagggaacgaggctccacaccattatacaattttgcccacccccacatattacaaacaaaagaattctttattttctgtatagctaactccccccccccctctccctgaatgctaatttgttcctttccttccacaccgtccagaaaataaataacggtatggctctccaaattttcttcctctttttacccacaaaagaacctttccagctgatcaccgcctcctttatagtttctggagagacccactgggctccaaacagactaagaaccatcccccacaacacactatccactgtacaatggataagaagatgattaacgttttcctcatcactaccacatagataacaccgattaggaaactgccatcctctcttttgaagcctatcaagagtaagaaccctcccccaagtagcttcccacgcaaaaaacactagcttggaaggaacgttctccacccaaatgccctttttgggaaacaaaggggaactatggctgatcatcagcccatacgcttccttgacgtcaaacttcccattttttcctcctttccataaggccaagtcctcctccaaggtaattccttgactccttaggatttgaagcaattcgtcaaccaaggttagctcccaatcattgaagcctctaataaaccttaggttccaacctccttggccagaattctggtcccataaatcccccacagtggcactcttttgggcagccatattgaagagttgagggaacctccgggccagcttcacatccccacaccaagggtccttccaaaacctgattttggtgccttttcctaccttaaaaatcatattttcccaacaccaatcagcttctttcagaatctccttccaaaccctaacaccaaacgccccatttgcttttttagtcctccacccaaattccttttgcccatattttgccacaagaacacgtttccacaactcctccttggcacgagcaaatctccacacccattttccaagtagggctttgttcaattggactaatttcctcaaaccaagcccccccttctccttgcccacacacaccctctcccaattgactaggtgtgcttttctttccgtacttccccctccccacaagaaatctctttgcaatttttctagtcttcttgccactaccttaggtatacggaagagggacagttgatataatggcatgctagccagcgtactctttatgagggtgattctaccacccttggagatgtattgccgcttccaaagggctaatttccacctcatcctttcttccaccccatcccacacgtaaccagctttattgggcgcgcccagaggcaaccccaggtaggttgaaggcagctgacctaccttgcaacccaactccacagccatctcaaggatctcctccacctcccctactggaataatttcgcttttagccaaattgatcctcagccctgaagcggcttcaaaccaacataaaatccagctcaaaaatgtcatatcatctttcctagcctcacagaaaactatggcatcatccgcaaagagaaggtgagagataataacagcctgccccctacccctctggattctacatccagagatgcagcccccttccactgccctccgaataagggcactcagcacctccattcccatgataaacaaatatggggatagagggtcgccttgccgaagccccttagagctagagaagaacccagctggctccccatttactaacactgagaatttagcagtcgagatgtagctccatatccactccttccacttagtcccaaaacccattttttccataaccctcatcaagaactgccaattgacactgtcgtacgccttttcaatatctagtttgcagatcaggcctttctttccttcttttttccatgagtcaatcacctcatttgcgattagagacgcatccaaaatctgcctacccatgacaaaagcgttctggtctgaagagaccactctaccaatcacatttttaatcctattggccagcaccttagccaaaagtttatataacctgcccaagagactgatcggcctgaagtccctcagctcctccgctcctccttttttggggatcagaaccaagaatgtggtattgaggctcttgagaaaagcattatgctcatggaattccttgaacatctccaaaacctcctccttcataaactcccagcagaattgccaaaaggcccccgtaaagccatccggacctggagccttgtccccattcatgtccattagggccgaatggacctcctcttccatgaatggcagctccaagatgtccgcctcttgttggctaatctgattcagatttaacccccctatatatgccttccactccgagtcttccgttaataaccgatgaaaggtgtctactattccggtcctaacttcatgctcctctgacagccagaccccactgatttttattctttccattgtatgccttctttggtgcgcgtttgccattcgatggaaataccccatatttttatccccttctcttagccacagctcccttgagagctgccgccagtgtatctcctccagcttaacccacttagcataatcttctttcacttctttttttctggaaaattcctcctcagacaggctcctctcactttccacttgatcccaatagtccacttgctgtaaggtagccaatttattactctccaagttcccaaacacctccctgttccaaacttttaagttttgtttaatcccctttagttttgtagccagcttatagctagccctaccactgaccgacatcccctgccaccaactcctcaaaaggtctttaaacccttccacttttagccacatgttctcgaacctgaacagtgaagggcctcttcttttgccacccccctcgattatgattggaaaatgatctgatataggccgagataatctcttctgagtcacactgctgaactgatcaagccagctgggagaaaccaaaaatctatccagcctggcccaggcatgattatgaagccccccactccaagtgaaagagcccccttggaggggaaggttaattagcttaaggtcatccataacctgagcaaacctcctcatagctgaggtcaccctcccttgcctgcttctttctccttgagcgagaataacattaaaatctccccctacacaccatgggtcaccccaaagatctctgattgctccaaattcatcccaaagacactccctatcctctttggtgaaagggccataaacacccgtgaacacccagactaccccattttccacagttctgaatttacaagaaattgagaattggccctcctcccactccaacatttccaaggaccttttgtcccaacaaatcagcacacctccagctgctccagcagcttcaagagttctccagtctaagaatctccccacccctaagcttttaacataaagcctttctagtttagagagtatcctaggaaaatacacttattggcattgggatcaagcttactttgatgcttttggggaatgtgaacaaaggctgagcaatcaaatacctttggtgaaatggaggaaatggtcctaggttatgatttgagaaagacccaaactagtttacctagttgtgtaactggaattttacagtagacatatttaattcaagtagtctcccaaatcccatcattttcaaagaggataagaaaaattctaatccatgttgtggcaggtttttggtatgtctaatttgtacacaagcctcaccttagagctcttcagtctatgatcaattcctgcaactataacctactggagcagcatcaggaatttgtcttccatctacatacacattttgagaccttccagtctcttcatctatcagcaagaatttcagtcaatagcttatagagaccccctactaaactaatggctctaaaattcgtattatcctttgctccacctttcttcagtacaataaccaaaagagtagcatttaaatctctgctcagatgatccagcagcaggaacctccctcataaaattcatcatagcccccttaataatgccttcattatgttcaaataatgcaaaagaaaatccatctaggctaggagctttgtttttttttttttgataggtcatctaggctaggagccttacccccactagagtgtgcatggcatctgaagcatcctcttcactacaagccttctcaaggttgacaatcctctgcaccagtgtgcttgaacatgttaactcaagactaggttcccctggattcaaatatgattgctggaagaaagattgtactgatctcatgacatttgtctgataaatacaccccattatcagtaataccaatgtgtaatgcatttttttattttgttgagttattttgtgatgattcggtgatgctgtataggctaagctcactggaggtttttaactcggaggagcatcaaatttgttcctacaggaacacttttactatttttgtcatgctacgtgatacatattaacaaaggtgctggtacatatgcagggtttattaacca

SEQ ID NO: 12183 - DNA, 16711 bp, Vitis vinifera
  Intron number 1 from transcript GSVIVT01025997001 (locus G SVIVG01025997001) derived from phytozome v7.0 (chr-ID chr1 8; pos 26116201 to 26132911 reverse strand)
acatttattatccagtcaactcatcatccaatatagtaaattatttcgcaacaattaatgacaccatttttttaatagaaagataattagttacccctcttaattttttgaagaatctataatttagcattgtgtataatataatataatatacacttaatctatttaaaagtaataaaagatttaaaagtttattataatgttatatgacatccttgattttgtttcaatccaaacaagaaatactaaataaaaaacaaattattactagcatctgaaacttgattgctctctttttgccatatgaggattatgctcggagaagactaatagagtctttatcatctctcaataaactgtatgagatcctccacttggtcacatggagaatgttaaggacaatattccagactaattagtcacgtgatgtaaaaggatgttaaggatttaaacttcattaacttcttaccattactagtttttgaaggaaatttcataattttttttttgaaaatttaatgtttctttccctctattcaaattaaaattttatgtatataacttgcattgccttctttcatgcttctaaaccaatatattggatggttgatggaagatatatctttttacatatttataatatattattagaatttaataactggcataatttactatttgtagtactctaactattatcttggatttatgtcatgattctcatttttttccacatctcccattagtaatgacaatctttcaccaagcaattagttaaatattgcttattaatttttttcagacttcaacatatcaagaaaagatatttgaaatttcataataatagtaaacgagattctctctttattttaattttgtaattatatcaaaagataagtggttaaaagaggagaaagagaataaatgatatctataaacttctaaaaactacaaaacatttaagattttttataattgtttcggtaaaaactactaggaattcgtttataacaaccccatactcatcttttcaaaaataaatattgatcacttaaaaaatattcatttaccaacatggatgatcttaattttcagttctctaatttctagcctaattcacatattctcttttaagaaatgtccaacctatgtatcccaaaccacatccttttttaatggtacacgcatcaccaggtcaatccttcttataaaattggatttccctcttatatatatatatatattttcctttttgttccacttccaaccattgatttgtttgccctcttccaaaccttttgtagaggtataacttatcattttatttatatttgaagtaagctaatttatggtaaatactttctcttattatttcggatccatttagaaattattgaaaataaaaatatttagggcaattctcataaagtcctataaaaaataaaaaataaagaaaagaaaagcaacataactaaggaaaaggccaccgatgttggcccaaatgtaaaatatttaccacaatgattgccatgatatgtattgaaaatgatatttcaacaaagttgaagtacaggaactaatgcttaactattattttaaaaatccaattataaattttatttaagttaaagtttcaagagggaagaataaactatatattggattgtatccaattatatgtatccaattatatgtatagaggttaagtaactcaattggtaaggaagactccttccatatgggatattggcctcaattttgaagctctcctccattttgtccaatttaaagttcgtttggtagtgattttgaaaagcgtttttaaaatttttaatacttgaaaaattttattattaaagtgttagaaatactagaaacgttttttagaattactcctaaatatactcttaatttaagtctttaattggtcaaagggaaagaaacaaatgaaaagaaaaagggagaattgggctttagacccatttgactttgataattaataaagagtccttcaaacacccataattgatatcaaggatatgagatgggaatagacaaaaatactcacttgactcatttttgtctttattctaccacccttcacatgccactattctttcttatttaaccatttttgaatttttcattatccttttaaactcttttataaataattgaaaaatcaacattatttttttatttttaaattataaataaacaaaaattatattaatgattcaaagactattttggaaaatactttctaaaaaactattaatttaaataaataaaaattgcattttacatttatttttatcttttatattttagaagtaaataatttaatgattaaaatactatttaaaataaatatattcactattttaatttttaatattaaaaagtattttaaagtgtttttttactattataaaataaaatgtttattttttttaatcttcttttttccttattttaataactctttgaacatgacttttagtaataagttatatgaaatgttacaaatttgtttattaaggatttattttaatgatttgaattaattgaaattttattaaaataagaaaaagaaaaagaaagaaagatgatagatggaaagtttttattttaagtacttaattaaaatgttttcatatgaccgaactttagaagtggattatatcaatatatagtagagattgaatttttcttatataaaagggttgaaagatatatttacttattttagatgaaaacaagtagttaaaaattatatagattatatttgagtttggttttaaaatatttttctagtttttattttttatttttaaaaataatttttattttctatattgtctctttttgaaaatatttttaattaaaaaatgaaaactattttttaaaatgaaattgaaaaccttatttagtactattttttttatatgaaaataaaaaaataataaattttatttatttatttattgcgtcactgtataattgtactacactaactgtataagggaaatgtacaaaggtatacaaggctaccctttgtgaaatattataatcgattatgagtcattcctttattttttttatcactcatgaattgtacatatatctcatacactttatttaattcccgcatggaaattccaatatttttcctaataataatatttggagaaaattttttttgaccttaaatcatctaccatcttctcaactaaatcattgaaaatatggttaaacactcctacatggacatataacttaggagagatataaaatttgtgtcattgtacaagggtattacactaactgtacaagggaaatgtactaattgtacaaaggtgtacaagattaccctttgtgaatggttttaattgattctaaactacttttttattttccttgtcacccaatcattgtacacctatgtcatgcactttatttaactcttacatgaaaattctaatatttttcccaataatgatatttggggaaaaaaattgaccctaagtcatccaccattttctcaaccaaaccattgaaaatatgattaatacacctatatggatatataaattaggagatatatgaaatttgtgtcattgtacaagggtattacactaactgtacaaggaaaatgtgctaagtgtacaagggtgtacaagagtgtacaaggcttctaataggttttatacgatttttaaataacttgaatttgacattaagacgattattgataattttgtttttcttttttgaccaaactatgtcattaagacattctctacaaaaattaacacataggaaataaaattaaaatcaatcatgtttcaattgttcattataagtaaactaaatgaaatatatatttttactattttgcctttgtaaatataatttcattgttatcaatagagattaaaaaaatcatatttaaatggaattaaaaataaacaaaaattattgttataacatttttattttttaaaatcattaatttaaattatgaaattagttttaaagttaaaaatatttgttgtaattatagttttgaagatttcatttgttgtaattatagttttgaagatttcatgatttttatcttattactttgaaaattttgctttaataagaaagtatttattttaatggttttaaatatttaaatctttattaaaaaatatttaggattagtgtggagagaaattaggtaattttggaatggagaaattttgaatatttttgaagactttaattcggccaattaccctatttacattttcaaaattattggaaggttggtaaattagtcttataaatattgtcttcttgattaatattatatatatatgcatgtgagtatttacattatattcaaaaaaataataaacaccatatgcctaatttgcaagttagaaaaaaaaaattaataatattttatgtggtatttaaaaagtatttattatatgttctataaatttgaaaaaatataatatttgatgatatctaatttacaagttagagtaaacaaataatactaatattttaggaggtgtttaaaaattatttaatatatatgagaaataatataggtttgaaataaagaatgatatttattatatattatgtaagtttgaaaaaaagaataatatttgataaggtatttaaaagttattcacttcaaaaatacatttggtaataataatttttaaccatctttcatatttgatgaagaaaaatgattcaagttagttccactattaaataggtgagataagggtaaaagagtcaaagagaaaatgagaaaggtgaggtgattggttagtttcttcatttaatagtcaagggtattttagggattttttaaagacaatatccttactctcaatttccactctttcattgggtgttgggcttaaatacgaaacttatatggatcatacattaatttttgggcctaattgggcccaaaacacaattttcccaaagaaaaattcaatactatcatggaaataatatccaatatcagttacattttcatccttgatcacaatggcacttttttggagctattattgttggacacttgagaaggaattaaggttcgttttggtcttttgggtccaaatagctaagagtagggcaccaaatatttatttatttattcaaatttaaatctaaatgcataattttaccgaattagaaaagaaaaaggaaaatgagtgttggttcgttggtactaaacccaacccacaaatgacaaatactgataccaaaggataactgaccaactacataaacacaaaaatgatattgaataatctctgatttttttttttttttacttttaggggctaccctccttcccaaaagtttagaatatttattacaaataataattaattttatagcacttttgtaaacagtaatttcataaagtccttttatgatactagtttttagtaatctatagataaaaaagttaaattaagaattactttgtgaggcttaaatctaccaattattgaaaagttatgaatttgacaatagtagtgaacgagacataattgtaacacctctttaatcgtattatcataatagggatagaaagataaatattaaagaaaagagcttttttcaataattatcaatttcatttaatctttgttgacttgtttcataaatttcacttttggcatttattttgaataatttgataacaaagaagaggctctatatatggtaaatatgagtatgaaattactctttccatctgctttatgatttatgtactcatttttaacttaatttatcgaaaggtggagatgtgaaaacaacggtgttggactattctctttttcaaattttatttattttttcaatttttctatgatgagaattatggtattagtattttcatcttgccacttaagaaaccaagtaagctactatcttatttatatttatattgaaaacagtttatgataaaatgatattaacaatatgagtaagaatttgtaacaccaacaaaataaataaataaataagggaaaaactcactaaaaagtaatgaaacctatccaaagtataacccaaaataaattatgacttttcaccaagccccataaaaaaaatgcacaagggaaaaaaccaagaaaggactacttatgttggttaacaagggtatttttttttctttttgtgaagtcttattttctacctattaaggatcttggaaatttttatgattgagaaaaagtcaattcaactctcacttcttccttttactagagaaagagctcaagcattaccttgagtgttctccataataatgataaaagtatcaatggttcaatgtaattggttcaaatgaacatcccactaccattggatggtgaaaagaaataaagtgaaaaaatgaagttgtttgatatgaaaatgctaggaaattaaggtgcttttgaattttatggtgggtggctccttgtattcttttaattaaaagcaacccccctccccactcattatgttttgaccaattgtgaacatatcactcttgttacatctcataaaagaatgagcaattaattttatataaaaattagtaatataaatacataattaatattgttttagtttaaattttattttgtcacaattgatataccttgggtcacttagatgactaacaaaactttgtgatccgattctttttttttttaaggtatactttactttttcaaataaatttttgatttaaaaaatatcataaatgaattaatatgtaatttaaactagaaaacacaacaacaatatttttaatatatgtttttataaaatttttatgaataatgctttttctttttttaagatggaaatttccaaatattcaaatacatttgtggaatctacggtatagttgcgtagaaattatagaaggatattatagaatggccagatgaggaaagaaaattgaaaaatcacatgcttatgcgtttggagagacaatgtttgctttttacatgtgattccagaccaaaaaggaaaaaggaaaaagaatcacttgctttcatgcattgggggaaccaatgtttgttttttacgtgtgaatccaacccacaaaaagagaaacaaaaaaaggttttgtttcatataaggacccaaagatgctgtaggcatatgaagtatggactgagcacgagttaatcctcaactcactttaatctttcatccaaaaaatgtccaaacaatggcttcctctacccaaaaacccttttcttcttctgttatatttatataaatatatatatattgttggttaaaaataaagtgtaagaagagttacacttttgaaaaataacttttgaaaataaagtgtaagaagggttacacttttaatgtgtgaattaaacacatgattaaattttgaaatgttacaaaatttgaaagattgaggaagacaatgagtcttctcatctttataactttataaacttaagaggttaagtgtaagagagttacacatttgagattaaatcatgtttaatgtgtgaattaaacatatgatttaatttattgaatgttacaaagatgaagtgattgaggaagacaatggtttttttttttctcatccttgtaaccttttttcaaccctaagagtgctttatatgacttttcttctttttgaaatcttatgcagaaaagtaaaaaaggcttgatcaatcccaagactatttccattagttccctaaagatttctagaagtgggaggaaatagagtctttggacaaagttccaaaaacttgtttgagtctttcttgtgttcttcttcttcttgttcttattttgtaactttgagagttttttgtatcaaagtgagtgtttgagagtgtttcttttctccattgtatccaaatttttcgatcaatcaaagactctattttttcaatggaaggagagactatcaagattatgaaccaagaccttgtgaggttggatcgttttgatggttccaacttcactaggtggcaagacaaggtgagattccttctcacaacactcaagattttctacatccttgatcctaccttggcaccgttaccggaaccaaaggaaaatgacacacctcaagtggtggcggcaaggaagaagagggaggaggatgagttcatatgtaggggtcatattttgaacgccttattcgataggctatatccttccaccaagatctaaaccaatcgggtgcaagtgggtatttcgaaggaaatatcacatcgatggcatgattcaaacctttaaggctagattagtagccaaggggtttaaacaaagagaaggtattgattattttgatacctatgcgccggtggctagaacaacattgattaggatattgtttgctttggcatcaattcataatctatttgttcatcaaatggatgtcaaaacggcattcttgaatggggatctcaatgagaaggtctacatggaacaaccggaaggttttgttctactggggaatgaaaacaaagtgtgtaagcttgtcaaatcattatatggtttaaaacaagctcccaaacaatggcacgaaaaatttgatcatgctattctttcggatgaatttagacacaacaatgtggacaagtgcttatattctaagacttgtgatgactatatggtcatagtgtgtctatatgtggatgacatgttaatcttgagtgatgacatgaaaggaataatagaaacgaaaaggtttctatcctcaaccttcaagatgaaagatcttggagaagttgatattatattgggtatcaaagtgaaaagaaatagtgggggttatgctttgaaccaaacccactatattgagaaagtagttaacaaatttagtcatctcaagattaaagatgttaatactccatttgattcaagtataaaacttgaaaagaatgatggtagatcgatggctcaacttgagtatgcaagtacaattggaagtcttatgtatgctgctcagtgtactagggttgacatttcatttgcagttagcaaactaagtaggtttattagcaatccaagcgcggatcattggaaacctattggtagagttcttggttacctaaagaatactaaagaactaagcctccaatattcaaagtttcctactataattgaagggtattcagatgcaagctggatatcgagtgtgggagataatttatctaccacaggttgggtgtttacacttggtggtggggctgtctcttggggatccaagaaacagacttgtatatcacactcaaccatggaggcagagtttatagctctagctgcaactggaaaagaagttgagtggcttagggatctcatgatggacatcccttttactgtaaataatgtgtcaacagtgtcgatacattgtgacagtcaagccactctagctcatgcgtatagtggagtgtacaatgggaagtctagacatataagcattagacatgagtatgtaagacaattgattcaaaatggaatcatctcaatctcatttgtgaggtcaagtggaaacttggcggatccttttactaaacctcttacaagagatttagtaaggataacatctagagggatgggactaaaactccttaaataaaactcaccaatgatggtaacccaacttaatactaagaaatgactagtcttaagttcaataggtaaaaacaagtcattgataagtgggttgtggcagcattaaaacatgtgagttccatctgtgatgattaatgctggttgttaccgttggagggttaagcttaaagcttttaatgaaattcagtctatgtgtgacaagcatcttaaaggtaacaaggatgctggaagaatttcacctatgtgaacttaggggtggtgccatctctcatgagagttggagtttctttcaagaaagttcatgaatggattgagcacatggccataaaagtgctaagcaagaaaataatgggcactcgtgtggttagtggaagtgtgtgtgttgttaccggtttcgttacaaggaataactggttcaatgctacaagcaacctgggatttcaacgaagctttgtgacaattacactaaggtaaaattcaaatcgaaagatattttattttatgcattttcactgttaaagttataagggttgatgtttatttttaaccaagtggaggattgttatatttatataaatatatatatattgttggttaaaaataaagtgtaagaagagttacacttttgaaaaataacttttgaaaataaagtgtaaaaagggttacacttttaatatgtgaattaaacacatgattaagttttgaaatgttgcaaaacttgaaaggttgaggaagacaatgagtcttctcatctttgtaactttataaacttaagaggttaagtgtaagagagttacacatttgagattaaatcatgtttaatgtgtgaattaaacatatgatttaatttattgaatgttacaaagatgaagtgattgaggaagacaatggttttttttttctcatccttgtaaccttttttcaaccctaagagtgctttatatgacttttcttctttttgaaatcttatgcagaaaagtgaaaaagatttgatcaatcccaagactatttccattagttccctaaagatttctagaagtgggaggaaatagagtctttggacaaagttccaagaacttgtttgagcctttcttgtgttcttcttcttcttgttcttattttgtaactttgacaattttttgtatcaaagtgagtgtttgagagtgtttattttctccattgtatccaaatttttcgatcatcttccacctcaatccataaatataacttcgaagtgttcttgagttttagaggtgaagacatccgcaatgattttacggatcatttattcgtaaatttggatgggatggggattaagactttcagagacgatcaacttgaaagaggagaggagatcaaatcagaacttttgaaaactattaaagaatcaagaatttccatagttgtgttctcaaaaaactatgctcgttccaagtggtgtttggatgagtcagcgaagatcatggagtgcagggaagaaatggaacaaatagtcttgccagtgttctaccatgtggatccttctaatgtgcgaaagcaaacagggagcttcggagaggcattttccattcatggaagaaatgtagatgagaaaaaggtgcaaaggtggagggtttctttgattgaagcaagtaatctaagtggtttccgtgtgaatgatgggtaacttcaactttcttgatttgtgcttttgatttaacttgtaaggatttagttgtctaaaatcacgaattaagaagttaataatttggatcagtcttaaatcaatgactgatagtagcttctaattttgttttggaaggagtttgatgagcatgttaaatagagatggatcacaggaaatataggaatcagtattcaaacaaaatctaggattaattcatatatattgtattcaggtaaataatacaatatagttaaatcatattacacctgtcatgactcatgtgattatgtattgttgaagattttaaaaactattttcgtatatttggataccagtgagaaaaacaatttaggttatgtttggttccaaaaagtactaaggaaaaaaaagaaatattaagggaaatgttttttcatgtttagttttactatgaaaaaaaaaatcaaatataattaaaatcagttagaaatttatgttttttaaaattatataatctttatataatgaagaaaaatgagtttgaaaaaaacgtataaaatgatttattgactttaaatttaatttttatttttcttcatttttccttttcttttacttttcctcccaattttatttttctcacattttccttcaaattttctaggaatagacatagtcttaagaagaaaaaaatggaaaagggaaaatgttaaaagatttttattccaacttttattaaaaaagatgggaaaaatcatgtttcttaacaatttaatttctttcattcaacttttccataagtaataaatcaaacaaagtagagttcttcaaatttattcaatggggaagttcaaattcattcttcatacattaagttattttgattttgtataataaagcttggtttgtgatcttattaatattaggctcaaaacttgttgccttcccattatatgtaaaatgctcaatatattgggtttttttccccttaaaattaaaaaaaaaaaaaaatcttgtaattaatgaattgattaataaaactattctcaaatgacactaatgtttgccaagtagatctacggaacttaatattttttactttaaaaaggtattcttttataattattttttcatcaaaggcaatgtttgttttttatatgaatttcttaagtccaaatagatctaaatatgattaagtattaaggtattaagttgtttatttttatatatgtttgaatgttatatattatttttatatatatttaaaacatctataaaattaattattaatttttttattttaatttgaaaaatagtaattgaacttatttccaaatatctcaaaatataagaatttattaccttaataaaaatattaaaataattaattatacaataagttaataatttgatgattggataataattaatatttctaattcgaaattttccttagttaatacttttcatatagatttataattaaaatatgtattttattattgagattaattcattaaatttttttaaaatttttaattaaagtaagagtatcaaatcctaactttttatttctcaaaattaatggaaattattgattcttaaggatatttagatgagtgtaaattatcttttgggattttaaaatttcattctaattgatgcaacttattttggatttgttataagatataagagattgaattctaaaatttatattaaattaatttctaatcaaattttatgattttagtgttatcattttcatttctaaatgaagaatcgatagaaatttatgaaatataatttcactaggaattagataaattatgaggcaaaaatattggcaaatatggtagaatttcggtttggattttgtaattttgtatattgtgtaattattttttattaatttcatatccaaattaagtgatttttatgttggcatgtcggttttaactttggaattttgtgtaattatttgttattaatttcttatccagattaagtaatttttatattagtttcattgttacataacaatttataagataattttagatctaattttcttgacaaacaaaataaagaatagataaaagtaaaatttaattcaatcatgttgatttttttttcttgatgacaactttactgatttcttgatgacaactttactgatttattgaagtcgcaaaaaattacagtagcttagtttgtttctaaaacaaagagctatccaaaattttaaaaaataaatttagtattatttatataagaaattagatgtaagcattgtaatatatatataacaaaattattttaaaaaaaaaacaaaagggagaaaaaacaacttttatcgtaaagataaaagttcaaaaagttactcttttcagtaagacaaaattgtcttaaaaataaataactccaaaaatatcataagtcttaaagtgacttactttaaaactcaattgaaaaaacaaacaactcattattaacaatctttatcaacaaataagtaaacttctaaaattttccatctaatattatctcttttggcaaaaagtggacactaccattttaacttatccaatgattgaaggtagatagaatctctagaccaatagaactatgaatggatcatgagcaacttattgttaaaataaataagctaattttaaaaaaaaattattagattggtaagtttgaatgataaaatggtagcttcacaccgtggaaaatagtagttgtctccattaatgcgtcaacactagaatttcgtacaaacaagggttaaacataacaccctagatagattaacttcctaatgaaccttccaagctattaagtagagtaagccaatacaactagtaatctcatatttttttctctactttattctttggcatgtacccttgttacaacattagtagtattgtacttaaatttaacaaatatgttttagtccattttagtactttacatcctatattctccttacttgtgttatattgacaaaatcaagtaaatatcactagatttacttcatatttgtcatcttttacaattcattataactcatgaagtgttaaattgtactttataattggcaagtatgagtcaaagcacattaaagaaacgagatttttaaaagattgaatcctaagcttttgcacattgacgatgatatagttaggatagatttttgcctaaaagaactaaaattattgttaagtagtcacctgaatgatatttgtgtgattgggatctatggaactggtagaattggtaaaactaccattgctaaaattatttataatgagatccattgtcaattcattggtgctagctttctttaagatgtcagagagggatccaaaactagttgtcaacttcaactacaacaacttcttcatgatatagtggggaaagatgtagaatttagtaatatcaatgaaggaatcaatataataaagggcatacttagcttaaaaagattcttattgtaattgatgatgtagatcatttgaagcaattagagtcattagctagaagtagaattatcataacaactagagaccaacatttgttgggtgagtatggagtggatatatcatatatggttgagcaattatattataaggaagctattaaacttttcagtagacatgcctttaaacaaaatgttcccaaagaagattatgtaaacctctcaaattgcttggtacattatgctcaaggtcttcctttaacccttaaagttctaggttcttctcttcaaggcatgacgataaatgaatggaaaagtacattggataaattaaaaaaaaaactctaagaaggaaattaatgatgtgcttagaataagttttgatgggcttgatcattttgaaaatgaggttttctcggatattgcatgctttttcaaaagagaatgcaaagatattgtgatgagaatatgagatggttgcaatttatttgcaacatgcggcataagagttctttgtgatagatgtctagtaactatttcagataaattcatacaaatgcatgacttgacaaaacaaatgggttgggaaattgttcatgaagaatgtcctggagacccaagcaagtggagtagactgtgggatgtagatgatatttatgatgcattttctagacaaaaggtatgaattgaatatatgaacttagttatttagatatttataatgcatttttaaggattaattacctataaaattttagttaggatttttatcttgtgttgttcctttattcttcattcttatattccaggggatggaaagtattcaaaccatatctcttgacttgtctagatcaaaggaaatacagttcaccacaaaagtgtttgccaagatgaagaaacttaggttacttaaagcctattgcaatgatcatggtggtttgataagagaggagtgtaaagtcttatttcctaaagactttgaatttcctcataatttgagatatcttcattggcaaggatgcactttgaggtctttgccttcaaaattttatggagagaaccttattgaaatcaacttgaagtctagtaacataaaacaactttggaaagggaataaggtacaatcattatttaatttcagttttttctttataataatttgaagttgaagaaaacttttttcttaaaatattttcttttgtcacagtgtcttggaaaactaaaggccattgatctaagtaactcaatatggcttgtcaaaatgccaaatttggagagaccaaatcttgaaggttgtacacgttggtgtgaatttcattcatctattggtgatctaaaaaggttgacttacttgaatttaggaggatgtgaacatctccaaagtttcccaattagcatgaagtttgaatctcttaaagttctttatctcaatggttgtcaaaacttggagaattttcctgagatccatgggagtatgaaacatttgaaggagctttagttaaatgggaatgggattaaagaactatcaagtagcattgtgtatttagcatctcttgaagtccttaatctctcaaattgttcaaacttggagaaatttcctaagattcatgggaatatgaagttttttagggagcttcatttaaaaggatgtacaaagtttgagaaatttccagatacatttacctatatgaggcactcaaaggagcttcatttatgtgagagtggtattaaagaactcccagatagcattgggtatttggaatctcttgaaattcttgacctctcatattgctcaaaatttaagaaatttccagagatcaaagggaatatggaatgtttaaaggaactttcttaagataagactgccattaaggaactcccaaatagtattaggtccttgacatctcttaaaattctttcac

SEQ ID NO: 12184 - DNA, 8484 bp, Vitis vinifera
  Intron number 18 from transcript GSVIVT01010214001 (locus GSVIVG01010214001) derived from phytozome v7.0 (chr-ID chr 1; pos 17606569 to 17615052 reverse strand)
caattcaccaaaaggaaaaatatattcaagcaaaggtacttaatttagttcttgttagtcttgtatggaactgtatattcaattatttagtttcttttcaatgtgatcatagctattttacataacaatttccttatggaattccaattttatcctatcctttctctcacatacactctatttggctaggatacttggatgttttcattttgtgtcaacaactatatatattatcagtcagactattcatcgatatgaattttaagtaaaaaggatgagaaatcctttcaaaatcgaaaggatgataaaaaaaaaggaggaataatcgaacaaagtattgagatagttcataccaaccaagtataaaacaagaacatggacaagatatgcaacaatgtacaatttaatgggtaaaaaatctcatttaaaagaaactattttcttagttccatgtttggctaacccatctacaacttcatttgttgaatgagaggaccgagagaaggaataacctaagctactagctagatcaaatatttgatagtcatatgtcatacttccaaggacctctctccgacttagatacccatgagattgctactgtgggcttggttgcctagagcacacccatcaaagtttaacttaatcaaaaccaatggaggtggagtccttactgaaaacattttacaacctaccattttttacctacacaccatgttgcaatcaaactatagaatattcaattgagtgtgctgaaaagctatagtagaagaagcataaaagggtgaatagaaatgtaatcaaattccaaataaattctgaggtcctctatatatcctaaaaaaattgttgcattcctctccctaaacaatttgtaacaatttgagggaagccacaagccaaagcatccttcctctaatagtatccccaaatcctctaaaagaataaacaatgtatctctcacactattgaaaggaacctaatgtattccaataacactaaataacctattccttaggctcaaagtcactagacaatgtaagaaaagatgctgaatcgattccttgctccttaggcacataacacaacaatccaggttgagaactttgaaagacctcctcacttgtagcaaatcattggtgttaaactttcttattggcctctaacaatgcaagggccttgaccttaaatgcagctttagagtttcaaatgaaattgaccaaaaaaaaatcaagagtttggaaagagctaaaaacaaagacttttacaaaaaataagtttggggaattcaatgactaaattctctgatcctcgatggaaggtaataaatccacgaagataagagataacatgagaagttcaagttgttcaatttttgagttattgaggtttctatgaaactgaaattccagttcaaagagaaagaagatctagaatggatgaaatggaagagcctcttactcttacaattatgagaagggtaggaatttgagtgcaaagtagctaacctcccagccataaatcttcccaaaagtgaacctttgtaccatcacctatagaaaaatgagtataacttgaaaatcagagaaaacttgcaaaatgactttccaagaaccagggtgtgactaccttgattgcgtcaactattcatgtctgaataactcaccaagtacacgtctaaatagaaagttagcaattgtgtccctgtatatgcagatgaggacacatccaacaaacaaaaacttcatcaagtatctaatctctattttagagtccactcactgccagtagttgaagaaggctttatgtcattttaaggtcctttcttctggtcatcttcaaaaatgactgtctgatggatgatattccctggcatagttgatatagatgtgctacattacttttacataagtagttccggttaaagtcccaaatatgtaaagtgcttgataaaagtgaataaaaccttatcccttctgggttaatcttctacttatttgtgaaattccacatttttaattaaataaggtgttgtctgcacatgctttgtctttaccagttttgaaaattaaaatgtttcttcaattatgtttttatttttaataatttttttctatttttatagatattaaatattttggtagttcaaattttgttgaaaatcaatagaaagattaggctcccactcttgcaagaacggactaacaaggtcaactacttagctaaccttcataattaaatactaatattttggtagttcaaattttgtttcttatttataaaaacaatgacatgcttagtaaatttgtacaagaagtttaaaaaacaaaaaaacaaaagaaaaaaaaaggatgattttccaataattttttgtgatactcaatggttttaatattcacaagtgagacacaaatgttgttggttcagttaaaaaaaataagaatagataaaaataaataaataaataagatgtgggcgagtcatgggtgttaattcctcaattttaattctgcttcaaaaaaaataatatctttaggatctgtttggatacacttccaattttatgtttttaaaatcagaaaataatagaaacttttatataaaatccaaaaattcttggaggcttacattgaaaaagaaatggttttaaaaactgtttaaacaaattgaggtatcaaaaattttttaatacctcaaattttaaaatttttgaaagttatttttaaagatataagatgaagttatattttttgtataaaatgttttacttttacattgaagtttctaatttaaaaataggaaacatgaagttcttccaaatggacacttatttttaaaatttatgctatcaaattttaaaatgaaagtaaaaactactgaccaaacatgattttcaaaattgctttcaaacttttaatcttaaaacagtagtgtaatcaaatgcatcctaatttgttcaataacaataaaagtttgttttcctcaagttagctgctagagttctgtactttaatgtaaatattgcttgtatataaaaggctataattttttttcccatccttcagggatgtttggtaggtactgttgaatataatgtatgtattgtatagtatactatctttccttgttaatataggtcacatgtatggtagttaggactcctagccttgtatatatatatctctcaattgtaagtagagattacaatgaatgagaataaggtttttctcctctctctctctctctctcaacatggtatcagagccaaaggagaaaacctaattttttcagtttagccgtgtactcaattccggcgaaccgtcaagtgaccgtgttttcactccggtcccctcactctctttccgaaccaccccgaacaacctcatcgccgtcggatctccaccacgccggcaaccttttccggcgaaattttccggcgacctttttttccgggaaaagaccacatattccgaacagccggaggctgatctacacgccagtggaaaccccatcggcaaccggcatctcacgcgcccccacgcgccgcccttctcctccggcctgtcacccacgcgccggcacgtgacggcgcgtggctcactttccggccacttccgacacctctccaggcttgtccggcgccgtcttggccttctagccctccggcagtcctccccgagccctgcatctccattttttccctgtttttggctttcttgccattccggccacctccgacagggctccccctccatccccgaggcttgggtgctgcttctcttcctctccaggcacgtcacgaccttttttctccattgattgcacctctcacagccatctgaacccatcttagggctctcttcgatccaaatacgtgaatatgaccaccaaaaatcagatctttacgtctgttctctctggatctcctctgattacctcagagaaattggttggcagtgagaattatctctcctggtctgcctctgttgaactttggtttatgggtcaaggatatgaggatcacttggttacccaggaggcagatatccctgaggttgaccgcgtacaatggaggaagatagatgcacagttgtgtagtgtattatggcaatcggttgatccccggattcttcttcatcttcaggcctataaaacttgttttaaattttggactcaggccaaaggattatacacgaatgatatccagcgtctttataaggtggcttctgctattgtccatctcagccaacaggacttggatctatccacttatattggtcagattgcctcgcttaaggagcagttcttgactgtgatgcctcttactcctgatgttggggctcaacaaacacagcttgacaagttcttcatggtccttactcttattggcctccgtccggatcttgagcctattcgtgatcagattcttggtagttcatcagttccgtccttggatgatgtgtttgctcgcctcctctgtatctcgtccactcagaccttgccatctgatagcgcttcagattcttctgtgttagtttctcaaactacctctcgaggaggacgcagtggtacccgaggtagaggccaacgtcctcattgcacctattgcaataaacttggccacactcgcgatcgttgctatcagttacatggaagacctcctcgcactgcccatatggcccagtcctctgattctccgctgcctcagcctccgagctcctccgcatctcagacatctcaggcttctattgcctctgttgcccagcctggtaatgcctctgcctgccttacccacacatcttctcttggaccctggattctagattctggagcatctgatcacctatctggtaataaggatcttttctcctctattactactacctctgatttacctactgttaccttagctaatggttctcaaactgtggctaaaggtattggtttggcccttcctctgccttctctacctctcacttctgtcctttatactcctaaatgtccttttaatcttatttccatcagcaaaatcactcgtactcttaattgctctattaccttttctgataaatttgtgaccttgcaggaccggagtacggggaagacgattggcataggacgtgagtctcaaggcctctatcacctcacctcagattcatctcctgcagtttgcatttccactgatgctcctctcctcattcacaatcgtctgggccaccctagtctctccaagttccagaagatggttcctcgtttttcaactttgtcgtcgcttccgtgtgagacatgtcagcttgggaaacatactcgtgtctcgttcccaaagcgtttgaataatcgggcaaagtctccttttgagcttgtccacactgatgtttggggtccttgtcggactgcgtctactttaggatttcagtattttgtcactttcattgatgactattctcgatgtacttggttatttttaatgaaaaatcgagctgagttattctctattttccagaaattttatactgaaatccaaacccagttcaatatttctattcgtgtgttacgcagtgacaatgccaaggaatatttttcagcccaatttacttcgtttatgtctcatcatgggattcttcatcagtcttcttgtgctcatactcctcaacaaaatggggtagctgaacgcaagaatcgacatcttgttgagacagctcgtactctcctcctccatagtcatgttccttttcgcttttggggggacgctgttcttaccgcttgttatttgattaatcgtatgccctcctctgtcttacacgatcagattcctcactcccttcttttccctgaccaaccactttatttccttcctcctcgtgtctttggttgtacttgctttgttcatattctcactcctggacaggacaagctttccgccaaagccatgaagtgcctcttcttgggatattccagacttcagaagggttatcgttgttattcccttgagactcatcggtactttatctccgctgatgtcaccttctttgaggactcaccattcttttccaccacttctgagtctcttcctgtttctgaagtcttgcccattcccattgtctccccacctgatgctatgccccctcgaccacttcaggtttatcatcgtcgccctcgtgtcgttgctcctctcccttttcctgaggcacctgctgactcacttcctatcccttcggcttcacctgccccggctctgccttcctctaatgacttacctattgttgttcggaaaggtactcgctctactcgtaatcctcatcctatttacaattttttgagttatcatcaattatcttcaccctattctgcttttgtttctgctatatcctctgttcctcttccaaagagcacccatgaagctctttcccatccaggctggcgacaggcaatggtggatgaaatggctgctctgcactctaatggcacttgggatcttgttgttttaccctctggtaaatctacagttagttgtcgttgggtctatgcagttaaggttggtcctgatggtcaggttgatcgccttaaggcccgtttagttgctaaaggctatactcaagtttatggttctgattatggtgacacattctcccctgttgccaagattgcttctgtccgcttgcttctctccatggctgctatgtgttcttggcctctttatcagttggatattaaaaatgccttccttcatggtgatcttgccgaggaagtttatatggagcaacctcctggttttgttgctcagggggagtctggtttagtgtgcaggttacgtcgttctctatatggcttgaaacaatctcctcgagcatggtttagccgttttagttctgttgttcaagagtttggcatgcttcgcagtacagcagaccattcagttttttatcatcataactccttggggcagtgtatttatctggttgtttatgtggacgacatcgtcattacaggcagtgatcaggatggtattcagaaactaaagcaacatctttttacccactttcagaccaaagacttggggaaactcaagtatttcttgggaattgagatagctcaatctagttctggtgtggtcctttcccaaaggaagtatgctttagacatcctggaagaaaccggtatgttagactgtaaaccggtagacacacctatggatccgaatgtcaaacttgtaccaggacagggggagcctttcggagaccccgggagatatcgacgtctcgtaggtaaattgaactatctcaccattactcgtccagacatttcttttcctgtgagtgttgttagtcaattcctacagtcaccatgtgatagccattgggatgccgtaatccgtatccttcgatatatcaaaagtacaccaggccaaggtgtattgtacgagaacagaggtcatactcaagttgttggttacacagatgcagattgggctggctcacccacagatagacgttccacttcagggtactgtgtttttattggaggtaatctaatatcttggaagagtaagaaacaagatgtagtggtcagatctagcgttgaagccgagtatcgagctatggctttggcaacatgtgaactcatatggttgagacatcttcttcaggagttgagatttggaaaggatgaatagatgaaactcatctgtgataaccaggccgcattacatattgcatccaatccagtctttcatgaaaggaccaagcatattgaagttgactgtcatttcattagagagaagatcgcatcaggatgtgttgctacaagttttgtcaattcaaatgatcaactagcagacatcttcactaaatctctcagaggtcctaggattaaatatatttgtaacaagcttggtgcatatgacgtatatgctccagcttgagggggagtgttgaatataatgtatgtattgtatagtatactatctttccttgttaatataggtcacatgtatggtagttaggactcctagccttgtatatatatatctctcaattgtaagtagagattacaatgaatgagaataaggtttttctcctctctctctctctctctcaacaggtaccttggcctcctagaaaatcctgttgcttgaatacttcaagacagatgtcaagagtaaaaatagcagagatatatgttgttttcacattgtcatgtgtgcatatgcttcttttagctgcttaatctttagcatatgaaaatgcaattacaggtcttgatcatgatttttcagctatatgttggttcatgtgcacaacttcttgtcatttgatgtttttgagagaatgaaagaacatttgaatgcctgatattccccatgtgcatggcatatgaaactgtcatattaaactctttctcattagcctttaccgtattgtgttgtacgttggtgagaggatgtgtgtcagatatgaagcctgacattgtttgctctaatccagt

SEQ ID NO: 12185 - DNA, 3120 bp, Vitis vinifera
  Intron number 5 from transcript GSVIVT01024075001 (locus G SVIVG01024075001) derived from phytozome v7.0 (chr-ID chr3 ; pos 1315134 to 1318253)
accttctatcatccagccatccagagcacgtatgtatgataggaaagatactcattttggtgatttgaaatcatattctatacttttcaacttttgttgcgcaatgctgttctgtgctttcagtggaaaggtagctcatccttattgtttctgataaaaaaaaaaaaaaggatgttcagctggatttactaagttacctgttgagtgcctcgtgacatcctctgtatagctcctgtctgctttgatgaactttttgctaggtttggtatatattgttggtgattgcatgggagggggggaacaaagttacctgttgagtcctttgaatgacttgtctagcatgcctatctatttcatgtctctcttttgcatgccaagaaaagtgaggttgagattggaaaagatacagagggattttctttggggtggtggggctcttgtgcaaaaactgcatcttgtaaggtggaaaacgacttgtttggagaaaaggaaaggtggtttgggtgtgagaaatctctctctgatgactacaaccattttatgcaatgcaagtggagttggcggtatgccaatgaaagggaggcattttggaaacatgtcatcaatcaaaagtatggtgaagatgatggggggtggagttcccgcgaggtgagtgagaggtttggtgtggggttgtggaaaactattaggaaggagtgaaattatttgagtggcaggatggccttccatgtgggcaatgggcagagagtgagattctagatagacaagtggtgtggagataagctactttgtgaatcatttccttccttatttaccccttctttgtctaaggaagcttgggcgacaggtgtttggaaccctgaaggtgaaggggatggatggactcctcttttctcaaaagcctttaatgattgagagttggatttggtggagcgttttctgcaaaagattcaagcaattagggttcatagggatgcggaagatagagtggtttgaacagcttcgaggtgtgcgatctttttagttaaatctctctattctatcttggagctcggagatcctccttggttccctagtggtagtatgtagagattgagcgcgcctccttaggtggctttctttgcttgggagtctttttgggggaaagttttaactctagaccaacttcaaaggaaggggtactttttggcaaataggtgtttcctttgcctctttgaagcagagacggttaatcaccttcttcttcactgtgcaaagactcgagtgttttggaatattcttttctccctctttggtctatcttggattctttcttattcagtgaaggaaactcttcttgggtggcatgggtcgtttgtgggtaaagttcgtaaaaaggcttgacaaacgacccctttatgtatattttggacagtgtggaaggaaaagaatttgatagcatttgacaatgaggagttatcgatccaaagattgaaagattcttttgtttgtaacctgtggtcttggtctagggtgtttgtagatatgagtcctatttctcttgtaagtttcattgattggttaaactctaagtaaggacatgtgatgttttttgcttctttccttccccctttggtttgagtctttaagcttcttttatatacttcctatatactttgaaggcactgttttttgtgttcctctttattttttatatgacttttcttcacctataaaaaataaataaatcacaatttagtttgaaaatcatatttgttgtcaatgcactctaattttatcacatatgtattactttattgaaaaaactagtttagcatatgaagtattgcttgtttttatcatttttaaagtttcattcaaaatttctatgtttcttttttgataaagttccatcattttttttttcaccttttacagatatttccattgatatcaaaattgccattcatatttctgtaaaatccaatcattgatatttccattgatattgatattttgagcatttgctgaaccacaatactctcagcatcgtacagttttgctgtgcggtgtgtcctgtccaaccataagtttgcaatcaaggatagttaaaataaaatatattaacagtactatgaaggataactatggaatatggatctatcaaaaaagaaaaaagaaaaaaaaaaaacaatggaatatggttacattttgccgccttagggatgtgataaggagttaaggatgtctaccattgtgtcctgtcatttaatctaactagacttatggcatttgatttatttgagctattgggcactgtagttaaagttgagaataggttatgctgaggcttcaactccttcgagaaaaaggttttctcctggccaaagaagtgaactattgagcatgtgttaacatagttaaattttgtagaggagagctacctaattgaggaaaagcaagtagtaacaactataatggaactacacttattggcttgagtaactggggattattaaaaaactgtttgagcatcagttctggtcttttttgaatcattactgttgaacttggtatcatgagaaaggagaaatggaaaggacattgtaaccataatataattaatgttgctgcacaagtgattgtaggaaaattagaaatatatgataatggatattagatgcctaaatcccaacaaagtatatgccattttatgttgtcaccagaaagggcccacctgaaggttttccatcccagaaatgatagcgcattgagattattgtagatatatttaagcatatacatattggtgcatcagcaagattcaattattccaatagactgaacatgcatctgttataaaaaaagtcttgtgtctgtttgttgggtacagaactgttaaggtttcatggaatactggactttcatcattttcttgttataaattattttgtctcgtattgtgtacattatatggttcaagaatataggtgcatcttatttgaaaacaaggagttatgactaatttaatttccatttggttatcattgttacttcactgatacttgttcttccattttattcataacttttaatttctatcatggacaattctcttcaggatattgacctattcacttt

SEQ ID NO: 12186 - DNA, 16521 bp, Vitis vinifera
  Intron number 2 from transcript GSVIVT01013265001 (locus G SVIVG01013265001) derived from phytozome v7.0 (chr-ID chr2 ; pos 6040872 to 6057392 reverse strand)
tcacatacacggtatgcacacttttagtgattagttagtagtggagaacaattcagttcattgcatatttatatttgagcataattgtgaaattataaaaatgtttaagaggccattttcttgtatagtgctaaaagtcatacaaaagctcagctaagatatgaaaatctcaatcccactaaaaaaaaaggctggatgcattccttggctattattttcattttgaggtggaacctccaccttttggacaagttacagttccactctttggttggttgagatatgagtgtcatgtttttcatgttttgacggggcaaagtcgtgtttggggtggcaacttttccaattcttaaggagttcatatatatgataagcagttcatatatacttgatatttattttatttgtatatgccatgtaatgatcgatgtttaagcatatgtatacatgctgagtaacttatttgagaaaagccatgttgaaaacaactatatgataatttatttgaacaaaaagttatgacatcccttgtatatcttcactgctttctaagtgaataagaatggttaatataaatgaaaataaccttttaaccattcgtattacaaccaatgttttaaaaggctttcaaggcctatgcctcaaggcttgcctcaagttgaggcatcaggaaacaaccttgcagctttagcctccacacagggtatttgaggtttaagcctcaccttgctgagatgcataaccttgaggctgttgaggcttaagtctcagatatttgtggcttttttatgtggattgttgggtttttgcttttaaaggacagatacttcgctcgtggagttgctgttgcaacaggatttgctgctagagttgttgtgtcacctttttcttttctttctttttataaaaaaacaatagtgtactagaaatcgttaaggcaagtacatgagaaagatgaggagtccatagatttacataagtttattaaaaaattggagattgaaccttctctagtatactaataacacctctattgctatacatccatatggaaccatatgagaatattcaatataaaacctctcatcattctataaggattaatacatctccttcgaatagaaatagaaacaaatcatctcttctcactatccaaacccttacaacgtatacaccggatgccaatcaagctgaacaacattgagaggaatgcccttaaacgccatgatgcaagaagcctagaaagaggaatagaaatgaattaaatcccatagtatctttgaagtcctccacttatccttgaagatcctagtatttcttcccctctacacaaatccatatcggcatgagacaagcattttgccataggattttgcctctgatggagctccccaaaccccaatatgagatggtcatcatatgattcatgtcacttatgcttctaggagggctccaatccatgttgtgccaccttactgccactgctttgataaaatttgaaactgtaccactgcaattggcagatgaagaaggagaatgggtaaattgacgttgataaagaggctaatggaggaaataaataagacaatgattccttaatagttatattgatggtgatattaaagagtgaaagactaatttgatggggtcatgactcatgggagagtggatttcggaagagaggaggaactaaattaaaaactattatcacaaacaaatcttatggtttacttgttgctctgtttttatgtgtgcatgtgtgtttttatttattttttaaattgaggtttgcgcctccttttgcctcaaagctttacatcttgccttatttgagtaaaacacctaaagactacctttagccttttaaaactctaagtacaaccaccatgaaggaggatggaggataaaggaaagctctttacttcatgataattccagcaatcttgttgccaattatcatgcctactgttggatgaggccaaatattcctgtatatcatgaactaaatatcttaattgttgactagcagtcaacttggacttttgagctgttggttaacttaaatattttgactaacaattgatgtgctcgtattggtgatgatcatgatccttgtgcatgcttgtgttctctatgtctcataattaaatgcattatttttcatctagtacatttgaccactgaagtcattagaccactttgaccatttccttttgtgccttgaaatgggcctgaagagagtactgttatctaggtataatatgacgagatcgagccacaaacaatacaaattgcaaaaggggttttgttggtgtccattctccctagtaagatcaaaactttacactgcaaagagagtatgtgttgaatcctttacctctttgatttaagaaagacaaagctaaatttgccattgtgttaaatcttttcctttgaaatcaatctcactctttacccccctagaatggattccaagctctaccattatggaagacaattggcaaagtgctatctagtgacagtgacagtaattatggcacttatattcccaaaacttcttttttgtagttatcaatttaaatcattatgacaccttaactgtgccgccttttccttttgtacatgtgaaaggtcttcttgccttccctttgtacttaagaagtcaaaaaggattctttttccctagtttgcattgtatcagcactgagagtgtcactattctgtagcagctccgttttcatcctttgattctttgggtactatatgattgttaaagggctgcatgccttggcccaaggtgcagacctaattgtggtctctcatctagcctttcaatgaagtgcctttaactaggagctaccttacgtgaaggcatgcatctcgattaaaacaaatatgttcaccctgtctaggtttttttcccataactcatactagatgatgtcattttggccccttttttttctggaaaagagagaaaaatataaaaatgacaggcaacagcagtcttttgtcttctcctaaaatcctcaactgaaaccacaaacactcaatctccttgcttcaaagcatttgagggctttagaagaaggaaggtgactttcaacttgaacatgtgactgcactgttgggtattcgttcattagtttctagtgatttattttaattaattttgttattttgagtttattactgtttggtgatttttgactttattgttgtttgcttgattaatttcctgaagatacaagcattatctgtttcctctgattatgagtttcctatggccctaagggcctaattagtgaaatggaacttttgtttggcttatttattattatccttggaagttctaatcatatactgaagttttttttgtagagaaagaaaagatagatgtgaccttatgttcaaatttctgaagtgccatgggctgaaatattgaaaatattacactatgtttttttgggcaattttttttggtatattgataatttcctttttctgaattatagaaaagcacctagtgaaaatagggcacagccagtacataggatatgtaaaagtacacctataggcacaaagaaagaaaaatttactaaggccaaacatgatcaacccaaataatgaaatctagacatataaattttatttaacagtaagatggaaattgaaggttgaagtaaggatttgggagtcagggagacatctggctgatatgctggcctaaacatatgtatatatatatatggtctagaaatatgactatttgtgcatatatgagatttatgaagatgaatctctaagatatacataaagaaagagaattagtattaattgcaattaagcctatcaaaaaaaaagaagtattaattgcaattaaagtagaattaatattacttggaattaaactagattagtatttgttggagttaaatttagagtagctaattaggttataggagaattacaattagagtcataatagtttattagaatactagtaaactttggatttcatagagaaacatatgaataaggttaattgatggaaaccaaaatatgaattgattgatgattaataatattaagtttttttttttccaagagttgcaatcctcaatgttaagactccattgattttcctttaagtgagactcttagaaggtcttagtgagattctaaggtttctatctcttcttcttcatatcttctttctttatattttttattttatttttctttaccataaactttatcccttattcctctctttaaaccctaaaagtaaaaaccctagcccgcccatttgattgtagacaaccatccgagggttgttctacatcagttttggtatcaaagcagaaattcttcgtttgaaggcatatgtaatgaggagtagagcaacatatgcaatcatgattgaaggttacaacttttcttatgcaactgtctgtgaacataccaagactaaatgaaaaggaggattagcgacgtaatagcatcttttgaactcgtgttgcttgccaaggaagactatgtactatgattattgatggaggtagtagttctaacttagcttcagaggaacttattgagaagcttaatctaaagacaaaagagcatccatatccctattaaatagcattggtaaatgatatatctattttggtgagttctcattgcctaatgacatttaattttagtaataattttgagttatcagtatgatgtgatgtctcaccaaagaaagttgcccatattatgcttggaagccgtggattttttatgaaaacatccaacatgatggatataagaacggttacacacttctgcacaatgggtgtaagaaaatccttcgtctaatgaaggaaattccaccacgtaagcaactagaggaaaaatagtatccttgaaactagaagagccatcaaatacttccattaagaagagattcgaagttactagtaaagaggaagaaatcgtcaattatgaatctagaatgcaagaaatgatggaaccaatcatttaacctataggagagcttaaagaagtcgtaaaagcttcaaaagaactggtgcttgccttttcaaggcaaaacattatcatgattggtggcaaacatgaacaatcttatgatatagtaagaattgctgaaatttcttttgaatataaggaattcaagaatcttattcttctacaagacagtttgaaagaagagtatggaatgcaactctccacaagcttgttgatgacacgtgattatttcgagaattatcaacttgttttgcaatataagaaagtttttcaactttcttatattgtaaaacaagttgataatataagaaagtttgatggagtgactttcggccgatcagcctgttagggggtttgtacaagcttttggctaaggtgttggcaaataggctgaagaaggtcctaggaagggtggtttctttggaccaaaatgcgtttgtgaaggggagacaaatattggatgcttcgcttatagctaacgaggtgattgatacttggcaaaaacgtaaggagaaagggttgatttgtaaactggacattgaaaaagcctatgacagcataagttgggattttcttatgaagattctgcgtaaattgggctttggggctaggtggatggagtggatttggtggtgtatttcaactgccaaattctctgttcttgttaatggagtgccggcaggcttcttctcaagcaccaaggggttgcgtcagggagaccccctttctccttatctttttgtcttgggtatggaagtgcttagtgcacttttaagaagggctgctgtcgggggtttcttttcaggctgcaggttttgggggaggggcaggatggagctaaatatctctcatttgctttttgcggatgacacaattattttttgtgaagcaaggaaagaaaacatgacttttctaagctggattcttgcttggttcgaggctgcgtctgggttaaggataaatctagccaaaagtgagttaattccagttggcgaagtggaagagattgaggagatggccgtggagctaggttgtagggtggggtctttgcccaatgtgtatttggggctgccattaggggctcctcacaaggcttcctcgatgtgggatggggtggaggagaaaatgaggagaagattagccttgtggaaaagacaatatatttccaaaggcgggagggttaccctcattaagagcacgctggccagcatgccgatctaccaattgtccctatttcaaatgcccaagatggtggcaagaaggctcgaaaagctccaaagagactttctttggggagggggaagcttggaaaggaaagttcacttaattaattgggaggtggtgtgtgctcaaaaggagaaggggggtcttggcattaggaggattgcccttttgaataaggttttgctgggaaaatggttatggaggtttgcctttgaagaagataagctttggaagaaggtgattatggagaagtttggtcaagagggccttggttggaggactaatgaggctcgtgggacgtttggagtgggagtttggaaggagattctgaaggaagctgattggtgttgggataatatagagttcaaggtgggtaaagggaccaaagttaggttctggactgaccattggtgcggcaatgcagcgctgtcccaaactttcccccttttattcgaattggcagctcataggaatgcaacggttaacgaagtatgggaccctagctttggccaaggaagttggaacatcagtttctctagaggctttaatgattgggaggtggatttggtaggtaatttgctgtatatgctaagggactacaaaatttctttagaggaggattcggttctctggaaaggtgggggatgtggcatctttagggttaaggaggcttacaatctgctggttgcttcaaatgatattgtatttccgaataagggcatttgggtggacaaggtcccaactaaagttgtgttttttgcttgggaggccacgtggggaaaggtcctaaccttggataggcttcaaaaaagggggtggcagttccctaaccgatgttttttgtgtgggtgtgaagaagaaactgtaaatcacattcttctacattgtacagtggtccgggttctttgggagattgtcctagccttgtttggcattcaatgggtgtttccagaaacgattaaagacatgcttttcagttggaggggttcttttgtggggaaaaaaaggaaaaagatttggacttccatcccgttgtgtattttttggacggtttggaaggaaatgaatagattagcttttagggggtgatttttatctatacagaaactcaaaaattcttttgtatgtaatctgtggagttgggctagggtgtatattggagaggagtcctcttcactcttaggttttctagactggctcgcgtccacttgagggtaggtatggttgtgggcttcttctggtttttgggttgggctgccttgtatacgtcctatatgctgtgtggctttttgcctttttaatataatatctgcttacttatcaaaaaaaaaaaatatataagaaagtttgatatttgtgtgtttgccaatcaaaaaaaaaaaatataagaaagtttttcaaagtttgatatttgtcttgcatgaaattaaacaagttcaagtgatcttgagatcttgtcttattgtggtaaagagttgacaaagaaagatgggtggaaggcattgctcgagatttcaattaacggtggaaaatcactaaaactccaggtcgaggttttttttttcaagtcggagggaatcgatgaggatgaatctctaagatatacatcaagaaatagaattagtattagttgcaattaaagtaggattaatattacttaaaattaaattaggattaatatttgtgggagttaaatttggaataactaattaagctataggagaattagaattagattcataatatgttactagaatcctagtagattttagatttcttagagaaacttataaataaggataattgatgtaaaccaaaatatgaattgattgatgactaataatattaagttttgtttttttttttttttttttccgattgtcgcaattcccaatggtgagactccattggttttcttctaggtgagagtcctagaaggccttagtgggactctaaggttctatctcttcttctttgtatcttctttctctacattttttatttcatttttctctatcataaatttataccttgttcctctccttaaaccctaaaagtaaaaaccctagcctactatttgattgtaggcaaccatcctagggtcgtcctacatcaaagatcttgttgatagatttcgaaaagccaaaaagtgttgaaatgtccacaacatgttggagaagaactgaataaacacatgtattccaaatagaaaaaaaaaaaaaaaaaggtaaaagaaaaagaaaagaatgaagatgagtttgaagttgaagaagatgaagaacatgaggagatttatggtaagggatttgtgtgggagtgctccaattggtggtggccaaggaggcaagaaggcattacagattcgtatttcgttctcaattccatggaagttgtgcaaaactggaaagatgggaatgctagggttacttaaaagaaaatgtggctcacacaaaaaaagtgtattatctatgttttcatgtaatcttgagtctattttcaagtatggtatggtatgaaagcaacaacttaccatgaggctacggttacttaaaagaaatgtgactctgtagtgagaaatcgatgaaggattgtccagtggaatagagaataaataggtgttcaattagatcatattatgattctttgaatttgggagatgcattcaccattccatctaagctaatttggaatcttaagacaccttcaaaagttggtttctttgtttgggaggcaacatcgagaaaattcttaccatggataatctcatgagaaagggatggaagctggtcaataggtgttgtctctataaacatgattttgagtccataaatcctattctcatccattatgaatagatttttgagctatgagtcttgctgctagggctggatgttttgtttttccctttttctctaggcaccgataatatacgttgtgtgcacatgtttgtgctcctattttcatggtttccttttccaatgcgctctattttttcctatatctatgtgcgcatgtttgtgctcctgttttgatggttgccttttctaatgtgcttctactttttcctctttatatatatgtatgtatgcatgcatgcatgtgtataaaagatgttcatttgtcgcaaatgaatggattgacaaaaaggagaattttaataaattgtttggtgaattgttcaaatgtttgtggagtctattggtgctccctctgttattaagacaagaaagaatgttcagtcgcttgataaatgggtggagcacattgatgaagcaaatttagtgagtaagaatggatagtcactagagtggagcacaaaattagtatttatttgtcagtaatatcagattgggaggatgctggtattgttgaaatttggcattcaaagttaggttttttaatttaggaaagtgttttaggaataaaaaaggagagatcatttaggatgattcagtttcctaattttaggagagaatcaagctagattgatattttcttattcagtcatttgtgtatatatatatgtgtatggtgtgtacctaaaaaatcaataaaaggaattcagaaattcttcatggtatcagagccagttttctgaaaccctaatcccttctggccacctcttattcaggccatcattcattccggccaaatttctcaatccgaccatctctctctctggccatctctcattccggtcatcagtccctgttctcagagccaagggagaaaacgttttccggtcggtcgaatcgtcgtcagaaaacattcaccgccggcaacttttccggcgaactttccggcaaacttttccagcgatggttttttctacaccgcaaggactgcctggaggagatctccagtttttcccaaagcaccggagccagaaaaccatccacgcgccggccacgcgcgttttccgaccggcgactgcatctcacgcaccggcgcgtgagccactttccggcgacgcgcttcctcctccaggctcgcctgacgccgaccagccacccttcttacctgtttctgccatccgagccctgcacgtgccacttttggggttcttttgcctccgcgggccctctgatcagtttttccggcgtcctccggctattttttctcaactccaatccctgcacgtgccttgggaagtgttcttctacctttccggtccatgacaaaatacggaatggcatcatcacaagtatccagcgtcacgtcaccagaatcagggggcagatctgaaattccaaaccttggtggcagtgattcctctcctattctcatcacaggacacaaattaaatggccataactatttgcagtggtcacaatctgtgttgctgttcatttgcggtaaaggaaaggatgagtacctcactggagaagcagccatgccagaaactacagaaccaggtttcaggaagtggaagattgaaaacagcatgatcatgtcatggcttatcaattccatgaacaatgacataggtgaaaattttttgttgtttaggactgcaaaggacatctgggatgcagccaaagaaacttactcaagttctgaaaatacttcagaacttttttaggttgaatcagccttatatgacttccgccaaggagagcagtcagttcctcagtattacaacacactcacaaggtattggcagcaacttgacttattcgagactcactcatggaaatgttcggatgatgcagcaacatacaggaaaattgtggaacaaaagagactgttcaagtttttcctaggactaaacagggaattggatgatgttagaggccgaatcatgggcattaaaccccttccaactctcagggaggctttttcagaggttaggcgtgaagaaagtagaaagaaagtgatgatgggatccaaagagcaacctgccccaacattggatgcctctgcccttactactcggtcatttaatagtagtggtggagatcgtcagaaacgggataggccttagtgtgattattgtaagaaaccaggccattataaggaggcttgctagaagcttcatggcaaaccggctgattggaaaccaaagccacggtctgacagagatggcagagcacacgtggttgccaactctgagagcacatctgttcccgagctgagtccattcaacaaagagcagatggagatgctacagaaactattaagccaagttggcagtggcagtactaccgggatagccctcactgctaatcgaggaggaatgaagccgtggatagtggacacaagtgcttctaatcacatgataggagatgctgccattcttcaaaattacaagccaagtaatggtcattcatccgtccatattgctgatggttcaaagtcaaaaattgtcgggacaggttctataaaacttactaaagacttatatcttgactctgtcctccatgttccaaacttggattgtaatcttttgtccattagcaaattggcccgtgatctccaatgtgttactaaattctatccaaactcgtgtgtttttcaggacttgaaatcggggaagatgattggcagtgttgaactgtgttccgggctctacctcctctcatgtggccaattctcaaacaaagtctctcaagcaagttgcgtacagtctcagagtatgatagagtctttcaattctgtgtcaaattctaaggtcaataaagatagtgagattataatgttacactattgccttggtcatcctagctttgtttaccttgcaaaattgtttcccaaattatttatcaataaaaatccagcatcttatcactgtgaaatttgtcagtttgcaaagcatactcgaacagtatatcctcaaatcccatacaaaccttcgactgttttttctctagtacatagtgatgtgtgaggtccctctcggataaaaaatatttctggcactcgatggtttgtgacattcgttgataatcatacacgggtaacatgggttttccttatgaaagaaaagtcagaggtcaggcacatttttcaaaccttcaatcttatggttcaaaatcaattcaattccaaaattcaagtcctcaagtcagataatgcaaaggaatactttactagtagtcttagtacttatcttcaaaatcacggcattatccacataagttcttgcgttgacaccccacaacaaaatggggtggctgaacgcaagaatagacatctcttggaggttgcccgatgccttatgttttcctctaatgttccaaactatttctggggggaagctattctcacagctacctatttgattaaccgtatgccatccagagtgcttacctttcaatccccacgtcaacttttcttaaaacaatttcctcacacccgtgcagcctcttctgatttaccactcaaagtatttggttgcacgacattcggtcatgtgtatcctcaaaatcgtagcaaatttgatcctcgagccaataagtgcattttcctagggtattctccaacccaaaaagggtacaaatgctattctccaaccaacaaaagattttacaccaccatggacgtctctttctttgaacatgtcttcttctatcccaaatctcatgtttagggggagagcatgaatgaacatcaagtttgggagtctcttcttgagggtgtacctttttttcactcagagtcaccaaatccttcccaattcgcgcccactgagttgtccatacccatgccgtcatcagtccagccagcccagcacacaaatgttccttctcccgtgaccatccagtctcccatgcctattcaacctatagccccacaacttgctaatgagaacttacaagtttacatcaggaggaggaaaagacaggaattagagcacggatcacagtcaacatgtggctaatatattgactccaagtcaagtcttcctgaagagaacataggtgaggatagggctggagaggtgttaattcccagcattgatgattctactctgccgattgcattgaggaagggtgttaggagatgtacaaatcatccaattgggaattatgttacgtatgaagggctatcaccatcttacagagcatttgctacttctcttgatgatactcaggttcccaacacaatacaagagacattcaaaatttcagaatggaagaaggcagtacaagatgagattgatgcacttgagaagaatgagacgtggactatcacaaatttgccggttgggaagaggcccgtggggtgcaagtggattttcaccataaaatacaaagcagatggatcagtcgagagattcaaggctcgtttggtagctagagggtttacacaatcctataggatagactatcaggagacttttgctcctgttgcaaaactgaacactatcaggattcttctctcattggctgtcaatcaagattggtgcttgcaacaactggacataaaaaatgtgtttctaaatggtgacctagaagaggaagtctacatggaaataccacctggtttcgaagaaagtatggcaaagaatcaggtttgcaaactctaaaaatccttgtacggccttaaacaatctccccgagcctggtttgatagattcagaaaagcagtcctgaaggtgggctacaaacaaagtcaggctgatcatactctatttgtcaagaaatctcatgccgggaaaatggccatactgatagtctatgtcgatgatattattctatctgggaatgatatggaggaattacagaagttgaagaagtatttgtcagaagagtttgaagttaaagaccttggaaatttgaaatatttccttggtatggaagtggctagatcaaggacgggaattgtagtctctcaaagaaaatacatactcgatcttcttaaggagaccggtatgcttggatgcaaaccaattgatactcctatggatagtcagaagaaacttggtatcgagaaagaaagtacaccggtagacagggggagatatcagcggcttgtcgggcgcttgatttatctctcacacactcggccaggtattggctttgcagtgagtgctgtaagtcaattcatgcacagccccactgaggaacacatggaagcagtctacaggattcttagatatttaaaaatgacaccagggaaaggtctattctttagaaagacagaaaaccgtgacactgaagtatactcagatgcggattgggcaggaaacatcattgacaggcggtccacttctggatattgttcttttgtctggggaaatcttgttacctggaggagtaagaagcaatcagttgtagccagaagtagtacagaagctgagtacagagctcttgcacagggaatgtgtgaagggatttggataaaaagggttcttagtgaactgggacaaacgagttcatctccaattctgatgatgtgtgataatcaggcagctataagcatagcaaagaaccccgtgcatcatgacaggaccaagcatgttgagattgacagacacttcatcacagagaaggtgactagtgagacggttaaattgaactatgttcctaccaagcaccaaaccgtagacatcctcaccaaagctttacctaggcctaacttcgaagacttaacttgcaagctaggattatatgatatatattctccaacttgagggggagtgttgaaatttggcattcaaagttaggttttttaatttaggaaagtgttttaggaataaaaaatgagagatcatttaggatgattcagtttcctaattttaggagagaatgaagctagattgatattttcttattcagtcatttgtgtatatatatgtgtatggtgtatacctaaaaaatcaataaaaggaatttagaaattcttcaggtattaaaatgaccaaaattatttttgacaaacaaagctgttataaactgctttatgttctctgttatgtggctttgtctttttgtgcctgttgtatacgtcctgtgtactctagtgtactctttcttttgctgaatatatacatcttttattgcctatcaaaaaaatgaaaaaaggattgaagcagttataaactcttaggttattctttatatccaagtttgaatggaaaaattctgggcttaagaagtgtctagttgcattcaaaaagtggagttgaagttcccacctctggtcaatttccaacaggtctgctagtatgcatatgatccaaaacaattattatttgaagtcatgatagattgtctacagtcactatatcctttttcttttgggaattgttctcccattgtactattctcttcctcaatgatggaagtttaaggattccattgaagaaaagataagggttctaactttggctagttcattctataataattttcccgttcatattatttatttatttttaacttttgtattgtttattctcatttatttatctgagaattcagaggttatatgttaactgcagctggaagtttgtggttatcatgacttgcaatatgatatataagagatataactggagccattaagacctaaaactcaattggtaggctctcctaatacaaagtaaaaacttgagaagcagtgtatttgaatccatgaagggtttctctttcaatttcataattcaggaactcagtaaatatcctattagccagttagcattagataggtccaaactcagcatctggataggtataaactgtaagtccatatagagattttattttgtcttttgcctattatatttcctgttaatttgtttttttttgtttttatcagaaaaaagaagtgtattaattaagtataaagattttgtgagagggatgaggaatccttcccacaaatatacaaacctgatctaaaccattaaaaacctccaatatacaaggagatttgtacaaaaagatagattacaaaagaatgtacaagggaaacctctcttgaaaaaataactaggctcctctcaatggtggcccgaccctagtggtatacatactgttagccaattaagctaaatgatgttcaaaggaatgcctttaaaatcatcattacaagaggtccacaaagaagtaaagaaatgaaataaatctcataaaggaatgccattaagcaaccttgtttattatttttactactactactactaacactattattactactactactactacaactattattattattcttgttattattgttactattattattattattattgttagtatttgttttaagtgttctatattataattgcagttttgaaagcaa

SEQ ID NO: 12187 - DNA, 15027 bp, Vitis vinifera
  Intron number 4 from transcript GSVIVT01009987001 (locus G SVIVG01009987001) derived from phytozome v7.0 (chr-ID chr1 8; pos 13136343 to 13151369 reverse strand)
ggggaagaagttgaagcttgcaatttgggacacaggtaacaacccacgtgtttgtaacttatttgggaaagaactgttaaattttgtttttattctctgttctggattgcttgttgactggtttgtgaagataggtattattactgtaattctacctaatgctttttagacttctatattcatactctatatatttatgcttagatattggaggcaacttgggaccaggctgtcctgaggatgtgtataccaatatattactactttttgttgtatcaatttacaagaagcaaattaaaaaaaaaataacaatttttttggggggggcttgaagagattacaagagaaaacttatacaaactttattgaactagaaccacagtaatttttaaacccaagttgataatatctttagggaaatttgacctccaaataaaggactttgtaacacaaatttgtttcttaactatacaatttattgttcattttgcccccctatgatatggtgccatttaaatatttagctaccgagttaaattccaaaagtactttatcaatacctaatataattgggaatatgaaccttcttattataacaatttatcactattttaaagtcaccttcaatctctagattatgaaatttgttggtttttgtcgttcacacatcattgcttaaagctctacattccacgatatttattgatggattacctaaatatctacatgttgacataattattagtttattagagtctctagttacccattctaatgtacttctattccttctctctatttcatcaagattcagtttaaattttccattgattggaggaatcaatctaatccgtttttcaacggattgaaggaaatacgattgtcaatattattggcattgggatagctatttggcccatctcatcgagataaacaagatgtattatatcataattcattcttgccaagaaaaaaagggcaacatgaagaaatccatgagagattatttgtaaaaatggctttgtttctagacaaaggaatctgtcaaacaatctttccaaatttgtaaccaagggtagctttcttaataatgagaaaaaggttgggacgattccttctgaacactgcctaattcatatggatttataaattccacatgataacatgaattttttccatggggtaatgatttttttataattgattttgtaactttgttaaccatttaagctaggagaaaaaattgccctcatgcaataacagtatgataattatacttgatatgatcccaaattccccaaatgaatggtgtcttctaaacatatggttaataacttcagtcccctagattcaaagatgacaaatatttgtaatattaatccttttaatagtaattcacatgtggggagtgcatttctaatcaccaagagtaaggtttaatttccaagtccaacttaggattttagctctaggaataggaggcttcttcattgcacaagttgctaaattgaaataggaattgccactaactacaaaaatttcatcagggtaggagaaaaggggataaagatttcattaatatctgctagaacatttgggggagcattaagggaatgctttggcatcctaattgtcataattcaaatgaatttctcatttacaaatgaagctagaagtgtcatataggcctagaactctgtccaggagttaactttcctatcatctcctatacaccattttaatccagcttcaatgtcttctatgattaacaatttcctttcataaaataggtgatggtgacataaagtgaccccttttgttggctttgtggtaggtgatggtgagaaagtgaagttttggaaagataaatggtgtgaaaccatccctttgagcgaggtctttccttctttatttgctttagcttcgaacaaagaggcttggataaatgaagtgtggacagccgggggggaaggggggggagtttggaacccttgtttcaatagacctttcaacgattgggagatggaagatgttgagtggctactttgttgcttggaggggaagaaggttaggggggatgaggaggataaggtgaagtggatggcatcaaaagatggggacttctcggtgaaatctttgtataggactatgcagccggggtctcatgcttttttcccttcaaaaattatatggaactcttgtgtgcagcccaaattgagcttttttgcgtgggaggcttcttgggggagagttctaaccttggatcgtttgcagaagagaggttgggttatggcaaataggtgttttctttgccataagagtgaggagacaattgatcaccttcttatccattgtgaaaaaacgagggaagtatggatggtgttcctttccttttttggtgtttcgtgggtgttcccccgttcggtcaaggaaacccttgtaggatggagggggtcctttgtgggaaagaaaaggaaggtggtgtggcaattgggaccgttatgcttgttttgggttatttggaaggctagaaattcaattgcctttgaggattgtgagctgtccattcaaaagttgaaagcatcttttgtgtattttttgtggtcggaatccaaattgtggataaaagatggtccttcgaccttaatagattttatagattggatgtgtatgcgttaagggagaggttttttttttttttttgttttgccttgtcctttgatgtttgggctcttttgtaagggggtaagtccctttatactgtaatttggtgggtcgcttctttagcgcctctttgcaatacaatcttatacttattgatcaaaaaaaaaaatttcctttcataaaatagaacccttcccttctcatctctctcttcttcttagggatgctgaaaaagttgttatctctcttataattctagcccatatgctatcactatcaatgcaaattctccaaaccgtctcaataattaaagctttatcaaaattttcattcattcttagtgctaagcctcttttagatttaggtctacaaacattctgtcatactaccaaagggatccccttagaatccttggacccatgtttggttgctacaagaatttcccattaaatctaggtcattgtcattttcttgtaaggttgaagtaattcattaaatgaagcaaggaactagctaaattaaccttgattagaattatttttctagctattatagaaagctagctttccatgtggctagcttctttcgaggtttaaggataacttcataaaaggtacttcttttcattgaaccttagataatggaatattcaagatatttaccaatgccattggaaggaggaatattcaaaggttcctataatttcctttacacaacctttgaatataattggaaatgaatgtaggatttggaaattcacaatttagcctgacatatcatagaatttaactttgagatctcaattgaggttgtgggaggtaagctggtgggtaggatcatagagagaggcaaaggtatagtggtgtggattaagtttggagccaaaagcctggctttgttgctggaatggggtggtgttccaaaatttcgagggaagcttattgggtgggtctttggaaggcaatgtagaatgggttcaaggaattcaacaataaggttggttttagggtaggaaatggtaggagggtgaggttttggaaggataggtagtgttgggaggatcctttagcaatggctttcttagagttgttttgaattgtcatcgataaagaagcttgggtaaaccaaatgtgggagcaggttagggaagggggttgttggaacccggtgttcgcaagacaaataaatgattgggaattgggagaggtggaagagttgcttaattggttgcaagggtaagtgatcagaagtggtgttgaggatgtcatggcttggcatagttttaaaaggttcaaggcgcaccaaggcacaaagtagtcctggaacctgaggcgcaaggcgcacctaaggggcggactttagtgaagtgaggcacaccctaatttacatatatatttttatataacataatcaaatttaacaatcatttatttgccctaaacacataaatcatcaaatatcatccaaaacttcaatttaatcaacaaaaaccataaaaataaagaactccaagtataaaaacaaatccaaatccatattgctaatcatagttgtgaaaggtgcgcctaacggaaggtatgtgactattttccctctatttttctcctatttttcccctattttttcttcttcttcttcttcttcttcttcttcttcttcttcacttctccactgcacgactgaagctagggcatgattgggagtggtgtcgggttgaaaaataccagaaaagggggctggaaaggaaaacagggccaaaacagtgtcattttggacttttttttaaaaaaggaataggctccaaaacgacattttggcctgttccttttaaaattaaaaagtgccaaaacaacgtcgttttggatccacaaagtaaaaaaaaaattagggctcaaccccaaccctctacaactcgacggactaaagaagaaaaagaaggaggggtcggagggcgtacctggctggaggcgagtcaagcgaccgcgtcgcacttaagcggcaccatcatgctaccccaagcctaggcgggcctttcacaactatgtggcttggcgagtaacaaaaggagacacctatacaatgaagttcttttactactccctagtagggcgttgtccaaaaggcttcccgttaggtattgtgtggaaccctttggtcccaatgagaggcatttttttttcgtgggaaatagtttggaaaaaaaatttaactctagatcagctaaaaaggaggggttggtgtcttccaagaagatgttatttgtgcataggtgaagaggagtcagcaaacgctgcaaaccatatccttccccactgttcaaaggcaacctcgttgtggcacctcatccttgctctttttattgtccaatgggtaaatgtctctctcaatcaaggatgtccttcttagttggcaaggatcctttgttgggaagaaaagaaagaaggcgtgaagagcaaatcctttatgcttattttggaccctttggaaggagagaaatcgaagagcctttgaagatttagaccatgctattttatgctccttcatgtacatgtttttggagtgggttagtagggtacatttagagtctagcactttgtctttatttgactttattaattggttgggttgtaagtgaggcgagggtgctgttttttgtgaatcccttcccttttttggccttgtatacatcttgtatacttcaggcgcattttagtcgctttgaatacaattgcttttacctatcaaaaaatattataacaaacaatttgtgaggctttggcaagtataatacattcatttatttaaatagctttgtacccaaggattctttgtagaggataaaaatgtagggagataaagaatcttcttatctaatcctcaaaatggcaaaaaaatttccttttaggataccattgatcaaaatgaaataggaaatcatgggaatggtttccatgaccctctcaatccatatagggtgaaaacctaactaagaaccaccctaatgaattttttttttttgataagtaagcagatgttatattaaaaaggcaaaaagccacacagcatacaggacgtatacaaagcagccaaacctaaaaaccacaagaagcccacaatcctacctaccctcaattggacgcgagccactctagaaaacctaagagtgaagaggactcctctccaatatacaccctagcccaactccacaaattacatacaaaagaatttttgagtttctgtatagataagaatccccccctaaaagctaatctattcctttccttacaaaccgtccaaaaaatacacaacgggatggaagtccaaacctttttcctttttttccccacaaaagaacccctccaactgaaaagcatatctttaaccgtttcagggaacacccactgaatgccaaacaagactaagacaatctcccaaaggacccggaccactgtacaatgtagaagaatgtgatttacagtctcctcttcacacccacacaaaaaacaacggttaggaaactgccacccccttctttgtagcctatccaaagttaggacctttccccacgtggcctcccaagcaaaaaacacaactttagttgggaccttgtccacccaaatgcccttattcgggaatacaatatcattcgaagcaacaaggagattgtaagcctccttaaccctaaagatgccacttcccccacctttccataaaaccgaatcctcttctgaagagattttgtagtcccttagcatgtacagcaaattaccaaccaaatccacctcccaatcgttaaagtctctagagaaactgatattccaacttccttggccaaagctagggtcccaaacttcgttcaccgttgcattcctatgagctgccaattcgaataaaagagggaaagtttgggacagcgctgcattgccgcaccaatggtcagtccaaaacctaactttggtccctttacccaccttgaactctatgttatcccaacaccaatcagcttccttcagaatctccttccaaactcccactccaaacgtcccacgagcctcattagtcctccaaccaaggccctcttgaccaaacttccccataatcaccttcttccacagcttatcttcttcaaaggcaaacctccataaccattttcccaacaaaaccttgttcaaacgagcaatcctcctaatgccaaggccccccttctccttttgagcacacaccgcctcccagttaattaaatgaactttcctttccaagcttccccctccccaaagaaagtctctttggagcttttcaagccttcttgccaccatcttgggcattcgaaacagggacagttggtagatcggcatgctggccaacgtgctcttaatgagggtaaccctcccgcctttggaaatgtattgcctcttccacaaggctaatctcctcctcatcttctcctccaccccatcccacatcgaggaagccttgtgaggaacccctaacggcagccccaagtacacattgggcaaagaccccaccctacaacctagctccacagccatctcctcaatctcttccacttcgccaactggaattaactcacttttggctagatttatccttaacccagacgcagcctcgaaccaagccagaatccagcttagaaaagtcatgttttctttccttgcttcacaaaaaataattgtgtcatccgcaaaaagcaaatgagagatatttagctccatcctgcccctccctcaaaatctgcagcctgaaaagaatcccccgacagcatcccttcttaacagtgcactaagcacttccatacccaagacaaagaggtaaggagagaggggatctccctgacgcaaccccttggtgcttgaaaagaaacctgctggcacaccattaacaagaacagagaatttggcagtagagatgcaccaccaaatccactccatccacctagacccaaagcccaatttacgcagaatcttcataagaaaatcccaacttatgctgtcataggctttttcaatgtccaacttacaaatcaaccctttctccttacgtttttgccaagcatcaatcacctcgttagctataagcgaagcatccaatatttgtctccccttcacaaacgcattttggtccaatgaaaccacccttcctaggaccttctttagcctatttgccaacacctttgccagaagcttgtacaaacctcctaacaggctgatcggccgaaagtcacccaaatcctcggcgcctcctttctttggaataagaaccagaaacgttgtattcaagctcttaacaaacgatctttgttcataaaattccttaaatagctccaggatctcctccttcacaaagtcccagcattcttgccaaaaagctactgtaaacccatccgggcctggggctttatccccatccatctccaacaaggcagaatgtatttcatcttcagagaaaggtagctccagattaccagcttcttgactacttaaatgacttagatgcagcccctctatgtcagctttccagcctgactcttcagagagaagctgctgaaagacattaacaatcccctccttcacctcctgctcctccgacagccataccccattaatcttgattctatccaatgtattatttcttcggtgtgcatttgccattcgatggaagtagcctgtgttcctatccccttcctttaaccaaagttccctggacaattgcctccaatgaatttcttccagcagcacccacttctgatagttttccttggcttctttcttcagctcagtctccctttctgagaggatcctctcactctccaccccatcccagtgctctacttgatggagagctaaatttttgttagcttccaaccgaccaaaaacttccctattccatactttgatcttcttcttcaactccttcaactttgaggccagtctgaagctggcagtccctctcaccacagtctcctgccaccacccccggagtaagttcttaaacccaacaactttcagccacatattttcgaacctaaacggggatggacccctcctaagacctccgcactccagcaatatgggaaagtggtctgacgtgggtcttggcagcctgctctgaaccaccccactgaaatgatcaagccaattctgcgtcaccaagaatctgtcgagtctagcccacgactgactccccctacccccattccaagtacacctccccccttgcaaaggaaggtcagtcagctcaaactcatccaccatctgggcaaatcttctcatcgccccagtaatccttccttgcctacttctttccccttgaaaaagggtgatattgaagtccccccctaagcaccaaggaacatcccacagacccctaatcgcccctagctcctcccacaaacactccctttcctctctagagaaaggaccatacacgcctgtgaacatccaacaaaaaccatcctctacattccggactctacaggaaattgagaattggcccacctccacatctaacacatccaacgtccttctatcctaacataccaaaatccctccagcagagcctgaagcttctaaggccccccaccctaggaacctacccgtacccaagcttctcaccacaccctccgacatagcttgaatttttgtttcttggaggcagaacacatccaccctctagctcctaatcagggccttaatcaccttccttttggagctatcattagctccacggacattccaactcagaagtcttaacttcataggacttctaatatttgacaccctcttccttgcctgccaccaacctgccttttccctccttcgtagttgatagaacactctagtcttcttagctccctctcaaatttagatttttccagcaaagacttattatggattctttcccttctctttctaattttacccagaaaatccatgatctccttctccagtccctctgtggaaaaccccaaaaaatttctgaatctagccaaattgctttcctcccagctggcctcctcccaatcgctaccttcatggggcttaggctggactggtctcaattccgcaccgcttactatactgcaaccattaattgcctccaccagctcccaccgagaaacggttttaccctccgtgaaacccgaagcattgagcatacataacggtgtttccccctgaccagcctcacacacagccccagaatagtcgtaatactccctttcaggagtccgaccatgaaaaaaacagagagggggagagagaccagagactaatgctcctttaaaattaagagcattcccatacctcgaagcttcctcaattaaggccagatcagtcttcgatttctccatagcttggctctctttttcaaattgcttacgtaaatcatccttctcccagaaaatggaagactctgctactgaccttcccacgacaattggatctactctcactaaagaagaggcctctcccacttgggctttaccccctggccctgagtgatactgaccccttaccagcccaagatccacatttattccactaaccttggtctgcccatgagccatccttgtgcacagcccataactactcggcccagccacactacaagaaaatgggtcaggcccaaaggcgccaaaagctaaatcatttgggctagggaaagggacctcaactgggcccttcttggaagaaccacccagcactggcccgcctccactggaccggcccaacatcccatggccccgaatagggcccaaaggacaccctgacccagacgactgacgctgcatcccatctgcagactgaatcatgacctcgtaactcgtgtcattgccctcctccaccacgtgtttccccgcgcgtgttactgcctcaccccctacctcggcatctactgcagctttcttcccgctttgatcagtcggaaaaatcctcagaagcggtctgatttcccaccacagggttagcacatagcacctctcatcaacccaaatttccaccgcactaggaagctcgtcaccgtttaccttcaccagtatccgggcccactgcagctcctccagcttctccgtttgattgtcgactgccaagaaacccccacattcctcccctactctttttagaatgtcccgatcccaaagcgataccggtaaccccactatcctcacccaggcctcgcttctagcttccccttccatcacacaccccgtttcggggctccattcttccacgcgtaaggaagtccccccaaccaacactttcccagatttgagaactttcctagcttcttccaacctctcaaactccaacaatatcttacccctttccagttttgccaaccctagcttacccctcaatccccacatacttgccatttgggttccccaccctttcagatcgtcacctctcactgagtttggattccaaaatccaacgagacagtgggtcaacttgtttaaattactgctcaaggcctctttcctaatcttcaccttcgccactgctttacctttactccttggcgtctgttccacctccgtgaaggatttcctcaggtccggttccgacaacctcacatccagctgttgcctttcctttctatccatgacaacccccaaattgcgtaatgacttcgccattagagaccatcctcccttcacccctcttcccttaggaatgaaaatgctaaaccttttactttccacatccaccacgcccagacgtagatagcaaccccctttattcgcatcacgcaacagcgaataggacctgccgtcctcttcccaccttttttcccatttttcctcactcttctcttctaaacagaggagcaagcactccagaaacagccccagactcaccggtcccaacttgacccacgaggagatccctcttttcctctccaccatagtagctttcattttacctttcctctcctccactacgacctcgaacaatttcgattccactccaaagttgctcaccctccgacttttcctagtccccaaccatgtctcaccctctgtcccctcgcccgcacccacagacttctcttccccactaactctctcacactctctctctctaactttctctctctctctctcctccatttgtttcaccctaatgaattctcactttatcatatcataagctttttccatatctagttaaacaaccatttaccctgatctgccttttttttcttgttaaaagagagcataatttcattagctataagaatatttatcattagtgtgcattcatggggcaaaatgaggcaattttatttagaaggggttttgttctcttagccaaactcttagcaattattttataacttgctttacacaagctaataggcctacaatagtgtgaagattccagtttatttgatttgggaatcaagttgataaaagtcttgttgatctctttgatgatgcgatcatcaaaggaaaaggctttaatcatttcaaaaacaaatttcccaactatcttataatattaatggaataacctaccttgaagaccatctcaaaagccttttaactttgatccataaaagcaccactgaatttcttcctcttaacttcttcaagaatgcataaaaagttattattttcattaaaccaagtatatggtaaacaattccaactcaagtaattgacaatcacaatgtattttttttccttggcgaaatcctgcattctagtagagctaccatttttcccttctattttgtcatgagggtggagaatttcattgaaacctcttaaaataggctaaagaccaaaaacagaaggtttaatgttaagttgtcattagggatagcttcctgttttgggctttagctaaaagcaacaagtggagttgaagccaaattcacaatttttaaagggtaatattagtattgtaagagttttattaaacataaaagaacttattgcataagccaaaatagagcttctacaagaagtaacattttcctagtttccatcttaagctctttttcaagccataagctctttgaacaaaattaaacaaacaagtatagaagctcttattgagcatgaaaaagtgcttttagtttatgagaagtcgatctaaacaaggctaaaaataatatctcatagttcttttgtttaaaggactatataagaatgtcataacagtcaatgtcgatcctagagaagtaaaccatgcaaagagacattctatcatttttttaaataacatctaaagagatataaatagaatttaaacacaaccataaaccttttgaaaatccttatgggttaattaatcataacagtcaaatttgagcttaggcaggatgttcaatgttcaaagcccaattaactttaggaacaaaatatcaggagctaattttttttttttttttttttatagcttttgaactttggagacaaaatcatggcgactaatccttgtaatattccaagaacaatagtcatgggacgataatggatggcccaagggctccatgcccatcttcttcctttttcttattttgttgcttattcatttatcttttatggataaaaagaagaatattataaagagaaatgctaaaagaacgtcccaaggtatataggaagtatgcattgaaggcctaaaagcatcgttaaaaaaacattgacaacaaagaaaaaaaaaaaaaacaaaaaacaacaccccctcaatcaggaacaaaatatcaagagctattttttttttttattatagcttttgaactttggagataaaatcatggcaactaatccttgtaatattccaagaacaatagtcatgggacgataatggatggcctaagggctccatgcctacctccttcatttttcttatttctttgcttatttatttatttatttatttatttattatgataaaaagaagaatattataaaaagaaataccaaaagaatgtctcaaagtatacaaaaagtatacatagaaggcctaaaagtaccgccaaaaaaacaaagagtgacaacaaaaaacagcactccctcaactagagcccaaccaatccacaaagtctgttgtagaagagagactagaagctatgaacaactagaccacacctaaagattacaaaggaaataacatttaagctcttgaaccgaatgccccttgttgtcaaatgccctgttgtttctttccttaccaattgttcaaaaaaaggcataaaggagcagcccgccacacctatatcctctctttacccatgaaggaaccgtgccaacctacaaatgtctctcttaccaaagaggggagcactcatgacacactaaagagataaaacaacaagtgctataaaacccttgtcttgtcacaatgaatgaggatgtgatcaatggattcttcaacacctatttggcaaagaccacaccctcttctctacatgtggtccaaggttaaaaccttattccaagtggccacgaattcatgcaacctttcatccttaattctttatacatcataccagaactcaaagagatgaacatgaaaatgaaattttaagaaattagatccagtacaagaggcttcctaggagcatgatttatcaattccattttcacaagcccttttctcctagatctaagcttccatcaacctcaagtgattgagggttgaacaccactagtcagcctaatcaatcaagaaaatcaaacatggacaggacctaacccctaatcctccttctaaatgtgcctttttggcacctttgtactccctgcatactttggaatgccctcttttgattagacactgtaaataatactattttgtttacctataaaaaaatagacgttttcatttactatatatataaaagaaatactctgtattgttattcttttctaataaaaaagctcatttctgtcatgagaaatatagcctacttgtgtctttgttaaatattcataattgaggacttacatatccttccttaagatgtgaccttcctttgtctgagatgttaaaaaattgtgtgggcaaaacagatgttgataatggtatctctatacttcctcttcatgcagctggacaggagagatttatatatatataaaaaaaaaaaaaaattccatattataattcttttctagtagagaagctcatttcttacatgagaaatatgtccaagtctttgttaaatgctcttaatggaggacttacacatccttccttaagatgcagccttcctttgtctgagatgttagaaaaattgtgggaaaaacagatgttaataatggtaatctctatacttcctcttcatgcagctggacaggagagatttagaacacttactagttca

SEQ ID NO: 12188 - DNA, 1595 bp, Vitis vinifera
  Intron number 6 from transcript GSVIVT01021294001 (locus G SVIVG01021294001) derived from phytozome v7.0 (chr-ID chr1 0; pos 3606489 to 3608083)
aaaaatttactagctctgtaactcatcctccctatttccttttcttttatgacaagaatagtagactgttgttagagcatatataatcatgtgcatgaatttgagatttagtattaggtaatgagctgacaatgtctattagaataacaccatcaaataaggtgataacgttccagctcagatctatttttgagcagatttcaggaattatttgctattttattctttagtattaattttctttggtggtttattagtgtatggttatgtaaattattcatacacccatatatataataattataaacggaagttagacttcctcttttgaatctgttgttttccgctcttaacgggttgaaaacaaatgtttttaactttcttgacatttgacattcataaccttgttttaagtttgatagatcatggttaattagaattctcagggttcaccaaggaaacaaaaatcatgttaataaaaaattggatgaagaaaatctgtttatgagaagctagtgaagaaaggagtatgctggtaatctatagagactaggtggtaagaaaacatgcgcataaattgaagtagtgatagtagttatgaaatttgaacagttaagattgtgtctttagggttggaatatacaactaaatgaagttaaatttgtgcctactagttaattatcttgtgatgacatatgaatcacttcttttcttgaaatatttctgttgatttctctgttcatatatggatgaccaagactagtctttttaaaatatttcaattttaaagaatcaatgatcattggtagaaatcaaactccagaattaggtattctagcatatctacagccagacttgtcaccgaaagtttcttggtaagctaccatgtaagcacggatttggtacatgggatggaagtgagaatagaaatgggaaagaaggtgaattataataccatgcgtaagagaagaatcaaaatccttatatgagtgggatttctatgagaatgaacttttattcctgggcatttgtaataagtaacccaaatgcagtaatgaatgacaaatggaacagatttatgattcccattctctattccaactttccaaacatgtcctaagtggttcccttccccatagctttcagtgatggtagctgcaatcaatggaccaagaatgtatcttcctattcccacctaagtttaagttgttttcctttgttgtgagctttctttgttctttccttttttttctttttaaatatttgcgagaccacttgcccttcccccctatatttcctcacccctcttgatgaattggtttgatggtttgttatgcaagtatttttgttagattaaagttaggtccttgtatgagaacatggaactagcgaccctcatctatttactaataaaataatcaatcagaaaatgagcattatggttgattttcttgtcagtaattccattagagagttaatgtgtgtatctcatgtttttgaccctgtttggctgaacctttatcttgggcactctatgtctgttttgctattttcttgcagagaccttagcttcaacaagttggaaggaaacattc

SEQ ID NO: 12189 - DNA, 7806 bp, Vitis vinifera
  Intron number 4 from transcript GSVIVT01034596001 (locus G SVIVG01034596001) derived from phytozome v7.0 (chr-ID chr1 3; pos 14739194 to 14746999 reverse strand)
agcgacaatacctgcagcaatatcgtaactataaggtactaccactgtgatttcggtagtttattgttgtgccactgaatttctcattgtcttgactcttcttacctggttgagatagcttgtttgtttaggtttgggaattattatcagacatgagctgaaaatattggtatggttaatgcaacattgtcatgctgatcctagtgtggttgagtcagctaggtgtcaatacatttttttattgagagggttcgatttggaagtgcctcgtgcatctgtcagtctttgggaagagaattggttagattactcaattggaaacaagttgtcacagattttactaatgagacatgggttgtatgagattacttttcaagtactatactgattttgaatttgtcctactttgtgccattcataactgataatagtttgtcgagatgtttcgtaaaagctcaagttgttagttatctggagtctacatcagaaagttcttatagcaattttaagggatatttcagaatgctgtgcatataaatagttattagatctcatatgctctcgattagtgagataggtgtacagcggtataaaatgtaagtctttatgcatgtaagcaaacatcatacttcactttgttttatgggccattcaatcactactgatttgaagtttgatttggtaggaaatctgttgatcttttatattggggtcttcaaacattggcttgattttccatgtagtttgtaaggagaaaaagttgactggagatgcatgttattttagggtatgtttaggccattgcttgtttttagatcaaaatactggagaaggtaatcatatgcaagaaggtcaaaaagaaggaagataagagttgagactgtggatcataatcccaaatctggcattaccactaagctgggtagcactgacaattctactagggagcagttagcagtggctatgttggacatgtgtctgatgcttctcccacacattttccatgataaaaagggcatgtttggcatgtatgcactgcgtcaccatgttttctgtgaacagcattaatgatcaatatccctcgacatgtgcaagctaactaaggagacaatttgtgggagaacttgataatgagggtgaagaatttttagatttatattataaagttttggggcaccattttgcaagcacttttaaaatattctcctaatttacctataaaaaaaaataaaaactataatgttttggggccaagcgatggccccttgggattgatcgacctgcattggagcaccctttccttgatcttacctctttggcattcttgagacatgaaaatgagtacactccttggatacacagtggactgttgacttcctgtttctctttattatacaaagagttaaatatgatagagtgaaaaagcagtgagtgcatgggtgagtatgtgagtgagtgaaaaagcagtgagtgtctatgagtatgcatgagagagagtgtgagtggcattcttgaaacataaaaatgagtacactccttggatgcacattggacttttgacactgtgtctgcctatcatacaaagagttaaatataagagtgaaaaagcagtgagtgtgtgtgtatgagtatgtgagggagagagagcgtgaattcttcctttgtgaaatttggcaaggcaaataaaacaaatttgttgttcttttcttagagagagagttctgcaaaaaaagctttgatgctcttttttttttttggataggcaaaaggagaaaaaatatatattaaaggtacctaagcaaatggcacaacaaagtaaatgctattaaaatatttgatgccacttgcaatgctaacgtatttgtagaagaatagaaagataaaactattcacacaaatgtagatagggtttttacgtagtttgggtaaccatatcttcattcatagataagagaaaatcattttactttaccataaagagtattacagagtaccaaaaaaaggaaaaaaaaacacatacaactattgaatcatgaagcattatgtatttccttgctttttgtatcaacattagaatcacaagctcttgttcactaagtgtctcccactcttcttcacatctctacctacttgatataagctttacttgcccatttccatataataactttttcccccatgacctataatattaatagaatctatctaacaattttgtaattctataagaaaacaaattttaaaaggaaatacaaatatataaaaatgctctatttcacatctctacatactattgatgcctaaaacatccttaagttttcctactccttgtatctagaccctaaaccacgagcctttgctccattgagtgtttttcacttttctttgcatctttgcatctttgcctactcagtataggctttacatgctcatctctatctcacaatttttttccctcatgatttataatatttataacgtattccaaacaattttccttattgtatgagaaacttatttccatattgaattgtaaatatataaaatatttgattcaatattcttttaccaaaaagaatgtatattgaataaaaattttgagatattttctaataatttccaccttggatcaaattccatctttatgtaatatttgtgcaatgcgcacttgcctttatagatgcacacaactaaactaatttaccacattggggaacttatttgaattaaattcttactccataccatgactttttggtgcaccacaatctcttttgtgtgtgccatagacactccttattcaatggattcaaattgttcaaccacttaactattctacctttcaaaatctaataaagtgtatgggaaatactacgcttgttccagataataaagtacatactctatgtatcacttttcactggaagaacaaatgactccaccatcaaccaaaattccttttgcaatcctcttgtgtattccactctccttgatttttccagagcctcaatcttatattcttttagaaatttggacttggcctttgataccacttgtttttttattgatttttttcctttatttaggatgtattcaagtgtccatgtatgttattgatgtcctttttaagagtccccttatttttttttataggtaaatttttgtcctcattgggacttgaacctagaacctcccacaaactcttcccatccctctaccacttgagtcgagcctcaagcaacagagtcctatattctaggacttgtgagtgtgaacgatgaacctagctgagacccacaccaaatccatgcaagaaagctctctattatacaaagagttcaagatggtctctctctctctctctctcatacacacatactcactactctctctctctcagtcatacacacacataatgctctctctctctatcatacgcacacataatgctatctctcttggttatacacactatgctctctctctctctcactctctcatacacacacataatggtctttctctttgttatacacacatatggtctctctctcatacacacatacccattgcaattctttaagaatttattctgttagtttgtctattagttccttatttgtgtgcatgtgatagattccctcctaaacaaatttgagtattcattaatatcaaatcttctgtatcattgaaatcctttaggaggtaattttttttattttaatatatgtaattcaagatttattaagaaagaaacttctttattttatttttttcaatgaggacatgcaaccaaataaataggagagaatggctacaagattgctatcaaatctccttgatacaaggaataaaatgccatccctataaagtagggatatacatggaaaaaatgagatttgaaatatttattccttatctctttattaactaatcaactaatccctacaaaataaggatttttattttgaaatcctggaggattttattttgaaatcctatactccctcttaagttgggaaatagatatcaatcattcccagcttggatatcaagtcttcaaatttgacacatggaagagcctttgtgacaatatcagcaacttggagccttgttggagtgtgagtcaactcgagtatcccttctttgaccttttctttgatgaagtgatgatcaagttccacgtgtttggttctatcatgatgaaccagattttttgtaatactaattactgcttgattatcatggaaaatacgcattaaccctttagtttcaatttgtaattctccaagcaacctttttaaccacattccttcacaaatgccttgagctagagctttgaactctacctcagcattgcttcttgctactagtaattgttttctacttctccaagttactaaatttccccaaatataggtacaatacccagttgtagatctttagtcatctacagatcttgcccaatctgcatcagaataaacttcaacccccctattggatcatttttggaaaaataaaccttttcttggtgtcatctttaaataccgaagaattttgtatacaactataaaatgctcttcatttggattattcatgtattgacttacaacactcactgaaaaacctatgttaggttgtgtatgtgataggtaaatacccacaaggagttaatatctccctttgtcaattggcggactatttgtcattagtccaactttagaggttgattccgtgggtgtgtctaaaggcttgcaccttatcatccttgtttcctttagtaagtctagtatgtactttcattgagacataacaatatccctttttgagcgagctacctccatatctaggaaatatttgagatttcataggtccttaaccttaatttcaaactctctggccaacacttccttcaatcttcgtacttcatctgtattgattcccaatcacaataatatcatcgacatagacaatgagaatggctatctttccatcatttgaatgtttggtgaataaggtatgatcagcctgcccttgtgtgtacccttcacaacccttgtgaacctatcaaaccatgctttaggagactatttaagtccatatagagacttttgaagcttgcaaacttttccaatattggcactattttcaaatctctgagggatttccatgtagatttcatcttctaggtctccattgagaaaaacatttttgacatccatttgttgaagagaccaatccagattggttgtaagtgtgacaacagtacttttacggtatcaattttggctacgggagcaaatgtctcctaatagtctatatcatatgtttgagtaaatcccttagcaacaagtttggctttatactgttatatgctttcactggtttgtacttaatagtgaaaatccatttacaaccaactggatactttcctttgtgaaaatctaacagtttccaagttccattcttttttatagccttgattttatcaccaattgtttgtttccactcaggtttttgtagggcttcatggatactctttgggatctctacatttgacagattagtaacaaaagcataataccgtggggataatcggtcataagaaatgaagttaggacaatctaagagcaatgggtatatcaagatcatcaggaccatcactactatgaggataatttgtcataagaaatgaagttagagattgggtgctgagtacacaacctcacacctttcctaagagcaatgggtatatcaagatcagcaagagcatcactaacttgagtgttatgaattttacctagactttcggatttagatcggattcttagttttgctcaggttgagtgtggtactctaattcctcttgaggtcgcttcctccttaagtgaacatgtaacttagtttctcttgcatgttgtgtatgagtgggtgtggatggagtgcgtaaaggctcaaaagactcgagtggctcagatggctcaggtagaggttgattgataggaatacttggttcaaacctatgagataattcttcttgaacccaaaaattccattcttgtaaattttcctcccccaaaatgggatttttggtgtaaagggttgtttttcaaagaaggtgacatccaagttaacataaaatttcctagtgataggtgaatagcacttataccctgtttgtgtaggagggtagccaaggaatagacatttggtggccttcagatcgagcttactatgatgatgatcatatatgtgaacaaaggccatacatccaaaaagtttgggtggtaaggtgaacataaagtgtgcatcaggatagttttgaagtttctagagtggtgtttggagttgaagagttttaaagggcattctattgataaggtatgcagatgtgagattgacttcaccccaaaaaattttaggcacattcatggtaaacatgattgatctcgcaacatcaagaacgtgtctatttttctgcttggccacacattttgttgaggggtatcaatacaagaactttgatgaattattccttggttcacaaagtatcctcctagatttgaattaaaatattctcaggcattatcaaatctaaaaattttgacttttgcctgaaactcattttggatcatattatgaaatcttttaaaaatgggaccaacttcagatttttctttcattaagcaaacccatgtaaccctagtatgatcatcaataaaagatacaaactatctagatcctatgacattattgatttcaaagggatcccaaatgtcactacggaaaactggttcttgcatgttttgacagttgacaaatttgacattgaaaagacttagcattggaatttttaaataactttggaaacaagtttttcaggtacaaaaaatttggatgtcctaatctatagtgccacaacttgatgacactatcattatttggagaattaaagggaatagaaaaagacgcactacatgtaatttgagtttgtttcttaggactattaagaacctcaagaagatagtcctgcacattccttagcattgccaatcatcctccccgattccaagccttgaaattcacaatgtgttgaataaaagttagtgacaatttaagtctttggaaagcttgctaattgatagtagattgcagataatattaggaaccaataagactgattttagaattaagtctttagtgagacatattgatcctattcccaccaccttggacatagaaccatcagcaatacgaactataaagttctcagaacacaagttgtaattgtgaagtaaatcaacattaccagtcatatggttggaagcctccgagtctattatccattggttattcttctccttttgagagctctaggcaattgaaaaactacctttttgagcaaccaaagctgctgctgttgagtttgtttgggaagcggcaatctgagagattaatttctgaataatctttacttgttctttgctgaaaagtgtggacttctcagttgtctgctacagtaagtacttaattctgaaatcctacagtaattaaacttggaatcttgcaccaaactcttgcaacctgaagactagtaagtacttaattctgcttatgtaaaaattgtttgattttccaggccattttttgttgccattaaattgttgtttatctatttattgagcatgcattgttgaatttatatcttacaagatctttatatctaaatttattttgtgcattttcattctaaatagctctctgtgagcaggcattacttaatcgtgtgggctacaccccagagat

SEQ ID NO: 12190 - DNA, 4165 bp, Vitis vinifera
  Intron number 2 from transcript GSVIVT01032568001 (locus G SVIVG01032568001) derived from phytozome v7.0 (chr-ID chr1 4; pos 28425602 to 28429766)
cagtttggttccataagctcctgtcacatattcaggtatgcaaattaggttttctagacagtataatatttatattctttggtgataaatggtttgagattatctatcagtggttttctgtctatatttattaatatgcaagtttgcatatgttaaacgttattctctgaatgtgcgagaaagagtttaatcattgaggtagaaattttggcccttttggagggttgcaagcaaaagctttaggtccaaagcttaagtatcggccgagtttgatatgacttagccaagtcatatttagaatggctattaccaagatggattttccaattgtaacaatgaataagtcggtaggttgactcatggctagtacaattgagtcgtaattaagccatggctgatatggcatagttatgaccaagttgcattatggtgtcaagcttatacaagaaccaaagtcatattggctccatcattcagcatggaatcaactatgaaattatgtatattgagtagaaaaaaatttatacttgaaatagtatggttttgaattcttatgttattacatatcaatcttaaatgtgtttttatgaatagttaaacaatgtgaaatgtggtaaatgtttttgtattaatttgtttagtacatttaattgatttcctcctctagtaacattagttaatattttagaatttttgtaacttattaactagctctcttctcctctagttggtagtcacttgaaaggattatgtaaatgggtaagcttgattgcttagtaagaaacatgtacaaaatgatacagtgaagcaacatatgaaacatatggtcttatgtttgacatagaccattatatgctcttattattattattgataggtaaaggtaggtatgtataaattaacagtaggaaaaattacactaaagtacacaagaaacatacaaggagcatcaaaaggaaggcctcaaaagagaggacacaaaaaactaccctgactctcaacaagatcccactcaatcttcaaaatcaaacaaagacattgattcttcgcttatatacatgctatcccaagttgaaagattaccaaggaaggaaagttttatcttttgatttttttgttccttattttcaacaacactttgattttgtcccatcaaattgtccaaaatttgcaaagagggcagtttttcacacttttttcatttcattccctacaaaggaaccatgccaacttaacatgttatctttcatcgaaaaagagatcatccaaaccactttgaataaagagaataagagatgccaaagaatccttgctttggtgcaatgaagtagaatatgattaataaagtccccctcaagtttgcaaagaaaacatctattcactagtggtcaccctctcttttggagattatctaaagtcagcttttccttaactgactttccaagcttgctttggatgggacctatgaattccaaataatgtttgttggaaagtggaccacccttcttgtttccaaaactaaatagaaagacttgactgaaaacaaaccctttttagcatcctttaagatcaccttgttgttttcttcccttctaactttctttagtaacaacgtttagaaaaaaatctcaacaacgttcaactcccaatcattaaagtgcctagagaagcattgattctaatgactcctcgttcctaagtcttcttataaatccgccacccaaacctcctttgacaaagccaatttatacaaagagggaaaataaattacagaagggctcccagaaactataaaggaggtcttaactagctggaggggcccttttgtgggaaagaaaaggaaaaagatatggaaatccataccgttgtgtattttttggacggtttggaaggaaaggaatagactagcttttagggggggagtgttagatattcaaaagcttaagaattcttttgtttatagtttgtggagctgggctagattgtatattggagaggagtgtctgtcccttatagggttcttggaatggttagcgtccaactaagggatggtgagactttgttggtcttttttttgctttgagagggggtagttgctttgtataccccctgtatactttgtaactttccgtctcttctttaatgcagtttgctttacttatcaaaaaaataaaaataaattacataagggctcctccgcacaccatttatctgtccaaaacttaacccttctatcattacctacttcaaaggaagttctactaaagaaaaattctcacccctttctcatagctttccaaacaccaaccccataaccatctctgacttcactagggtgctaacctgttcctcatttcccatgcttaccctttatttatttattttgataagtaagagattgtattaataaaacgaaaaaagcgcacaagagtacatagattgtatacaaagagcaccaagcaaaaaataaaaaagagggaacaaaaaatactccctctctcaaccacgacccaaccaatctatgatatcaatcatatgcgtatgcccttctcctatatacacctcgacctacgtatagaaattgttaaggaataacatttttagcttttaataagacaattcctcgcaatcaaagcatcttttatttctttccttccaaattgtccaaaaaaatgcaagaaggagcaactctccaagccttaatatgacttctccctataaaagaaccctgccaccctaggagggtctccttaactgtctcaaaaatagcccaccgaacaccaaaaatggagaacaccaactgccatattaatcttgtattttcacaatgaaaatgatatgattaatggactttgactcctctttgcacaatgcaccctctttcccatacttcctctctataatctactcccatcagaaacatatctccagctctacttgcaaagcagagcccaatttagaagagataaatttctaatgcccaagcccccctttctcttattcgagcaaacacccaaccaattaaccaaatgctactttttctccaaagtcccacctccccaaagaaagttcctttgtagggattacaaacaaagacatgttagagactaacatgctcaataaagtacttctaatcaacataagccttcccccattaggaatatattgtcttttccactttgacaatcttctacaaaacctcttttccattgcgtcccatactattactaatttgaaagggctcccagaggcaaacctaggtgagtagatgaaaattcccccaccttgcaacccaactccattgccaaatctgctacatttgcaaccccaccaattgaaatcaattcacttttatccatgtttattttaagccgtaataatgcttctaaccacataagcaaccaagttaaatgaatcaattgatcttgggaatcctcacacaagacctaagcatcatttgcaaacaaaagctgagacacctccaccccctctagtttggaaatcaacaaagaaaagatgaatcaccattatcactaatccatttctccctatagctttgattactttgaattttcactatgtcgtcagtaagctcttttaccaaattgatgcaagatctatagatttctagcattatagaaggcaataaggttcttgagcaatcatgcctagggaaggtaatcacacttttaaaaggcaaatagctactaacttctcaagaatttttattcattaaaataaacatactcatggaacttctttttctaataagactaagattatttcctagtaggaacctatcacaaaaaaaaagagactatttcgtagtaggaatacgattatttttcctagtcaaattagatactaacacaatttaactaaaattaaactacttgaatgaattctaataaaataaaaaaacaagacttcaactaaaacaagaaaatgctaaaattactaaactactttttctgaatattattcccttttaacttcctcttcaggtctcttgtgaatatgttttgaaaatctcttgtccacacacaaccaaacatgtgcacacacacaccccaaaagcatatttcattctaaagtatgacatggtgtgcgtcttcttgtgttttaagcagccagcagcagagtctcattttgtgaaggtggcttc

SEQ ID NO: 12191 - DNA, 37821 bp, Vitis vinifera
  Intron number 1 from transcript GSVIVT01021519001 (locus G SVIVG01021519001) derived from phytozome v7.0 (chr-ID chr1 0; pos 6483417 to 6521237)
aaaagaaatcatttttctttatatgtggtttcaaataaaaaaaaaggaaagaaaaatactaaaaaaattgattttcttatatttatttattataaaaaatagttaaaaattgaggcattttaaaatgatttaatctttatataaaaaagatttaaaataagaaacatttttaacctaaaaaatgtttttggaaaaaaaaaaagtatttgacaaaatttaggaaacatttttaaaaatttgaagattcatttatagtgttggaaaattacttgagatgtttttttttaaaaaaaaaaatttgataagtgattctcttaaaaatacttcgtgaaaaaacattttaactaaaaacacttccaatataaatacagtcaaacacatttttagttatatcaaatgagttataattaaggataaaaatattaggatatattgttaatatatcgtgtattggatcaacccaactagtctatacatgacgactttttaatcttatctaatggactaaaaaatggataaagcctaatgacttaataaatgtaaatttttaacttttatatatatatatatatataattattataaataagttaattttaattattaatatttttaaataaaatattttgtgtcaaaatgtgccgatatttttaaataaaaatcataaatacatttgaataacataattaatacatttacaataatttagttttaagttaatgatttaattttattttgatattcaagtgtaataatagcctattgagaataaattagtttagtgtatttttacatgaatataacattgaatttaaattagtacatttttacaattaattagcatatttttaatagatgtaagtaaattaccttatcatattaatacatttgaatcaaataattaacacatttgcaataatttagcttcataatgagtgtatacttataaaattcacatttaagaccaatacaatataattacatttaatattgcaaatcatatcatacatatatcaatttcttcaacaaaacaactttaaagtatctattatacttctaattttatttctaagagtttttcatgttaggatagaacccttaaaagcatgacatgatgtaataatttggaattcattatttatttaatgatgttccagtttcacttttatttatcattatttcatgtattatactttatgagcattcttgcatgcatattttgtattgtacgtgacttaggtgcattagaagttgtacaaaaaatctaagtcatgggttctttgcaaatagataacttgttcacaaccagttcatgggtctaggtaacccattagaggttgtagtgcaccacttcctaattagagggatgactagtcttggctatcaggatggctttcccataatgagtgtactagtatgtatggttacacattggacagaacctacggtgagtcatgacttaaggctatcaagtagtcatgacctcaccaaactgctttattgtgttgtctctcaaccttgagagagtattgaacttgtgttaaagttaacagtgactttgacctacgagtgagattgtaagttgatcatatattccctatggattgactcactcttgatggaagctcgtagcaataggtatctcaataaagggacaccatgatatctcttgggattgagacagtgtgtcctattaggtgatcctaaggaggtgtgttcatggaaactatgaccatagtagttctttaagtggaacttgacataggctctttgagagctaagtatgttaattgaacacacaatagaaggatttgtaactcaagaatggtagagatagtcttgaaaggctgatagttttcaccttgttagactatggacaccatttcatggagactgaacacaatggatagcaagtcactgatctaagcattggtgtcttgttgttatttatataggatactagagttcagttgattttctatagtgagatgttgaatcaactttagaattagattttgagggaaccagtattcctataggttccattggtcttcgctttaagctcatatagtttgttggcatgggttatgagggttggattaactctaggttcacttttgtacattaaggcattttggtaataacacaaggttgcatagaggtaagtgaacaagacttctggattaggctaattgaataatcagtaggtccctttgggttaattattcaattaggacccattttgggttagattaagtgacctaagcccatgtgggctcaagtcacttaaactcacttaggaacccgataaatactctctaggggttaggatttccatagtttttgtcttccaccatttagagagatagagagtcatagcctccactcccttttcctcatagggcaaaagacttcgggtttacaagacttctgtaattttaatcttcatcttcaccatgtggatttgattcgagaacatccaaatatgagatatggttttcattagcactttctgaatgcttttaaagtataataatattattatttttgttgtgcataggatttagaaaaagcctaggatagttatacttgttcctaacctgatctggacttggaaaacgaagatatccatgttttttccatcaattggtattagagtcatagattagtaatcgtactaaaaccattttagggtgtgctaacttgtttttgtagggtttttgtgtttatcctatgaccctaaggataattaatgtgtgttttttttattatgatcttgttataatatggtggttataaccaatgttttcagaaccgaaccggtcatcgaaccggaaaaattacaggttcacggttcactggtcagaccggcggtcgaaccggttgaaccggtgatgtaataaatatataatttatatattatataaaattaaaaataattataaaaattaaaaatatataaaattataagttttaataatgcttggtttttatatttggtatattaaattaaatgataaagtttaatattttaaattttattaaatagaaatatgtaatatttaagaatgaatatatatttaagatgaaaaaatttataatatttaattttatctttcttttttgtattttattgttttaaaattattctattaattagtttatattattttttataattattattataaaaatgaataggaatttaaacatttacatttctttaaagattttatatgataaaaatttgaaatgaaaacattaatcttaagtcttattatatatatatattttaacaacattgcaaaagtccagccctcatgcagtcatgccatgcttccaaccggaccagctctcaaagaggccatgttctattcccagtcccacatcgaaagcacatgaattccatgtgcttcaagtgctctataaatagagaccttgcagcatgcttttcaagccaagcaagccaacaaattgggcttggaggcatggcccaagagaaggatttataagttataattttattggattgggcctggtggcttgaaccaattatgggtttataattagttaagttttaaaagtattgggcaaggaattgggctcgttaatgggcctcataatagtaacaaatatttgtagaagagggaaaaaaaaagcttggccggttcgtaaaaaaccgaacggtttgaccggtttggcggttcaaccggcggtttgacctgtttaataccggtttgaccataaaacggttcattgggctggaccgaaccggaaaggtcaccggtcgacggttcgaccggtcggaccggccggtccagtccggtttttaaaacattggttataactgtgattgctttttattgggtatgtaataattacttggattggtttttacttttcctagatgggttgtaagcctcataagatgcatatgatattttgttttttgtttttttttttgtttgttttttgttttgtttttttttttttttttgtaaaaatccattttttatatcttagaatgatatgtaaactccaaatctttggagtataggattttgttgtaatttttaaataatttttttttatttttttatttttatcattctttgcaacttatgaagagtatggaagcaatctgaagcatcacaaaatgtttgtgcacattctctttctagaaaagacaaaataaggcttcttgaagtttcttttataagtttctgtggtgttttaggtaaaaataaagattttgggaaaatattgatttgagatccttggcagcatagtttcatcatctttaacttaaaattgggatgacattccatgagatttttggggcaaactacatatagttttgaatcttaggaagttaggaatccaaggcttcaaatgaatcgtaattcggagttgaaacaagggaattatagttgattaaagcaagactgcacaaaaagcatggcaacatagtgacgctgatttcaactcaaaatcggggatacctcctttgagatttttgggtcaaaccatatatggttttgaatcttaggaagtcaaaaatccagtgtttcaaatagatttcaattcagagttgaaataagggagatatgactgattaaagtaaggttgtacaaagggcatgcaattacaagattgagtttggaccaaattatttttggttgtatgggctcaattttgggattctttttaggctctttttgtgaaaattgggcccattgagtttttattttttcactaaccctatctttggttgtaggactattttgataatttggaatttatcccaattttagttaccaaatttgcaacaggatctctaaggccatgagaattatttatttaatttcctttatatcttttatgtttttatttttttttatttttggaatataatatatttttctattcgtaagttaatgatttttcatattttttttcattcttttagataatttattaaattggaatgtgttaagaattaggaaaattttattttaggtcaagacaagttggaaagaaataaggaacttacttccttttcaaaattaaactcttggagattttttttaaataaatatttttagattttagatctctaacaatctttttattttaaggaagaagttttatttttccaagtctttacgaaataaaatattctttcctatttagcacaagattctaatttaaagaattaaattattttttgaaaaatatatgatagataattcataattgagataacttaccaagatttgtttcaaataaaataaattaaaatggtaattttggattttcttgaaagaagaaattttcataagttttatttccactattatttatttaagaaattggttgttgtcatttggaattttaaatttcttttggggttttcctttatttaggttaggtggttatccaggctccccctagagagaaggagaatgacacctaaattggtcatccagactcttcccccatgagaaaagaaggaaaccatttagtttgaaaaggaaagtttaaggataaggaatataaaagatattccaatttggcataagagtctcaattcaagtaataaataaaagttttggaaattctcataatagataatttattttaagatagttcccaaaattatcttaaagtctcttttccaaaatattaagtaggagcgggtcataggcaaatctatagcctccaagatcgagctcatcttgattttgggcccattaccatcctaaagatggggtgacctaaggaatcaaaggatatggactatcctatatggtcaagagtatatacgtttgtagtgggaatgaccaatcctaaagatggaactcttcacttggtaacattgatgtcaaagatcttggttacatgcttaatttagacatgaagtggtagaatcacctaaaatggtcctacttgcatgggctaagggctaaacataaaggtatgttgatcaatgccttaggataatctttggaggtttaaggcaggttgattaattagagagggtctctacctagaaataagagtcatgacctgcctaaaataggcttgattattttgatactaggatatcttgcataaatatatgtagtttgagagcactacatttttgctaaattaattatcaacttatcttgaatactcaatttctttttattaatgcatggaattattatatttattgtagatatcatgtctttaacctgtcacctattatcttttatttaaattggacataattatatattgaaaacaatctggatatagtattaattgcatagaagctcattttggtagattttgttatttccttttaacaaacctatcgtaaagtaaaagaaacacatcaaaggtgacataagacggataaaaaaaactaagtctctcatacttgggtctttagataatgtgttgcaaaagcaacacatgtctattgccatagtctatgatattctctttaaagttggaagggttatttggtgataagggcaagtcaactaaacaagtttcccttaagactattatgaacaccatgattcatgttatcctagagatcttattagactcttttaggatgtgtaagaaaattttcaaagagtggaaaggtgttcatatggaagtcaaggttcttcaggctcttctatcaagaagaagaaataaaaaaagttcaagaaaaggaatgggagaacaaactcatgggcattaattcctttgtgaccttttaggacactagaaaaggaatgcttggagtgcttaaggatagataagtacacatcatattcttattgttaaataaatagtggtggatttcaccaattgtagtagatagattttaggcctgattcgactcatggtagcttagctttaaaggcgtatcaacaaaatttataccttgaatactattactaaagtagccaagctactatagcatagtggttctaggatcgttcactgggaagggttttcgcaaacacaagtgatattcaaattaggaaaataggtgattttcttatggatgttagctttaaaagaagatgtaaatgttttagaaagatttaaactaatctaagctaacattaaagactaaaatgaaagggtgtaaaaacaagtttctcaaagataggatagctatgctctggctcttatgcaaattggaaatctcaggataggctcctcgcgttggggttgcaactatggtgatgcttgcttcccgaaccggtatggatttagcaaatcaagttttaatcctttaaaatggcaaaacagatggtagtgaatttcttcaatggttattcaccttagacttcctttgaatggctcgtaagagataactaatggtctaaatccaaaagcttaccaaatattggcaactcaaagtcattccaggtgataaactcacctttcaatggccattgaaattggttctaacggattaatacaaaacttggaattgaaaacctcaccttccaatagctcgtaggagataactaatggatagaaatccaaaagcttatcaagtattggccgttggaagttgtccaaaggaaataaaaaccaaactttgcattaatgaacctttaatgaaaaacgactaccttaccttccaggtgcgagaaatttccatgggattgcatccaagccatcacataacatccatactttgagaaactaaaagttttagccaatcatcctttgaggaaaagccctcaaaggctgtttagctactaagaaaatagaaacgggagagctctgtaaatattctctatctatatatcaatatctcaatatctcaatatttgttacaacggatgcaaggggatataaatagagaagttttttcaaccttcctagctaagaaatcttatgattggtggattacaaggagaagaatgaaaatttatacaaaaatatccaaaagaaaagatctcgtgtggagtcggcagaaacagaggaaaattcgcacgttggagttccaatttcgcactttggtttgaggcgtgcgaaattcccacactttggactgaggaattcgcaccttgatttccatcgtgcgaaattatccctcagcttgatgcagttgtcttccgaaggccatatcttcctcatttcagctccaaattgtacacggtttgaagcgttggattcttcacttcctgatctttgaaatggtatatagcatgtagaaaatgaacttcgggaagtgctccaaaagtgctaaagaagactgcagctgctgtcctctattttcctctttgcttctttttgcttctctttgcttctctttgcttttctccttttgttggcttgctttggtgtagctaaaagcttgctttaacttgtccaagtagctcctccatcatttggcatgcttgaattgattcataagctgatataaacatgtaaacttgccacaaaatggttaaaaccaattactaaggaccttaatgaattaattgggttaaatgaatatgattgctactcaaaggtgcttaaaaccattataattaggtctacaaaatagcactttttggtagtaatcaaggcccactatctatagttctttacagggttttaaacaagtgagaaggtcacatgatgggattatacttaccttagctttagttgcaaggttagttgtgtaagcaagtgagaggtattacttcttttttttttttaatgtgagactccattatcattttgccaagtaatgagaaaagccatatcttactaaaagaaagaaactagcactaatcaaacatttgacttctaatgcctaggtcatattaatctatatagaaattaagtctagaccttattaatccagaagatcttttagtctatgaatattatatagatggtaaaatgactattggataaacatatcgaggcactttgattaaattgaggtggttagtctagtaggtttgattctttccaaatagagcatgagatcttattccaattatgtgcaccaaggactccattgcaaaatggagtaatggaaataagatattaaactttgatagacaaagtgagatcaatgattatttctcattacttcctatattctttggggatatatcttaaaatttgtgtaatacatcttctttttataaagatgtgtattagttttataagatatcaaagaggatttcaggattattactttatagtcaaaattatcagaaggtgtttgttgttacaaataccagattttttttataaagattatatgatatgtaataaggcaaacaatgacatagattggagaacactagaagatagtctcactatacataagatactatggatttagtaccaaccattcctatttctagttcaccgatgccttgtcgtagtgggagggttgttaaataactagatcgattcatgtatctgggaaagtctttcgaggccattctaaaggaacatgacatcgaccccatatattatgataaaacaatgagaaatgtggatgcacatctctggtaaaaagctatggaagcagagttagaatctatgcgattctaatgtagtctgggttcctataaaagcacctgaaggggtaaaacccataggtgtaagttggtttacaagaaaaacaaagaagtagatggaaaagttgatatttatgcggttagattgtagctaaaggttatagttcgaaacattgtttcgaatatggaaaacctttttactagcagccatatttagatccatcagagtactcctacccattatggtgtatgtcatttatgagatattgcaataggatgttaagatagtgttcttaaatgattatctttatattagcatctatatgatttaaatggatatttttcatagcaaaaggccttgtgagtacaataaattgcaggaaagcatggtgctgttctaggatcttataggtaaatgataatctactcattggtaatgatgtaggattattgttattagtcaagatctagttttctactcagttctagatgaagaatctaggagaagcgtaatatatccttattaaggtctttagggactgcaataataggaaactagtactacgtcaagctacctatgtggataagtttttggtcaagtatgtgatgcaggattccaagaaaggtttgttaccttttaggcatggaatttccttttcttaggatcaatgtcctaaaacacctgaggagaaagagcgcatgcagttagtaccctatgcctttgcaattggtactcttatgtatgcgatgttatgtactaggccaaatatttgctttgaagtggatatggtgagtaaatatcattctaatctaggtccggaacattgggtagctatcaagcatatactcaactatcttaggagaacgagagattatgtgtttgtgctccaaagtgttgagatagtttagagggtaacatgatggttgacaagataccttatgtgaagaacctggtagatctcttcaccaagacattgtcagggagagtctttattggtcatagggatagcataggtttcagatgagtatctaacatgctttataggcatgatgctttgagggctaatgagagaatgttaagatataacccttaaaagcatgatataatgtaataaatttggaattcattatttatttaatgatgttccagtttcacttttatctatccttattcaatgtattatactttatgagcattcttgtctgcatcttttgcattatacgtgacttaggtgcattagaagttgcaaaaaaatctaagttatgagtttctttcaaatagatgacttgttcacaaccagtttataggtctaggcaacccattagagattatagtgcaccacctcctaattggagggatgactattcttggctatcgggatgagtttcccatcgtgagtgcactagtgtgtatggttatacattggatagaacctacggtgagtcatgacttaaggctatcaagtagtcatgacatcaccaagctgcttcattgtgttatctctcaaccttgagagaatattgagtttgtgttaaagttaacaatgactttgacctacgagtgagatcgtaagctaatcatatattccctatggattggctcactcttgatggaagttggtagtaataggtatctcaataaaggggcaccatgatatctattgggattaagataatgtgtctcattgggtgatcctaagaaggtgtgttcatggaaactatggtcataatagttccttaagtggaacttaacattggttctttgagagctaagttatgttaattgaatacacaataggagaatatgtaactcaaggatgatagatgtagtcttgaaaggttgatagttttctcattgttagactatagataccagttcatgagaagactgaacacaatggatagcaagttacaaacttgagtacttggtgtctcgttgttatttacatagaattttggaattcagttgattctctgtagtgatatgttgaattaactttaaaattggattttgagagagccagtattcctataggtcctagtggtcttcgctccaagctcgtatacctttttgtcatggttatgagcgttggactaactctaggtttgtttttgtgcataagggtgttttggtaattacacaaggttgcataggggtaagtaaacaaggtttttggattgagttaattgattaattagtaggtccctttgacttaattaatcaattaagactcattttgggctatattaagtcacttaagcccatttaggaaccctataaatactctttaggggttaggattgtcatagtttttgttttccaccatccagagaaatagaaagtcatagcctctactttcttttcttccccaccagaagtgtgtcaagattaagattcgagtcatcgagcggaagactttgggtttacaagacttttacgatttcgattttcatcttcaccatgtggatttgattcaggaacatccaaatccgagttatgattttcgttaacactttctaaatccttttaaagtataaaaatattatttttcaactgtgtataggatttagaaaaagcttatgatagttatgtatgttcctaacttgatttggacttaggaaatagagagatctgagtttttcccatcatttcttacatttccatgagtttgaattattttttggcccaccaatattttgtgtcaaaatatctgccaatatatattcgcatatctgtcattactgatattttcttataaccacataaaattatgggacaattaacacactattaaataaacactattaaaaatgatctttaagtaacatgcccgatgtgaagtcacaaaattcttttaaataaaatggtaaaatataattttgtttttcaaaataaaattgtataacctttttttaaaaataggattttttttaaaaaaaaaaataaagttacaaaatcatctttatctctaacacaacaaaatcttttcttaaaaataataaaattcgaaaaatttccttccaacaaaaataaactaaagtctcttttcatgttttcttaaaataacactaaaactattttccttaaaaatagtaaatttataaccattttctttaataattttgaaatagtaaattgcaagaattcttttggataatactcaagaaccttttaaataaaaatgaaatccccttgtaaaatattttttaaatgaaattaaataaaactctctttttaaaataaaatttaattgggaagtgattgtcacaagtgaaagttgtaatccttgaaaatgaagtttgatttagaaataattttcaaaaatgaaagttgtaaaaatattcaataataaaaatctctttctaaataaaattgttttggggatttttattttttttttataaatagaaatcgtaaaaaaattattttaaataaaattggattgaaaatatttgtgtaaataaaatttgtaaaatatcatcttcttaataaaattgaattgaaaccttctttcgtaattaaacattttctttgtaaacattttctaaatagaaacttaaatacttatttttgaataaaattgtaaatctagttttcaataaaaataataaaaatcaattcgtttgtaaataaaatcaaattggaattttgttttgtaaatgaatttttaaaaatcactttcttttaataatttgtaaaaataaaaaattatttaaacaaaaattgaattgaaatactcttttaaaaataaaaattgtaaaaattcattctttttctagaaaaaaataaataaaaatcatattcttgtaaataaaatcaaattcaaaattttctctttaaatgaaattggattcaataaattattttaataaaaaaactaccaaatgtctatttgaaaataaatttaatgtgaataaataaaacaaatcctttgttaataaattgaattttatttgtaaataaataattgaattttctttaaaattgtgtcgcaacattttggagtaataaacatctcttctaatgaatcattctatgcacttatcttatattatttttgtatattcctgaattaatttttttcatctcatgtcatgttgtatgtttatttgtatcgtactttccttggtatctatctatgttttgattaatcaattatcataattcctttaattcatttaataaagatcataggtatgtaaacttaaagaggtgctacaacttattatcataactttttgacaagtgagctgacccaaattcctttttggtttgcatatttgtcattttttcaaataaataatcacataaagtttctttattattttgttttccctttaacaaataagctaaaatcagtgatgatttcaactttttaaaaaaatcattttttcactataaaagctgactcatgctattgactggggatggatatgaaaaatgtggatcaatggtgagtattattgtgtttaaaaactatgcacctaattgcataatttgaataagtagggatgcacaatttgaatggtacacaatttaaatgaataagggtatgttattattattattattatttttctagtgcacggtatccaatttcaatctataaaaattttaattcctaatagaaaatatttaatacaatttttttttatgaaaaatataatttatttttattttatataaataaaaaatatattttttgaatcatagtcagttttttattttatataagtaaaaaaattaaatattttaatgaagttaaaagttaggactacgattaagttaaaattataagtaaaaagctaaaatcacgatcattgattaagattttcacataaaaaattaaaataaataagatttataaataataaaataaatataatttaatatactataaacaataaaataatatgataaagatattttatttaatcaataagtgataaaatttataaaataaatcaatattttatttagcatgaatatataaaattttatatcttaagcctctaaatttttttattatacttatatttatattaaaattattttcattaatttttttattacaaattattattttgtattttcataaataattaaaatcaataaatatgaaaacaataaaagagtaaacaaaaaatgaaattaaaaaggtatcatgagaaaacacatgaccaacatattgaaaaaaaaaaaaggaaaaaaaaaagggaaaaaaaaagggaaaatagttaagagagaaaaaaaaaaaaaaaaaaggggtgagacatgacctaaaggtaaaatggaggtggaagaaaaaagaagtaaaaaaaaaaagaaaagtgaggtggtgtttgtttttttacttaattctaaatagaatcttaatacttaatagtattaaatattaggttgtttgtttttatagtattttatttctattaagtattaaaaagtaaaaaaaaatcattgtgttattttttctatttaaaaaaagtcacatattttggttttttctatttagtaaaaagtttataataagtcatgaaaaagtaaaaaaacaaacaccacatgagtcgtgagaagaagaggaatttaagtgtgcgtgtgaagttgatcgtggtggttggagggtagtgaaagtgaaagttatcacaaattttatttttttaaggttacatatgggtacattattttcccttgaaaaatggatgaaaattgatttattttaattttgttataccataaaagtgttgaatctatagtagtaaattcatatacaatgatttatttatttatttattttagagttattgtttttaacgacgaatgtacataaatatttttaggaaattgaaagtaaatttattttctttcctttgaattccatgatatcgagaataaagataaaaatcaaagaaaataacatttcttatcgcccaaaactacctagagggttgaataggttgtctaatttttatgatctaaatctagttccttaatttctaatttatcaaaattcaactttagtgtaatccaagaatataagattaagattaatctcaaatttagcttcatatattattccaatctcaatgtaacctctcattgcaaacttttctctatttctccatccccttcatatcgttacaaagtctgatcatcctaattaacttaaccctttttttcataagctttaattattgactatatcatcaccggtctactatatcactctccttattgcaaacttcctctagtctttttccttatctagagttcaaattttgattatccaacttgaccctcgtatagtaatttccttccaatcaaaacctatactcatccattttaactaggctttactttactttatcaataatttaacaaatttgacttttcttttaacgactcttcacaagtttcactgcattttaccttacacatccaaccatttagatttgaccatattcctttatttatctagttatcaaatcatacaaacttcataaattgaattattttaatttagtgaatactttctaggaactttaaactccctaaatgttttccatttgagttaacctcatcccttcaacatgtccaatttaaggatgacttcttataaacttcaatcactcatttttactagtttgacataatatcactaattgagaattacctaagtaatttttctttcttgtttgataattttagttcccgtctaacgtgagatcaccgatccaaaactaccaaagtaatatttcttttcatcttatagttttcatttaacttgatcttcctctcacatcataagagttacgtaacggataattttgtggtagcatttaaatcaagatttaacatcataagagctatataatggatatcaatgcagcaacgaatcaatatcttagtcaaagtttttgagttaggtattttttttgtcatttttccctcttctctctttcttcttttgcactctatttggcatcctcgtaattccatgaataataaaaaaagtttttatttcaaaatttagtaattattagttcaaggatatatccatctccattccatccgggctatatttgttccaaaaaggtattgagaaaagaaaaaaagttaaaagaaaatgatttatgtttaattttattatgcaaaatataaaaaaaaataaatataaataaacttagttaaaattttatatatttttgaattatttaatttttatataaaagaattaaaatagataaattaagtttagagtaatatataaaaataatttattaattttatatatatatatattattttattttatttttatttttcttcctttttaattttcagtacccaagcacaacctttataataataataataataataataatagttaagtcaaaatttgctcactatgttatagtaaagagatataaatctccatttatttattcattaaaatatttattttatgcgcatgtatgatattattcacttcctgatcctagcttaatcttcatttaaatgtcatcacgatccaaaaataaaattatttaacctccaaccacatatcaagaaaattaaatattttttatattccgtgccacctattgttatttatgtaaggtttaatgcttactaatatctgtcttccgtggaatagtattagttagaatcgataagtaattggagagcagtgtcacaaggcaccatctattcattctatgaattcattagacagcaacgggttatatttttgtacatatgaatttatgatcgatattgcgttacaactcatatctgaaactttattttagtcggtttctgcagggtccacaaaccaaatcgggaaaagtggggactgagcaggaacatctccagacgagtcaatccaacacttattaccccaccccaagaaataaatcactaaaaaaacaagataagggtagaatgtggataagaacactccccccatggtggtctgagtcttccattttaaccagcagagtcaggtgaaggtcatatggctacctccattcctggccactctattggaggttaccctcatcaccccctgatgctttcttcattgagaattgcacacgtacccaggcagtcaggcaaggaaacagaaaattaataaagcagcctgcaatgcttgcgagacgtgtagtctcagaagtggatttgggaaatataattctggccgtatgtgcatggctcggcctcctttaatccatgcttactgatatatgctttattcaatgaaattaactgtatacttagcgaagtctgcatcacttgagttccaagtgtgggctccctggtggcttggagccgactccatttgggattcaaatggaatgaattctgaattctagagctaggcaatggaacaccaagaatataaaattaagattcatctcaaatttaacttcatgaattattacaattacacctgatttgttcaacatttatagtaaaaaaatattaattcaattatccattgtcttattaatatgaaaaactttaagcaatatatgatatgttatcttaattttaacaatttaatttttattagtttattcttctctgaatttttgtatttatttaatatactaaaacgtaatgatataaattgatttattcactttctactacaaaataacttatcttttcctatatgatataaattgatttatatcactctccttattgtaaacttcctctagtctttatcaattcatttccttctcttcaatcgaaaattatgcccacccaatttggctaaataattaaaagagtttttatttcaaattttagtaattattagtttaaggatatatgcatctcctttccattccactatatatagttcccaaaagttattgagaaaagaaacagagtaaaagaaaatgattttttattatgggtaaaatatggaagaaaaataaatataaataaaattagttaaaattttatatattttaaaattatttaatttttatatagaagaattaaaataaattaacaaagtttaaactaatatgtaaaaaaaaattatttactttatatttatttttcttttttctattttttctttcattttactttttattttcttttgcattttcatcaaatatcaatttatttattcattaaaatatttattttatgagtatgtatgaaactcacttctgatcctagcttaaacttcatttaaatgtcataacgatcaaaaaataaaatagtttacatccaactacagatcaagacaatataaacgaaaattaattattttttatattccctgccacctattgttttttacgtaatctttcgtggaatactactaattagaattgataagtaattagagagcagtgtcacaaggcaccaccgatccactctatgaattcattagacagcaacaggttatatttttgtacatatgaatttatgatcaatgcgttacaactcatctgaaacttttgttttagtcggtttttgcagggtccacaaaccaaatcgggcagagtgaagaggaacatctccagacgattcaatccaacacttaccccaccctaagaaataaatcattaaaaataaacaagataaggctgtgatgtggataagaacactccccatggcggtctgagtcttccattggaaccagcacccatcatgacccaacacagtcaggtgaaggtcatgtggcaacctccattcctggccactctatttgaggctaccctcatcagccatcaccccctcacgccttcttcattgagaatcgcacaagtgctcaggcagtcaggcaatgaaacagaaagttcataaagcaacctgcaatgcttgcgatacttgtagtctcagaagtgaatttgggaaatataactgcggcagcatatgcatggctcggcctcctttagtcgatgcttactgacatttgctttattcaatgaagttagctgtatacttggcgaagcctgaatcacttgagttctaagtgtccgcttcctgttggcttggatggcggcagcttccggactccatttgagattcgaatgggatggattcttaaagctatcgctagaaatggaacacggacactcctggggaatatgccctttgtgagaggaaaaaattatttgacatgactagctccagcagtgccttatcggaaccaacaccaaagtaattcattgcctcttcgttgagtcgtgagacacactagagctggctcaggctaagcaacaaaatttttttaaagggagaacgtttgctttcgctttatatttggcttcagtgaatcattacgtggtccacaagtattttcaaaaatattcctgaaaaataatttttaatatcaatttttttaaaaactgctttataactcattctccaagtcaaaaacttttaacttaatgaatacttcttataaattttaggtccaatttgagaataagttcatatacaaacttcgataactcattctttcttgacaaacatgatattataacatataaactatgttgggtagaataaaatatcaggaaacgaaaaaaataataataatattcttatatttgattttactaggaaaaacatggaagaaaattgaatataacaaaacttaattaaaaatttatataacttttaataatcttcttatgttggttttactatgaaaaacataaaagaaaattaaatataacaaaacttaattaaaagtttatataattttaaattttttattttttatataaaagataaaaaatatataaattaaatttaaagtaactcttgataatgattctataaagcacttttaatatttttaatatttaaaaatttttatcattcaagtaccaaaaataatagaaacactttttagaattactttcaaatgtattttaaaagtacgtttgacagtgattataggaaatatttttaacatttttaatacttaaagaatgaaaatttttaagtattataaatattgtaaacacttcttaaaatcactgtcaaacaaactcttaataattttaaaacaattttttattttcttttaatttttattttgtattttgtatttttcctcaaatattttaaaaccaaacataaccataaaaaacttatgtaaatgaatatttttttccttctttcacaacttttatttgatttaattttttcacatattgtaaggattacatggagaataattttgtagtagtattccaatcaagacgttaacgtggtttagaggtgaagaatttagtggacaatcttattgcaacatttgtagtgtaccaagtggattttagaaatatgattatggcattacatgcatggttgggcttctttatctttacctttatgatccaagcgagtctaaaatttaaatgactttgagttcttttatctacgattcaattaaaagttatcttcttctctttgtttaattattatttttataactcattcttatccaatattttcctaacattttggcctccttttatctacaacttatttaaaatttatctttatctcttgtttaattctcattttaataattaaggattatttaatatttagattttatttaagatatttcttactttttgttttaatagaaagcttaagttaaaactaaagtcacgagacaatgtcgatattaaaagagttttagtatgcgagaaagattacttttaacttaagtcacgagacaatgtcaatattaaaagaaaaaattttagtatgtgagaaagattacttcaattattatcaatattttatatatttagttctagtttggaataggacttttttttttttgaagttcaagttgaaaccaaagtcataatttttaaaaaataatattgatatcaatataaaagttttggtaaataggaaaagattttttgtgagtcaaaataaggtttttacatgaaacaatattttcctttattgacttctcttttacgctttgttttaagtgataagttctatgaataaaaatagccaatatgagagcttttattgagtttgaaaaagagttttggcttcttaaaagtagaatcaaataaggtcgtattcactttctataataaaatgatttatcttttcctatataatatcttagcccctttcatcgctactctcattatcgttttcacctcttattatactctattctattaatgaacccgctaactttcctctatttatatctcttttctattattacaaactttgcacatccctttaaccattttcgtctctcattatcgtttgcatcttttgcctcttgttagtgttgcttgttactgcaaactttcttctatctagatctccttcctatcgttacaaactctcgcatccctttaactatctttgtctccttactatttgcatccctctaactatcttcatctctctctaactatcttcgttttcttactatcgttacaaattttactcatcttgatcaacttaaccttttttttttcattttaagtgtcaaaattggttatatcatcacctaacttctgttcctcttcatcttctgtttccaatattactctccttccttgtcacaactttcctctaatctttattcatctatttaattgattttatccttatttactattagaagtttagttatctagtttgacattcataaaatgattttgaagtttagttatctagtttgaccttcataaaatgatttcctttcaaaacgaaactatactcatccaaagttagattttgctttttcaacaatttaaccaatttgacttttcatcggacctcacacatataatagtttagatttacccatttttttctcatcatttgttaattcatacaaagctcacaaacttttaattctctcattttcatttgacttgatctcatcctttcaacaattctaatttgaggaaggcttcttacaaacttcaatcaaccgacctttcatgatatggtggataacaaaggtacttttctctttcttacactatttagcataattctataaataaataaaaaagttactatttcaaattttagttattactagtgtttttttaaaggatatccgcatcaccattcaatttattattttataaatataataataaaattgatatgtcaaaatttggtcattatcttctaataaagagatacacatctccatttatttaattcattaaaatatttattttattttcatattatggcccaaaaataaaattatttcacatcttttttccttcatattctctacccccaatttttacatatgtaaggtttaatgcatacaatatttctaactaatttcgtagaatagtactagaataattgataagtaattagagagaagtgtgataaggcatcattgactgattccataaattcatttggacatcaacatgctctctaatgaagaattaccacaacattgttatacacaaccccatctagggcattcaatttacataaatctataatcaatgttacaactcatatatgaagctttgttttaatcgattttggcaggacccacaaatcaatcggtcaggaccgaggaggaacatctacaaacgagtcgatccaacattttctccaccccaagaaataaagcaatatttgtgaaacaatctgaaggtgatgtgaacaagaacgcatctcccatagcggtctccgtcttctatcagaatcaacacccagcacaatcatgtgaaggtgatatgattatctccattctcaggtacccgattagaggttgcagtcattctcctcatgactctcgtatgacttcttcagataatattatcggtcaggaaaagcaacaaaaagatacaaagcaacatacaacgattgcaatactcataatatgggaagtaggcttaggaaatagaattctaacagtgtgcgcatgatgtaatatcttttaatctctgttttcaagatgtctaactatggtaaaatcttgagatggaggtggcagctctcatcactgatgtgggctgtgggctctccatttatccagaaatatacctagttagcgtgggctttcaacgtctagctcaaaggtggcaacttctaacctataatcgagattaaaatgggacaaattctcaatactagatgcaatgaaaaacatgagaatataccttccagttattataaacatagattagtggaaccgtgtaggtgcatgttgtaaattttttatgatttttgttaatattagaagttgaacagttgaggaggtgtaatgagaaacaatgtatattttatatgattttcgtttgtattagaagttgaacatgctataatgagaaacaagttacaatttttatgattttccggtacatatcacagacatttgcagaatttgctgatgggacttatgacctatttggttgttgttttcaagaattgttttggatctattcttgaaaataaaaaacactaaaaaggaatttgggaaagagggtgtgttattgttttttgtgtttcttgtattttcaaaaatcatttttttataataataaaatgatgtttttattgttttctcattgttcaaaaaacacattattctccgtgtttctccgtgttttatcactgttcaaaaagttttttatttaagaaaattataagtagtataaaaaattcaaaatggcaagttaattaaagaaaatactttattaattaaaacaaaaacaaaaacatgtttttctattttagttattctaacaaaactttttattaattcagactttttctttttgtttttttagaataaaaacagtttttcagtttccaaatacaatttttttttaagcataaaaaatcattttaaaaaacaattttccaaaacagttttcaaaaacaacaacgatggttaatatgtcacatacccaatttttaaaacttatgattatcatttaaatttaatccaaagagaaaaataaattatgacattcaactttttaataacataaataaatgagtattcatgttgaattcaaattgtgtatgtaaaactctttatatacatttttttttaaatgatttaaaacatggtaacttatgtttagttgatcaatcttaggacatgtttagctttttaaaaaaaatatttaagaataaataaattatatgttgatataaatggatgaagaattttacaaaattcaaaatcaccaaatttgttcaattcaataaataaaaaatcattttaaaaataataaaaatataaaataaaaaaaattgaaaagacaagcactacaactagctccggccaagcaataaaatttttttaagggaaaacttttgctttcactttgtattttggcttcgattaattattatatgttctataagtattttcgaaaatatttctaaaaactagtttgtaataataatttttaaaaaattgttgtataatattttataaaataaattctttttgagaatttgaatttttttaatctattttttatgtttttaaatatattttaaaaatcattttaatttatagtgttttatttttaatatattttagcttaaaaatttgtatattaaattattcttttaaaaagaattcaatgtatattctctaattcaataatgtttaatttaatgaactcttcctataaccttaaaattttgccattcaaagactttgatttgacccaacctcgtcattcccattggtccaatttgagggggagttcctatacaaacttcgatgacacattctttcgtgtcaagcatgatattataacggccatgttgggtttcataaaatagcaaaaaaagaaaaaaaaatattaaaaaaataatattcgtatgcttaattgtattgagaaaatataaaagataaaaatatataaaataattcataaaaataatttaatgatgttgaatcaatttttttcttcgttttttctttaatttattcaacttttcttctttatttttttttaatgatatgtcacaaatcacaatatgataattatcatttaatagagagaaacataagatttatctttatctcttatttgattatgattatctaatatcttattaacatttagatttcatttgtgatacttcttaattttgttttagtagaaatcttatgttaaaactaaagtcatgaggtaatattgatattataaaagttttagtatataagaaagattactttttattatcaatattttaaatatttaagtctaatttgaaatagtttttttctttttttggtttggaagacaaagtcataatttaaaaatatatatattaatattataaaagttttactaaatatgaaaggttttttataagttaaaataaagtttttgtacaaaaatttcctttcttgacttctcttttaagcttggtttcaagtgattaattttatgaataaaaatagccaacaagtatagaagctcttattgagttttaaaaaaagttttgacatcttagaagcataatcaaacaaggtcttattcactttcaattataaaatgatcatattttcctatataacaacttagtcccttccatcgttactctcattatcaattgcatcttcacctcttgttatactttatccaattagtgtaacttgttactacaaattttcctctatctatatctcatttctatcactacaaactctatgcatccctccaattatcttcgtctccttactccttgctattgttataaactttactcatcttgatcaactcaacattttttcattttaagtttcaaaaatcagttatatcatcacctaacttttgttcttcctcattatctatttcttgtatcactctccttcctcgtcacaaattttctctaatctttatccatttattcaattgattttatccttctccattgttggaagtttagttatcttaatcttcataaagtgatttttttttttttttttcaaaacgaagttatactcactcaaacttccaatttgactttccacttgacctcacatatctaatggtttagatttgaccaccttctatttctttctcattattcgctaattcatacgaatagattgagtaggttcaaacaaactttaaactctctcatttccattttatttgatctcatcctttcaaccaatttaattggaggaaggcttcttataaacttcaatcacccatccttttatgataccgtagataacaagttcattttctctttcttacataatttagcataattctacaaataatagaaaagttactatttcaaatttagttattactgttgttttttaaggatatctgtatcaccattcaatttacaattttataaatataataataaaatagatacatcaaaatttggttataaccttctagtaaagatatacacatctctatttatttattcattaaaatatttattttatgctcatgtgaaggctcattgacatttacctctgatcatactaaacttcatttgaatgtcgcaacatgacttgaaaataaaattatttgacatatccgcaaaatatagatgaaaaataataattttttcatatttctcgccactaatttttacttatgtaaggttgaatgcataccatagctgactagtttcgtggaatactagtagaataattgataagtaattagagagcagtgtgacaaggcaccattgactgattctataaattcatttatatgagttgtaatattaattataaattaatgtaaattaaagaccatagatggggctatatataaaaatgttgtggtaattcttcattagagagcatgttgatgtctaaatgaatttatagaatcagtcaatggtgccttgtcacactgctctctaattacttatcaattattctactagtattccacgaaactagtcagctatggtatgcattcaaccatacataagtaaaaattaagattcttgagaataggccctttcagttattataaattatatatagctagtgaaaatgtggaggtacatgttgtacagtttttatgatcatttttgtttgtattagaagttgagcagctgaggtgctacaaatatatatatggtagataaataattataacaaatgaaaggaaaataaattatgaaattcgacttttttataacataaatattaaatgagtattcatgttgcatttaacttaagtgtgtaaaactttgcatatgtatttttataaaaaaaaaaaaattgattaaaaacaacataattttgattggtgactcatgtaattgttaacacaaatcacacacaagtagaaataagaaaaataataaataaaggattctaacgtggtttaatgattaatgtgatttctacctctatgaagtaaaataatattaaatccactaattaaaccaaaataaaaatatatataatagtaaaaattttaattttcccaatcacaacaacacatttgttttgttgaaagagagtgtgaattgtatttgagtgaaaatgaaaagaggtgctaatcccatattgaaaaagggttaagacaccttttataggattatatcatttcttcttttgcctcatcgtttgtgggtaaaagtgtgcaagtgggagccttgtgcacaaggggcttggattttagacttctattctatcagcttgtgtaaaatggatgaagggagttttgaacttgactaacggacaaccattttataaaggtgagatacaatgctttgtattttagatgtcgattctcttttgtactaaagttcatctttgaggagagcggatttactttaatgatagtgtactttgttcactttaattcgataaatatcatattctaattttgtttgtttcttgtttaattggttttgaacttaattaagatggttaagattaatattttagacgttcattttttattgaggttcatctttgaggagggcattgaaggataatattttattgtctcggtcactttaatttaaatatattgttctaattttgtttgtttcttgtttggttggtttcaaacgtggttaaatcctttaagattaatttcttaagcctctcaaaatcaacatatttttctttggttaaaccttgaatcattaagaatgttaaagataaaaactataggggcaaaatcattatcaaacaaatgaaaaaaaaaaaagtctacgtattgtaacaagtttaagaccagcggacgtttctctcaccaatcctagaactaatttataaccttcattttaatcggtttatggcatcctcactctccatcgaaaccaacgcagtatggagaagtgtcgcatgagtagatccggcctttgcaactcatttacccgatggcttgctcatggcctcctggttgagttgagagacgaacactaccactcagactagggaacaaaaaattcaaaacaacctgcaacagtgcaatacttgcaaaacgtgtagagtgagaagtgcttttggcaaagtatgagtgccctgcatggccatggcctcttctatctgcttttgagatgccttgatatgggtggtgactttgggcaggtttttgagactctgactactgatggcgggctctccattaatggggaatataagtaggattaaagcaaaacacaatgagattaatgtacaaaaccatcgaaccacagctccggtataaaacaatgaaattcggatagaaagtattgagaccaatttgtacatatggcatcattcaattagtggtactttatcggtttatattaaacaaatacatttcattaatgtaattgaaccttgatagtgtgcttttgagagtgattttagaaaatgtttttaacatttttaatacttgaataataaaaaatttcaaccaatttgtacatatggcatcattcaattagtggtactttatcggtttatattaaacaaatacatttcattattgtaattgaaccttaatagttagagtccttttgagagtgattttagaaaatgtttttaacatttttaatatttgaataataaaaaatttcaagtgttaaaaagattaaaagtgttttctataattactatcaaatagatttttaattaatttatttactaatatgatttatataatttgacaaaaaaactttaagcacacttaaaatcgactaatgtgatattgttttaagtaaaacatttctttttcccataccttatttaatattcacattattactattattattattagacaacttgaaatgttttcaacttattttctatattttcaaatattttttaaaaataaatttatatgtaacactttattttcaattattttttatttttttctaatattttttaaaacaatcttcataaaacaagttttttttcatagaaaatatcctctctttttttgtttttaagaataaagtatttttttatgattacaaaatatgttttgcagtttttattaaaataagtatactcaattcttgaataaaaaatgtctatttggatataaatgatagttatttttgcataagaaataagtaatgattttaaaaactatttaaaaaatccatatctcaaaatttaaaatttctaaaaatgaattttaaatatataaagtaaatttatgttttttgtataagatattctacttttatataaaaaattctaattgaaatttttaaaaatgaaaaattttatttttaataaatcattttaaaatctaaatcatcatttttatatattataattccacaccattacaattgcctggtctggtcagcaaaggatcttgccttctctgggccgagacatgggcctcagtttgatccggaccagcacatagatggaatagcccacaacgataggcccagagtaggaacggttgatttgcaagctttatgaatatggactttgtctaggcctgtggacccgtagaattcatttaacatattttaactcttggatataaaaattaaataatttaaaaatacataattttctaattaattttaattatattttattttattttatttattttacattttcttaagtataatcaaacagaggaaaattattttctttaattttttttctttctttcttaatactttttgagaataaaacatttacaatttaaatgatttttagttcttttatacaattaattaaaattttgtctcgcaattccaatatattgttttcaattccttttttttttgtgtgaataatattttgagtacctattttaggtttacaatttaaattttattcatttatgacatgcaatttttatatttatttaatataataaaaaataattataaattatttattcactttctattacaaaaagatttatcttttcccatatatataaatatatatggataatatttatactattcaattccaaactttacttattcaattagtctcttccttcaatacaaaagtctctctagtctcaatcaatctattcaatcttattttgcctcctcagtgtcacatgatgcacaaataaccctccccatgggcttatatagaaggtgggaagcttttgaagactcctagagccatctataataagccattggtggaaagagtgtggaagcttttaaagatggcaagagatgttcacacatctctacactatggtggaaggcatgagaagagtctaaggctttttagaaaattctagaagtctcttgtatatttttgtacatagacttgtacatagaattgtgtagaatgttctagaatattcatgagttgtaaggaatcatccaaggttccataaagttccattggtgcctataaataagtaaggacgtcatttggcctaaacaccaagtgagttccaaagcacttgtaaagtttcctttgaacaataaaagtttccattcttcaagagttgtctactacgccttctaaaactttcaagtcgtaagcatcttagtctaacaaactaagcattgggagagtaagaccgacttagcaagtcaagtgtcttgacttgtctaagtgtcgcaggagcttaggaaaatactaagtccgtgacaattgatatcagagcacgtttacgaatggggcatagtgaaggaagcatgttgagctccaatgtggatgaggctagtgagcaaacctgtgggagggagaccgagtctattgcatgaggcaatagtagaaggataagtctcgtgatgccttagccaaggctatccaaaatggagctagccatggcggacactcgagaaggcgtggacttgatcgagcaaggcatggaaaagggcttagaggatctaagtgagcatatctaagaccttcgtgatggtgtgcttgtctcacaagtttagccaatgtcacacaaggagtttatgtctttccaaaacaaagtcatgagaatgttgattagcatggagtcaagggtagaggccttggttgcacgcatgaaagccctagactaggaggttcgacaagagttggtcatctataagaccgtagtgtcagtacaggtcatggccactcatgagacaccaagagtggaggtgcccaagccacacatgttcaatggcaagagggatgctaaggagctggataacttcttgtgacataaggagatgtactttgaggctatcacactaacggatgaagccactaaggtacacactacaactatctacctcactaataatgctactatatggtggcatcgaagtttttgcgatatagaaaaagggacgtgcaccatagacacatgggatgtctttaagcaagagattaaaaaacaattctaacctaaggatgtggtttacctgacaaggaaaaatatgaaacgtctaaagcacacaggttcgatccatgagtacatcaaggaattctctacattaatgcttgagattcctaacatgtttgaggagaaactattattcaatttcatagacaatctacaaagttaggccaagcaaaagttgaagacacatggtgtctaagacctaaccacagacatggcggtagtagagtccttggtggaatacaaaataagagactcttccaagcctaagccacagtacaagggtaatcatggtaaaggtgggggagacaaggggtcaaggggttatactcttaaagaaggataagtaaggcccctggtggcaaggatgacaagggcaaggataaacaaaaggagttcacgcctaggaccaattatttcctagctccctacggcgcatcgatcttatttcaaaggaaacatgatggttccctaaagatgggcattaaccatcgggcactcaacaaggtgacaataaagaacaagtcccctattctgctcatcgttgacttatttgatcaacttggtagggcaagatacttcacgaagctagacttgagatcgggctactactaagtaaagattacgaaggaggacgagccaaagactacatgtgtgacccgatacgactcatatgagttcttagtgatgcccttcaatctcaccaatgcactagcaatgttctgcacactcatgaataagatcttcaatccatatctagacaagtttgtggtggtatacttggatgacataaccatctacaatagcaccttgaagaaacacataaggcacctaaggaaggtcttcaagatcctaaagcagaacaagttatatgtaaagaaagagaaatgttcatttgctaaggaatggatgagcttcttagggcatcacatcaaggatggcaagctgatgatagatgacaacaaggtgaagaccacccaagaagatccatctactaaagtacctcaactaaggtttttccttagcttggttaactactaccagcgattcatcaagggttactctacaaaggtagctccactcaccggtattctcaagaagtaaaaggcatgggaatgagatgaaaggtgtcggcaagactttgaggatctaaagaagaatgtgattaaggagccagtgttggcactacccgagcattctaagttatttaaggtacacacggatgcttcagacttcgctattagggcaattctaatgcaaaataggcatctgatagcctttgaaagtcgcaaacccaacgacacagagaggcgctacacgatacaagaaaagaaaatcactgtcattatccattgcttgcacacctgaagacattatcttctaaggtctcacttcatagtgaaaaccgacaatgttgtcactagctactttcaaacataaaagaatctaagccctaagcaagctaggtgataagacttcttggccgagttcgaataaacattggagtataaattaggaaacgttaatcatgtgatcgatgccctaagtcgtaaggtaaagctagcttccatgattagccagccccaagaagatatggtggatcttataagggaagggttgcagcacgatccaatggttaaaaacctcattgtcttagctcatgaagtaaagactaagcggttttgggtgaaggacgacctactatacaccaagggtaaatggctctacgtgcctaagtgggggaatataaggaaaaatcttatcaaggaatgccataacaccaagtgcgcttagaactacttaagtcggcttactattgacctcagatgggggataaagttgaggcttatgtgaggacttgtcttgtgtgccaccaagacaaagtaaagcaacgatagcttagaggcctgttggagccactacccatggcaaagcatctatgggagagcatcactatggactttatcattgggctacctaatttggagggttatggctcaatcatagtggtagtggacatgttctctaagtacgctaccttcatagcagtccctacaaacttcaccacagaagaaatgacaaggctattcttgaaacacgtggtcaagtattgggagttatctaagtatatcattagtgatcgtgacccacagttcacaagaaaattttaaatgaagctcttcaagcttattagatcgaagcttcactttctctataagctttcacccacaaacagatggacgaaccaaaagaatgaacgtcttactagagttatacttaaggtactttgcgagtaccaaccagaaggattgggctaagttgctagatgtggtccagttctcatacgacttgcaaatgagtgagacaaccaataaaagcctatttgagctagccatggggtagcaaccattgagtcctcacacattagtgatagggtatacaaggagaagtccaacggctttcaagttagctgaagaatggcatgagcaagctgatatagcacgctcatacttggataaggccgctaagaagatgaagaagtgggctgacatgaagcgatgccacacgaaatacaaggttagagacacaatgtttgtcaagctctttccttaacaattcaagttgctaaggcaagtgcataagggccttgtgaggaggtatgaaggaccatttcccatacttggggaagtcgacaaagtgtcctacaaagttgagttgccaccaaggttaaagattcatcatgtcttccatgtgagttacttgaaactatatcacgaaaacaaagataatccaagccgaggaatgtttaagagggcacctacaatggttgtgaccttctatgataaggagatagagtacaccatagtagactgagtcaaaaggagacaaggcatgtctccggctatggagtacttggtgaaatagtagggaatactagagagcaaggctagctaggagccaaattgagtgattttgggcggaaggcgcgatgaggatatctatagcttaggtgggggtaagtgtcacatgatgcacaaataaccctccccatgggcttatgtaggaggtgggaagcttttggagactctttgagccatctacactaagtcattggtagaaagagtataaaaacttctagagatgcctagagatgtccacatatccttacactatgatggaaggcatgagaggagtccaagcaagtgagttccgaagcacttgtaaagcttcctttgaacaataaaagctttcattcttcaagagttgcctactacaccttttaaagcttccaaatcgtaagcatcttaacctagcaagctaagcatcaagagaataaagctaacttagcaagatcaagcatcttgacttgtctaagtgttacacaagcttagaaaaagactaagtctgtgatattagtttgtccttgttgtaaccttcatcatcaatttaaccttctttttcttgtaaactttaactagatttaaccttttattttttgtgaacttttgagattaaaacatttaagtactagccacatcatcacttatttcccttgccattctcattctttggctttaaaataaaaaatgggtgactattttcaagtacccgtccaaggatgacaatgaaataagttttttcgattgctcctaatagaatgttgaatgcttaaacaagttaaaattggatttaagaaattttcttttgaaacttgagtgggggtgaaccaatttgctattgccttatactcttattattatataattaaataaaaaataatttaatttttttcatttctcatttttttaatgtatataaaataaaaaatttagttctcatcaaaataaattatataatttatattattcattttattcataatttaaatttatttttaatataattattttaaaaaaaattaaaacttgtaaaagttaaacttgacaacacacgtttagcatagaaaatttccctacttgtctcccctctctttagtttcttttaaatggggataagaactgatttaaacaatttaggtgtgagttgtcttgaacttggcctattatcatctctactcaacatcacaccctaagtagtctgtagccatctttattcaacatcatggttacttttatcacgtttctccatttttgttcaacatcatgatttctttcatcactgttcttcgttgtcacaaaattcttctcatctttgtcaatcaattcaatcttaccactttttgttattgtgaattcctttacttaccccctaatcatggagaatcaaatatcccattttacccttatcaatcctaatcgattcacatttctcttattatagactccccattaacttaatctattatttgattgcactccaatccatcatggagagcccatacatcaaatattacctttatacaactcaaaacttgacctttatgcaccaaaattcaaccaaaaagcttttgttttaatttttattcttctagtaacttgaacatttcgtttaaaaatttaaagaattaagcctaaggttttaaagtgaaacatatattcattcatttttagaaacttaagatcacttttaaactaacataggtatgaatgaaagacatttgaaaatgtacaaaaaaagttttatcctcgatgcactcatgaaattcatcttacatttgtttctaaacatattgagtcttcaaagatacattttttcttgttatcatcaaaacattaaatggaggaatcattgggctaataatattacttgttgaatatatatttataatttaccatatatttaaatgataaattaataataggaaatttttacatttaatatatggtaataactttttttttttaacattcggtaaagcaaatggtaaaataatgcagtaaattaaagggaaggaaaaatagtattatttaatttagattggattagatgtcacacttcccaagtgtgggactagaattagagtcatgttcctatgattgatgcattgaatttatttaagggtaaaataaatattttgatgcaaatggaaggagaaaagaggtttttcagagaaaaataaaacaaaatgggaaatacgtgtggacaaggaaggaggggtatgaatgcatgatactcgataatgacaaaaaatatgcagcaaaaaaggtggttgtggtgtggtgtggtgaatatcgtgtttcacatgccgataatttaatgccaataccttttgtctttaggtttcttgtgtggatttcgcgttcaactcattaaaaacggtaccactggtgtggtgtggtgcggtgcggtgtggctcttcctaccatatgatatttgatatttcattcacatgtggcatatatatagaagcatcccgtctttacccttccttcatccccattcatttctcttcctgcactccaaatattcaagcaattaacacaaggtttcagcccttcaaggatcaaag

SEQ ID NO: 12192 - DNA, 4138 bp, Vitis vinifera
  Intron number 20 from transcript GSVIVT01022846001 (locus GSVIVG01022846001) derived from phytozome v7.0 (chr-ID chr 12; pos 18824603 to 18828740)
tgaagatgtaagttctctctcagatctggataactctattctttagctttaacctatgttacataaactaaagcatgattttttggtatggggatctgtcattaagtccccgacaaggctacataatctaagagttggcttttattatttaaaataaattatatattgcagttctaatacaggtaattacacgaaggtataggataagtgaaacaaaaatgtaattatcaaagtgtctgaaggaacccattatgctacggattaggttctcatccttgttgaacaggcctgctcactcgtcaggtgctttagatagattttagtatccatgtaatgtaggttttagcttagcatgttctgccatgctttcatcccattttttggacaagtcaaaatgaaaaatagactaatatattttttttttgataagtaaaccaaagtatattaaaaaagaggccaatagccacacagtatacaggaaatatacaaggcaactatagccacacaaccaaaaaacaaaagagaccaaggggacctcacctcccctaagtggaagctagccactctagaaagcctagaagggagagagagttatctccaatatccaatctagcccagccccacaaattacaaacaaaaaaattctttagcttctgtatatgtatcacaccccctttaaaggctaatctattcctctctttccaaacagtccaaaatatacataacgggaaaaatagactaatatattgtcagtattatctttaatagttatgaaaatgaagttttttgattaattatgtggaagttatggagcacaaaggggtaagtcttgagcattataatgtctatccttattaagctgtgaacacaacaggatagcattgcacttgcatgatatggttactagattgcaataaaaatgataactttttagcaacatggtgagaaaaatattgagctagctgggccacaatatttgatggttgcatgattgaggctgtaaaatttacctaattatatcttctagctgtttgtccatacttcatttttccagccaaaagagagaaatgtagaagtggaaacctatttctggtggtaaataacaaaatgaactatgtatgttagaggggaaaaaattaggatattatgggattggtcaggggagggggtcattggaatctctgtttttctagaaatcttaatgattgggagcttaataatattgaacaattttttgctagatagttaacagagaggaggatagggcaatgtggatggatttgaggaatgaaaccttctcagtgaagtctctttatgctaccctagagttggggagttcaacttcttttccagcaggagtcgtttggaatccataaatttcatctaaagcaattctttgtgtgggaagcttgttaggaaaaggttaatagatgcttcaagaaagagggtgaatgctggactcaattgattaccttatccttcattgtccaaggcaagggttctttggcaattgttttctttgtttggtgttccttaggttctatcagccatagtgagagagactctgttaaggtgacatggatcctttgtttgggaaaagtacaagaagatttgaagagttactcctttatgcatcttttagattatttggaaagagagaaatcaaaagtcatatgagagtgaggagcagtctatcgagattatgaagagcattttcctcagtaatctttcttctgtgggtaaagttgtacatgggtgatgaatgtctctaattgaatttgttgattagttagttcagtgttgtcaaaggtaaaagatgttgtcaaggctataaaatttgttttagcctaaggccgaaggcaaaaaaacaaggcaatagcctgactatggtaagactataaaaaatatacatatatttacatattcaatgtttatccaatataagtgttgtcttcaccaatcaacattattaatttttcatccctcatcgtgccttataaaattaaaaaaatagtaataattattcaaagtgttaaatattatactctacttcataaaaaacatcatgtcatgtagtgaaatctatcctatccaaatgcatattttaattttctagacatctaaaagtcaaagtaaaaaacaaaataagaaaatgaacatcttagagaagctttgggcgtcatcactaaaattaaaattgtcatcacttccatcgagactaggttgatagccctccatctcattatcattatgatcgataatataatatttcatcttatactttgtttaatctaatattagattgaattaaatttacaatccaaatgtctaatcttaacccatttatgccttacatcttatcccaagacaagcgcctaggcatcggctctttgaagccaccttgcttgagtcttcaagaggcaacttttatctgcccttggcctagtggcctaggcaacccaggcgaatcacctttgataacattgagttgggtttttggtaagggagagacttcttttttataatcccaccttggttgttcctcaactcttttgtgttgttctctttggcaccctttgtatattttctatgtaccttaatgcactatttatttggcatttgtttataatattacatcattatctatcaagaaaaaaaaattatattagaaaaagtgtacacattaggttattgtgtacatcgggtgcaataacaccccccaccaaccccaccaccctcaccaaactccctctttttttttctttttgattggatctttttaacatatctttttgtttgcctataaaataataagtttattaggttaataaccgaatgatggttaagttttagattgtttaggagatgcaaaatctccttgacataagttatccccttttgaagtgttcttgacacccaaacgaatcaagctagtggagagaaggtttgtatggtgcaaaggaagatgttcaattcgcaaaaggatggccaaggagaaattaggttttccattattagagagaagtttatggtttgagtaagacaaagtcagtgaaatcatcagccaactgaatctgatttctgcactggacaaagatatggattttgaaaaaatcaatcagggatgattccacaactcaattgattgagataaatggaaatcagaatggagattgattaggatcatagaatttatggggagtagagagacaattcacctgcgaatttggaagctgaggaattgcagcagatggttgatgtttgtttcttgattacattgacctctcctctcaaggaattgtgaagaattttgtgatgggtgtgagcgctgtcactgaaagtgctcctagaagcagctagggcaggtgggacacctgacacttgacaggatgccgcaactttcaccaggcaacaggcatgcctctcaggcacatgaaaggacacctgaatttttgtgcagcttttttattggacatgttatttgtataggttgttctgcagaagaccttagttatttttctaatgaaaaacaaatgccagctattgcactggcgcactccagagtaatttctcaaataaaggacctaaacccaggcatctcatccctttcttctctcttccctttctttcaataaatgctaacctcctcttgatctcctgctccccttacctcccagctcacactctcatggaaaagaggatgcatgttgctatgtaaagatgtctgatatcttcttcaagggaatgtggtattttcatttgtagatagataggtatatacatagagagagagagagagagagagagagagagagagagagagagaataaccatgatgcctgatctatttaaataattttttaacaatttttttaaggtgggaaggtggtgttagatgcagatttataagggtgagcaggatgttatacaaatacattgtagggagcaccatcactttctagaagcataattacaagtttacgagaagttcatgctccataataagtttgctgaatccagcctgttgatctacttttctgtgtctcatttccatatttaagtttaaaacatctcttatttgctctaaatcttttgtgactaaggtacattgaagaaagatcatttaggagatttgttg

SEQ ID NO: 12193 - DNA, 20620 bp, Vitis vinifera
  Intron number 7 from transcript GSVIVT01032285001 (locus G SVIVG01032285001) derived from phytozome v7.0 (chr-ID chr1 1; pos 14552798 to 14573417 reverse strand)
tgccaaggttgaacttatatttttgttgctatcaaaagttaggcttttaagcttttaaatatatatgttttccttttacatcctttatatcaccttgtgcttgggctttcagcattttttagaaatatggaagaaaccctagagaggttttagatgttaaacgttgtgtactaaaaaatttacacataatttcatactctctgctgaaatacgtgaaccgaatgtttggaatcacgagccactggctatatagagagtcagtgtaacaacaatggaagtatgaaatagatagcaaattcaacagataggtttaaaagagtaggatgttaataaagttattgaaaaggctaggaaggatgaaagtggatgatgcaagcaagaaaccttagagggtaccctatatgttgccctacttgtttataggtagatttccttgctatattgttgttagtatttgctaccatctttttagattgaaattgataacatgataatgttttacaactggtatttagttcatatgaaattgatgtaggacaatcctgaggtagttgcctacaatcaaattaggtgggagagattttcacccttttaggattaaggaggggaacaaggagtcaagttatggcaacagggagaaaaaagtgagaaagaaaaaaaaaagatacgataactttagagccttggtaaggcctttttggagtctcatttggaagagaaacaatggagtttcacaattgaaagttgcaaagtttgtaaaatgtgtgttaaatcattctatttatacattccttacttgagtagacctccgaggcctcatccctattagaaacactttacagatctttttaatactatattatttggttttgatttttgatttttattttttggctataactttttaaataagcaaccacaagaaataggtatttattgaacaataaaaatagtacaacaaggaagaatgagaagcccttcaagaaagaaatggtggtaagccacacctaagcagctttccacccaaaatgaaattaaatcaaggagggtaattgttttccccttgctttaatgttgaagcatctttgccaggaaatctgcttattattcttatttaggtctgtcatcctagctcataactcctccaagcaatgtcttaacatcatagagtttttcttgttgcatggaatattcttttgattcaaaaccatacaatgtaaaattctaaatgatttcctttgtacatggtaagagttcattttttttttcttcattctgtatccatgtaaaaattgtcttctggtttgttggtaactaattctattgattgaggacaacatccccatcatctatagacatctagatgttatcatttagcttcattgtgaacaaatctaagacttttcaaatcaaagttctatgcctgatacaaggtttttttttttttttttgatagataaaaccgctttcattaaaaaatgaaaagcgccactaagacacaccaaagtgcatgggatgtatacaaaagacaagaaagagccctagcaacaacaccctcagttaacaagaacccaaccactcaacaaaatctaataaagacagatctattcctatgtacttctatacccaagtaaacaaatttctaagaaagaacatcttcaaaaaatgagttgaatgctccttattatcaaatgactgaagattcctttctttccaaatcgtccaaaagatatatataaaggagctactcttcatacctttttaccttttttcccacaaactaaccgtgccaccttaaaagagcctccttagccatagcaacttgcacttaatggatacctatagatcagaccgcaactgccaaaggctcctcaccagtaaacaatggaggaggatgtgatctatgaattctcccccttctttgcaaagaaaacatctattgaccagagaccactctctttcttaaagttgatctaaagtcaaaactttaccccaagaagcttcccatgcaaaatagttaattttggaagggacccacgaattccaaactacttgctttgaaaatgcaaccacaccccttagttcaaaaatgacatttattattgtacaagttcatccacaccatcttgtaatcaactgcctttcctcgcaaccttacaaataaatccttgactttgtccacttcccaatgattcaaaggttagaaacaagggttccaatggcctctctcccctatctaaacccaaagatttgccacccatgcctcttttagaacaactatagcatataaagaacagaaggaaacatacaatggttcatccccacaccatatgttcatccaaaacttcaccctcctcccattgcccaccacaaaagaaaaactatccaggaaagtattccgttccttcctaatggattccaaagcccgactccatatccatctctaacttcatgggaccaccacccacccttttcctccccatatttgccactaattacttgtgtccaaaaggtccctctttcagttgcatacctccaattccatttgcacaaaagcgccttgtttaacaaaaaaagatgcacactgtggaccacttcacatgatgtaactttttctccacccctccacctccccataggaacttcttctgaattttctccattctcaatctgattgtcctcaaaatatggaataaagacaaaaaaagtctagataaagtgctcttgattagagtcagtctccctttttagagatgaattgcctttccacaaaaagagtcttttatgaaacctctcttccaccctatcccaaattgccattgatttaaacggagcacctaaaggcaaccctagataggtagaaggaagactaccttctttgcaccataaatctgaaaccaacttgttaacttgttccacactaccaatgggaatctacttgtttttctccaagttcactttcagcctaacaagcttcaaaccatgtgcaatgcaaccaacataaatgaaccatttgatcttgggaagcctcacaaaaaacatgagtatcatttgcaaacaacaaatgagacaccttcaccccttcatcgcctctccttttcacctttacccttgaaatatacccaccctccatagcccttttgagaagacaatttagagtctccatatccacaacaaataaatacaaagacaaagggtcccctttctttaaacctttaaagctttggaagaaacctgtagaggaaatgctccatttaatccatcctatccaccttcaaccaaaatttatcttttcaagaactgatataaaaaaattctaattcacatggttgtatgccttttcaatgtctaacttacctagcacgctggaagcattatcctttagcaaagagtccatgacctcatttgctattaacactgtgttaagaatctatttacctttcacaaagcattttgtgattgtgaaatcaccttgcccatcattaacttagtctcgtagctaagacctttgctaggactttatacaatctacctaccaagtttttttttagataagtaaaatgtgtgttgtattaaagaaaaggtatacacgatgtatatatatacaaaaaaccaataggggtgataatacaactgcaccctacggggaacctaaccaatccacaaattctattaaagaagtaatgctatctcctatgtacgctctaacccaatcccaaaataggtacaaaaaataacttttaaaagattgatctaagcattccttgtcctcaaaagctctcctattacattccctccaaatggaccaaaaaatgcaaagaggagcaactttccaagcctttttccttttcttgccaaccggtacaccattccaacttagaagcaccccccctcaccgaagaacgcatcacctactgtatgtgaaaaagagcacaaaccagctgccacaatgtacttgctttcagacaatgcaaaagtaaatgatctcccgtttcctcttcagccttgcacatgtagcacctatttggcatcttccaacccctctgtctaagttgatctcgtatcaaaatcttagctcaagttgcctcccaagcaaaaaagctagctctaacaggggcccaagaattccacactgtgccgtatgagaaaggctccactcttctacttgccaaagaggagtaaaaggactgaactgaaaaatcaccatccttagtctccaaccaaaccatggtatcaaaagtactagaatcgatggagtagctatgcaacctctcgaaaaaggcatcaacctcctctaactcccaatcattgaattgtctaatgaacctcagtccctaactatccccatcccaaacatctatcacccaagcatccttaaaggaagctatagcataaagacctgagaattcatctctcaaagacatccccacaccatctatctttccaagattttacccgatttcctgagccaacctgaaaccttgttttatctttgaaaacctcccaccatttctaattgacttccaaactcctacaccatacctccctctcacctccttagtgcaccactccccctcctgcatcctatacttaccaacaattacccgtttccaaagagggttcctttccttcacaaatctccaagaccatttacctaagagagccttgttgaagagatgaagacttttaaaacccaatcccccattatgcttttccaaacacacaatcgaccaattaaccaaatgaggctttttctccaactcccctcctccccataagaaatctctttgaatcttttccaatctggtcgccactcttttagggataacaaaaaggagcataaagtatatgggcaaactagataaagtgctcttaatcaacatctgtcttccaccttttgacaaatattgtctcttccacaaagcaagccttttttagaaccgttcctccacaccttcccataccttactagacttgtaaggaacaccaaggggaggcttaagtaagtggaaggaagagaacccaccttacaccctaaaaccttagcaagctcctccaaatttggaacctccccaacaggaatcaattcacttttctccaaattaatcttaaaacttgagcatacctcgaaccacataaaaacccaattgaaatactctaagttttccttactttcatcacaaaaaatgagagtatcatttgtaaagaacaaatgagataccatttcccctgcaacattcctccttttaacttagactcaatgaaaccaccatccttagcccttgagatcaaacaggaaagaatctccatcaccaaaataaacaaataaggagacaaaggatctccttgcctcaaccctctagaattgctggagaaaccagaaggagagccgttgaccaaatagagaaatgaaccgtagaaatacaccatctattccaacccaaccacttggagccgaaacccattttatccatcatcgctataacacagttccagttaacatggtcatacgccttttctatatctaacttgcaaagcaagcctctcaagttagctttgagtctagaatctatagcctcattagctatcaaaactacatctaaaatttgtctccccctcacaaaagcatgctgaaaatctgaggccaaagagtccaccacccttttgagtctattaactagaatttttgctaatagcttgtacaatccctcaaccaagctgatagacctaaagtcctttaactcttcagcgcccccccccttccccctttcttaggcaccaaaaccataaaaatagcatttaaacttctctcaaagcaacctgactcacaaaagtcaccaaaaaaacccaagaccttgtcttttacaacatcctagtagtcctaccaaaatgccaaagtaaaaccatccggatccagggctttatctccacacaagctagacaaggcagaaaaaacctccttttcagaaaaatgaacctctaaggctgctgaatctgcaggtgacaaagaattaaacgtcaaccccttcatacgtggcctccactcccttgtctcagaaagcaacaattgaaaagctcttgccactccctctttaatactattctccccctctagacaaacaccatttacccttagcttttccaaaaactcttccttctatgagcgtttgccattttatggaaaaatatagtatttttatccttttcttttagccatatctctcttgatttttgccatcagaaaatctcctccaaatttgcccattttttgaactcatctaccactctccttttctcctcaaactcctccactgtgagggctctatctctttcctttgcatcccactgacctaattgttccaaagcctcacgatttttggtggacacattcccaaaaacctccctgttccacactttgagatcctgcttcagacttttgagcttacctgccaaaatatgactgtgagacccttagacactctatccctcccaccagcaccttatgaggtccttgaacccttcctcctttaaccacatattttcaaatttgaatgaaaattttccatttctaatccttcccccgtccaacaatattggagcatgatcagaggctgggtttggtaggattttctaaaccattccattgaactggtcttcccaatcatcagatactaggaaacgatccaacctacaagctgaactgttgtttaagccaccacaccacgtatactcgcctctagaaagggtaaggtctttaatgcccagctcctctgtaacctctgaaaaacgtctcattgtaactgacattctcgaagaacccctcatttctgttggaaatcttaccacattaaaatctcctcaaatacgctaaggatccctccacagacctctaatagcacccaactcaacccaaaaatctttcctctcattaacgagaataggaccgtaaacacccaaaaacatccacacaaaactgccctcacaatttctaaaacggcacaacattgagaaggcacctacctctatctcaagaagctccaacacccgttcatcccaaaacaccacaataccccctgcttgacctctagtattcactgctccacacctaggctcctcaccattttggctgttatctgtcgaaccttaatttcttgaagacatactagatccgtcgagtacaagcggatcaaagatttaataatgctatgtttattcccctcattaatccctctaacattctacgaaataatttgagcttcattaacttaccctgactaaatccccaaaaattatcctctttcctctctcacacctgtaatcggtcttgtaactaactgagcattccaatttccaaagctccctctccaactttgaactgctcgccttagcctttttggtcacctgccttactgtcttcccattcttatttctaatttttccaagaggcttaaaatttcctcttcataaccatccactggaagccctaaaactttgctaaaagccattaatctgctaaaggcacttccctcccttataaggtaagtctcttcctccttcccaactgatagactcaattccattgctacacaatttgactgaagattcaccctcgacccatctttcaagatcatggaaaggggaccatttctcacatcttctaccatcgacaagtcattgtggacccgcatttcttacgtgtgtccccactcatcggcgagattcgtttttttatggtgaaaaattagtttttgaaaaagtcggagtcgccacttattttgttttattttaaaagggaaaataaaacacgaaagaaaaccctaaagaagtgacttcaaaattttggaaaagcgtgtctttggagaacttgagtttaggtccggggatcaggttacttattgggaaggtacctcaaagaagtagcacccctctaagccctaaagaggtctctactggcctagtggagggaaatgtgacaattaatcaattaattgaaggtacctaggtaagctaaggtgattttgaaacaacatgccaaataagaaatcaaattaataaagaagagttagggtgtgtactcggattgcttcttaagcgttatcacaagacatcaaagttagttcagaaatatgacacacaacatgcatttttatcaaagataatcaaacaatcaaacaaatatcaagacagtcaagtatgacaccaagcaagggcaatgacatgcatatttattagatttttgcaagtggggtggtagagagcgtacctggacggtgagctgagcgctaaaatgggaaacaaggttagttcagtagcaaatgtaaaacaatctcatgtatcacaaagaggaatcacaatcaattaaatatcaaacaaacaatattgaagaaaatatcatggatgtcgggctcccaccaaggccttaattaattttgcatgagttgattctatgagctccattacttggaaccatgaaatttattcatgtctgttgaaaatcgagaaaatcaagaaaatagtgaaaatgcatgcccaaaggaataatggcagcaaaaggttattgaaatctggattttatcacctaaagaaggtccaaaggtgattctctaaaatcagggttatttggatgaaaatgattttgaaaacacaattcaaaacatgtaaaatcacgaggaaaacaataggggtgcaaaaggaagaggttagtgtgcaccagagtggccactttcagagtacagcctggggatgtgactgtgactgcattattggtgatagcaggcgctgctgttattttctccgaatttaccctttctgctctcttgtgtgcattcaagtgctttgcatcactgtgttcccgtgccctatccatttccttgaaacttcctgcgtccagactcatttcctgcaattttggcattaattcctgttgaacaggcataattacagtatagagaaccagaagaacatgtctgtagcatcttgatcacttgatttgcagtgaaaactgtttgtttctcatcttagaggagcttttagtagactagtgaactgtagtgattgatccatgaaaagcagccaacatttcatctctctcagtcggagttgcaattgaattgataatcttattgacgatgacacaagcttaggaattaaactctccaatctttggtgtagggtcacaattactgaagtactctcaaagtctgtagttcccggtttggtgaattcgagctcaacctgcatttctgattgatcagcgacaacaaagcaattggaacctgacttcaccagagaaaacatcattgatctttcggttctaatccgtgtctgactctttgctgccaccttgatttgttgccttgccatttttctggattttctcaaacactagttatatgagttggtgacatagtcgggtgttgagataatgtgggcaccccagacagtgcataggtcatcagagtgtgagatattgttgctgatgctagctagggagatttgaactaatagagcagctgcaattcctgttccgtacatgcctggcattttaaagttattctctagtctgagagtggaggggggcaccaatgagattgctataaaaggaccagtttagtcctctggctgattctgaagctttcagacatcatccctgagtctctgatgtgattagaacaaggaaaatagcatggcagtcgggctctctgtaaaatcagtgtgagcataggagttcgaaattgcacgcttcagcagcctactattgtttctcccaaaaaccaataacagtagcagtgccatgactccaaccattttaagttctattagagaccttattccagaacctgtgactatgctaattaatctcagtttatgtgctgacaattgaacctaggaatacaattttttcctctgcttttcaagattcgctgtgctgaaggaggcccaacagtgagttataatcgtcctctttggcaaaagctctcttaaaagaagtgggaaaaggatccatttccccatcaaaagctctacggatcccataacagtttcagaattttgaagcagttggtctcttggccggacaaaagaacaaaacctgtatatgattgatcacagtgtcaggtgcatcatcctacttgctcaccacctatagcacaattacaaaatctcttctcataaaaggaaccgcaactcttgctatcatctttcttaaaatcaacctgcttgtataactcatcaatgctgcgtcggaacctttcgctgtgtgggaaagataggtaacatgcttaataagattctaggcaatgtagtcttccagtggtgcagcgaatttgatatatttctgtctgatttcaagagcattctgttgttctttgggatctttagtatgacttcgttaattagagtttcttctctgaagctattggaaggccgtgctgtgtagatgcagtcataaaactctcaataatgcatgtaatagcaaacagtataccattaggccccatcattgaatgacttctcggtctgcagtgagtgagtaaaatgggcagtagcttttccgagttggccttttgcttgacataaaagccctctgaatcatgactcttatagagagccaaagccatgtggcgtagaacccttaacatgtctccaaaaattctacccttgatattatggagggtttctactacttatgcccgagacttatcatttgtattcgaatacacaagattcttgagcttgtatctcaagtgacattcttcctcaaatttgtagcttctaaaactgaacctagaacaggacccatgaatttcataatcttcgattcaaactcatacggttttttaaagttcattgaaaatgagggttagcttgcatgctggctatcagtgactttccagaaacggtatgtacaatagggcagaatagggtatgaaccatgttcacaccaggaattgtcgctgctctcttaaaaatcataatccaacagcttgccaaacttggacatcctaaaactcctgaagggtcattggccttgagcattttcactgtcatcaaaggccatccccaccacatattgttcagaagcaaattcatgatcatcaggaccatcaaatggagtcaaggcagttgaaggcagtccacgtgctgctgttccaaatagcagggccctaggagaaccgtagtgctaactccttcatctttctttccttccatgtcatacttggctgtgtcgagaaagaaggttgattgacttgattctgttgatggaagacttctctagattcaatgctttttgatacttccagcacacttaaaggatgacaagatagaaccaactgaagccgttcttccattctcttattcccgtgatactccaatgtcaaactccacaaccatttctgctacccattaatgatcccttgtcatgggtcatgtaaactgatccataagaaacccatgaaaataatagtatgaacataacctagctgcctctcaacatgcttcacatttcccttagttaaaccatgaaccaccttctggtcttcaaaccaaatagtcttctccttgtattcgcatgcgttggtccttaaattaaattctgcacccattaaacacaactcaggaacaagttctgggatccgtaccagttcctttgcagaagagtagtttgaatttgccctcttcactggtgcacaaaattgccattgttgttttatgcatgaagaactgactccaggcctccagccacaacataccgtatcaagggttctttaaaggtggtacgaatgctccaaaacttgccagcattggtgccaatcaaccaggctagtgagttcagcactttgttgggatttggcaaggattttggcctatataagcttttacagtaatgatcacttttaccatcaatcagcttgtcagtagagtttgagtatcagatttttcctccccttcatttcttgctttgccattgtctcaatttcaccttcaatctcagtgcatgacatgagagctgaaacaaaatcaatacaaataaggtctatagcacctgatctgcacaacttgcttattttccgcttcctgcgtaactcttaatggcattgtgtaaactgctctttccttgatactgatcagcacaatttccctatttctcctgaagtttaccaattgtaagcaggaaacaacctgctccgtaaatgctccaagtgttttctggatgttatctgaatcctcccagggttcaagtttgaatgcaatctcatgattttgcaaattgtgcgatattaattatattgcagatagcaactccataaacaattcttggcactgatttcccattactatctactaaagcagcataaccagagagggaaccaccaatacccttcattggatcagaatcagaaaacgttaacctgttaccataagcatctgtaaacccaaagacatcggagcctggaagacgcttcaggacggctctgagggcaatctattgggatctaaaggcagatagcaactgacaactaccttctgttttaactttgttgcatcctgaagtgcaccagtccaaccaccccatttgttccttcccaattgctccattgaacatcaagaaccttctctcatggcccaccaacatttggcatgataccccatacaaactcccatagctgttagataattcatgcataggaacttcatttttaggactagcatattcatctaaatctccacagtttcagtagaatcaacacctgtagccaaaaactgtcagtttcttcatagaccgatcttcagaaactagtttcttggtctgccttatatgtgaatggacaagacttctagtatcctcatagttccagtccacacagtccttcctagatgtgggaaacgtgctcgtgtcaatgaactatccgcctttaaattttagagcaggaaacgaaacgcaacatttttgtttgtggatgcggattagtgggcttgggaattcagacataagagaggttggattgccgatggcaagatgggatgccatctttattcctgatcatgtcaagtgggggtatgtgaacaagtgaggtcgtcccagagggtgtcctgattggttgatggttgttatctgaggagcatattatagagggaaaggaaagtgaagaacttggagggagtatgatgagtttgaagttagaggtagggggtgcaaggagtgattgtggagtatggcgatgggggacagactgatggttccacgtatggtgttagagacgagttgagggtggcggatatggtgttggagataagttgaaggtggtgactatgaaggatagggagttggtgggcttgtcctgaggttttaggcatgaatttgtttagcttgggatttggatttgatggaagagggatttggatggggggactttgcgaaaacttcaggtggccatgcatgcatggatcatatacgtggggaggaccttctctgtgttgttccctatgccccaaaattatgaacatgtaattgatttcatggtcatcatgttcttctcttggtttgataaacctccagctcaccaaatagacaataaacaatgtctcccgaagaccataccctgcattagtccttgtaagtgaatgacagctctctaagtcaaccatcataaccaacttgctcaccatggcagcctttagtttgagctctataatttccggaaaacccggggtggatcagatttccatgctgcactcccaaacgcaccagaactcatgctgatgccttcattggcatcaaaactaatcaacctcactgctggcagaacttctccaaaaattgacaaaactatccatgcttcacctctcctctgctcttccacccctattctacttcccacattctccagtaacagatgcttcgatcggtgccaagcaatctttcctatgaaacggtagttgaatgagaaaccactgagcctactttcttcttccaaatttgggtatcaagttttaacagcattaagaagccattccctagcgtcatcgattagtgacacacacatggctggaaacactcaaaataaccacagaaaactgaggaaaaacagagcacagagaaaataaacaaaaaaggaagaaccaatggaagccacatttcatattttattcaatggactcaagttggtgggaggagtataagcagattcaaatacaaaaagagaaccacaatcctcatatatcgcacagtaaatagaaaaaaacagagccttttaaccccaaaccagaactagagaactccaaagaaagagatcaaccacaacaactatataagcaatctattaccaatgcaaacaaacatatagcctctgtcattctacgcccaagcatccaaacgaaactcaaaatcccagcgaagattaatgtatagcaagaaggtgatgggcatgaaggagtctacaacaaacgtacctggaaacgtccccttctggcgagaagatccccactggtccgtcgcctcatatctcttccctttgcttttcccttggttctccacttttatttttttttctcacagccccataatctacatctctccacctccatccccgtggactatcttttcctttttattttttattttttattttatttttatattatggttgtagagaatattggaagaaataggaaagtaggattaaaatccaagaacgagtatgggaatatggggatgtggttgtgcatggagattctctgtgcatgactcttccttttttcaatagtgtgcctctcatacttgccaaattttggggagtgctattatggtagatcgataacaactctcttttgttaaagatcacagatgctccctcattcaacttaatgccatcggattttcatgcaaaacaccaaaaaggattacatgttggaaaccttaaaatataatagagaaaagaaatcatgcaaacttaagaaagtaaaaagaaaaaaaataaaaacatgcatatataggaaaaactaaaaaaaattaaatctcatgcaattttctaaaaatgaataaataaatgaataaaaaaatataaaaaataactaaataaaataaaataaatagataaataaataaataagaaatcaagcatatacaaactatgcaggccatgcaactatgtgaaccatgcaaaaaatgagtttgaaagtgcctaagtgagctaggatgaactaagtggaatctaacctaaagtgcgtctaagcaaagcctaatctaaactcgaagggcggccaaggtcacaacaaggggctagataaatccttcaaccgaagtctccaagatgactcagaaaaggtaggctacatgagtagtaacgggtcataaaggaattgttgtaaagtatcaaatgaacatctaataagacatgcgctaagaggacaaaatggagggtctacagtcatccctatccatcggctacatatcatccttgcagatcaaccctacctcccgacgagccttccttatagccccatagaaaggagtagaagatagagagtccccctcacttcggaaaagagatagacacctaactaaatccctagacatcatctgtacttttgtttcttgcaagcatatcaagtctgctttttgagattgaattaaggacttaatgattttcctcttatcattgtcattcacccctcaccccccaacattccaagagatacttttaaccttcatttacaaattggtattaagtcccaacctcctttgccagtctccttcccattgcctgatatccccaaataattcattgtgcacttcagctttttaattcttgttcaaaatttgggataccgcttatcccaagtcgccctagggtgcccgaagcacatccattaaagttcaatttaaccactccttcaattggcactagccgtacttctgaattatttttggccaacctccttgacttgcaaaagctactagtctaataatataaggttaggcaaaaacagaggaagaagagtaaaataagtcccaaactgcatccattgtccttctagtataggcaaagatcattgtattcctttccgggcaaattggtcaaatcatactaagccttgcaataccctatggcctttacatgatttccaaagcctttgaaagaaagtagtcatcatctctgtcattgacattctttagccaaatgcaaacaactaaccatactaacaccgagcttaaaaagtaggtaagccttcatttccgacatgctatccatcacttacagtggctttggtttatcgaggagagggatagttttatggcaagcttcgtgcataactttaatttgggttgtgtggtgggagagaaatgcgaggattttttaggataaagcaaggaattcaaagaatatttgggattctatttttttccttacttctctttgggttttttgttccaaggtttttaagggaaccccccttattgtgttacaacttgattggttagcggcgtgtaattctgatgggttggtttagcctagagaagttgttcgttattacagtcaaggattgaaatatcggtttttacggatatatcggtacttcgattttacggatatatcggaaatatcggagaaatatcggtggatattttttcacaaatatcgatagagtgaaaattatttaaaattaataggaatgcttgaaaaaacttcaaaaaatgataaaataagtaaaaatacacattttaaagttatcttataagtgtaattgacatatatataattaagaaaaaaaatatcgtaaacaaagatatattggtagattcgatatctgaattttaaaaataatatatatgaattttgaaagtatatagagttagaattgagttaaaaaatatttgattttattgaataaaaataatttatacataaatataatacatatgatattacaatagtccttatattaaggaaaatatcaatgtgatttcattatattgttagatgaagatgacccaatttgttgaagataatatttatttaaaatatttttcttaaaacatgttttattatattttaaatgaaaattaaattaatttatataaatattttatttgagatttaatttttaaaattttattaaaaatatatagtaacaacttttttttattaatattaatttatttaataatcaaaataaaatttgataatttataattatttatatggatagaggaaaattgttcatgatttggtttttttttttacctctactaaatctaaaaattaaaagggacaccacttttgaagttgccctccagccaagagaattccccttttctcttcccttttctgaagttgccctccagccgagagacttcctaaaaaggacctatcttcctctgccactctcaatcctcgcaggtactaattgatattatttttttttgcaacccccgtttgatttccaagaaaatccatcctccattcgatttccgggaaaattcatcctcgtttgatttccgagaaaatccattaaaaacccccaaagaaaaccaaaaaatttgcttttcttttgctccctgtgatttctggatctgttttaagggtctctttgttgttgtgccattggatttaaatttcacgaaccctaaatccacgatttttgagccagattttgtatcctgtgtgcgggctggattggtaggaaatatcgggaaattttccgaaaaatctgtaaaaataccgaaatatcggcgatattttcggcgattttttttaaattctcctccgattgctccgcgcgtcagtccactcgcgatttttctccgataaatcggtgcttcaccgatatttcgccgatatatagacgattttgtcgattttttgccgatttttccgtcgatcgataatcggtgacgattatcgtttcgatgccgcccgatatccgatatttcttcgaaatatcggcgatattttccgatttttcaatccctgattacagtgtattttcttgttttcggtttcttgtagactagttttctttggtgggaggattcctcatccttctcttgtacttcttttttctattaatatattcctttgtcgtttccgatcaaaaagaaaaaaaagtaggtaagccttttgttttaggtaacttttgtatcaactccttattcagcttacctattgtattggtgattgatggaatttcagcaactccactgctttgacagccgattccatcttctcataaatatcttgctcatctagaactactcctaacttcattattgtcctattacatactatagcatgttcattgtaaggtaatagtgacaacctgttaggtaaatcatgtgatgcaacatctaaaaaatcagacaccaacttggattcttcctaagatacttcttgaagtgataaaagggctgaatctttgttttcttttgcaaagttatgacaaccattactattctccttgttctctttctcaaactccttggtatgaactaacaaaaacttctcttgaattttaacaacattttttggcttctagtttttatgtttcctcatttgttccatactcataggcttcaaaacaatatctcatccttgaatgtgaaagaatatgtattagccttcccatggctacacacatctcgattatagaggcaaggtcgatcaagtaaaaaacatttaatagtcataggaataacatttcaccatatagaatcattataacatgtaggagaaataagaaccaaacattctttgttacctgaataaaagtattaatgatccatgctaccatgcatggttgaggatgtggcttccttgacaacttcaaccttgcaacagttacttcagacactacattcatgctagtgcttgtattgataattagcttacatgctttattcctacaatgttctaaaatttggaatatagaatgatgcctccaatcttcaccaatttgctttggcgcaataagaatatatttaacaactcaaagaaaagatgaatcattggaggagtcaatatcttcattattgtacttctctgtcatctcttgtgttttaggtacacagatttctttttgaacattccaatgccatatgttttctttctccacacttaaaaacaatactcattgctacctactcatcaattattaccctgtaggatctttgttttttgaatcaataacattattgactttagaatcaatctgcattgtggtttttctcaatgccctcccatttttgttatattttcttgttgtctctttgtattgggaataaaaccttgtagttaggggttgtttcaaaattttctatcctcaaagccaatggaaacacttgattaacatcataaagatggtgtgttattatttggttgtgacttccagctctcaatccaactttattgggaaataattttccattgatctttaactcccttacactgaattttcagctctaacttgtttatatcctgataattgttatgcctccttacttaagagtggtcagttgatcataaaattcatcttggtaattataaaggaagtgttttactttaacttttgtttcatctcgttccaatgaacaattggtgaccgtaccaaaattttaaggttgttctctgcacgtgtttaccaaattttagcttgtccaaaaagtttcataatagcaaatcaaacttgcctttcatcagacctgtcatatcgaagtcctagcctatctgaaaaggcttgtggattaatttttccaaaaaaatctcctacttctatgtttgctttatgatatcaccacccatgttatgttgatcatgcctctaatgcccaatctaacataacatcatttgccatgtgtaagaggtaatttgaggcctttcaagatggcatcttgccctaggatttcctaggaggcagatttgaaccagccccttgctctactttctccccaacacaagatcccttatccttagtgccattagttgctggtttggaaacattagtggctgaatcttcagtattctgaggaataataacttgtagttctttaagttgggcttctgaagtaccttctccttaattatataaaaaaaaatcaccatgttgtcaatcagtcaactttcaccaaaaacttcaaccgcttctagttgtcatagtgctatgtcaagctttgataccaaatctcatacaagcttttaaaaattttagtgctataccggttgtttcttctttgtataatgacatgaaaggtccaataaaagaaaaaaagaagaaagatagatctatagcaatcataccaaggttcctaggcaatcaaatttagggttttctaagcacttacaattgagaaggcatcaatgacaccctcagaaaatgcatgataggtgttgaaaactttttattaaaacttgccagctaccctcttttcattttattagaggttagaactcgccaaaaaccttattagaagaaaaaagggaagatctctgcagaaaaatttgcatttccatttttccattaccctttttattttggttcttgtttctcctatattggcatggggattcattgcattaattttgcaggaagatctgtactacccacatccattggtgcagga

SEQ ID NO: 12194 - DNA, 20496 bp, Vitis vinifera
  Intron number 1 from transcript GSVIVT01024094001 (locus G SVIVG01024094001) derived from phytozome v7.0 (chr-ID chr3 ; pos 1169304 to 1189799 reverse strand)
aagaccaggcaagtacttgtgaaatactaatgcccaaaaattattggatggctaaaatttgattggctctatttttctcaaataccattgtttgtaatgggaggatagcagaaggattataatgcatgtttgatctcggcaaaccgagcatgactgaatcaagctataccatccatttatgattgtaaaacccctactacaaattgtatttgccaatgaatagtttcgaataatggcgagtagttgttttgggatacatccagaacatgaaatcccttcacggcacagagagctctgcttggagttctacttagttgaagaaactcttgaatgaacgtactgaattattatatattcttatttatgacttttattatatgtagtatcttcctgcaagtttattatatttggaaagatgcttttttgaaggtctttttagatatttgcacccgatttccaaattgggctgattgtagtgcttgaaaacatcaatgagatttcttcttgtttatcctttcaagcttggcattgaatcctaaagatcttgtctcagtaattcatctaagcattatttccatgtgtttaatgcagtagtcttattggaaagtgtcctgcttgtaatggttgtgaagccaatcttgttttagtcaatggtttaactttccttaaaaataagtcaaatagctagtgtcgttacttatcttttggacccctgttccctggactagcttttttgggtattgcaaatgtaagtttttagataagtcatattttttatatttttaaatatattttaaaaataaattttattaataatattttatttttaatcactctctatatttatataattattttttaaaatagttatttaaaaatttaaaaataaaaataactaaaaaaatgctcttttaaaaacattatatatatatatattttttaagaatataaaaccgctttctattatttgattgttttgttttgttttagtttggataataaaaaattgtttttaaaaacatttgtgtagattgatgtttttcattttattaaatttcaaagggcatgcatttggaaaaaagtggtgagttggagaaaaatcaatatcgttcttgatgaatataacattagaaattaaaagcggtgcatgtgatgaatctaaacgcggagggaaggtaatgtaaattaaaaaaacatccgaagtcctttgcatctcccatacctaacgagtaaaaaccccacttggccagctgtggctttctttgctggcaggtgaattgtcagttattgacttattatgtatgggaataaatgacgttatttattgccatgttgctgtatattatattatggatgattgctgatcaaaatgaagtccagctcatgcatctctgccattcacttcccatcctttgattcaagggaatctcaaacaatctccataatttttctaattccctaaatgctatgtaacaacaaattattgcgcaatcaaggtgtttgattcccatagtgaaaggaagctccatgctagtattaaaggaagttcgatagctccaaaacttgagtatttccttcttgagagaatcagttccatccaaagttaagagggtcggtgagagaacactacaatggcgacacaggctgtggtttcctttgccgttgaaaagatcggtgacatgctcattcaagaagcaattttcttgaagggggtccgggggaaagtcgataggctgcagaaagatctaggggccatgaaatgcttcttggaagaagcggagaagaagcaagaagaagatttaagagtgcgcaactgggtttccgaaatccgtgatgcgatttatgatgttgaggacatcatagacatgttcatcctgaaggcatagtccctgagaacagactactttctcaagcgtgtcttcaagaagttgataaaccgccataaagttggcaagaaaattgaagacatccaactgaccctccaagacatctcaaataggcgggaggctctcggaataaaaaatactggagaaggaagaagcggttcgggtccaatgttgcagaatctaagacgctcctctcctggtgcagaagaacgtgtcatcgtgggccttacagaggaggcagataagctagtgaagcagctcaccgcaggagaccaaaggcgccgcgtgatttctttggtaggaatgggcggcataggcaaaaccacccttgccaagaaggtctataatcatgaagaaattgtgaaacactttccagattgtcgtgcctgggtttatgtatcccaagattgtagacccagagaggtttatatgcaaattattaaccaggtttctgcaccaactaaagagcaagcagaaatgatagagaagtatggagagaacgagttgggggatttccttcatgatcatttgaaggagaaaagatatttgatagttctggatgatgtatggaggtgtgccgattgggattttcttgcaaaagtgagcagcaacgatcctgactgccctggaaatgtttttcccgatgggagtaacggcagcagattacttcttacaactcgatataaggatgttgcttttcatgcagatgctcgaactattgcccatgaaatgcggcttctttagaaacaacagagctgggacttgtttagtcgaaaggctttccttgatgttgatgttaagagctatcctccagatttgaaggaacttggggaagagatggtggacaaatgtaatggtttgccattggccatcgttgtattggggggtttgctgtcaagaaatatgtcacatacagaatgggagaaggtgcacgataacattactgcataccttgctaaagaaggccaaatgggagtaatggcaatgctaaaccttacctacatcgacttgccccaaatgggagtaatggccaaatgggagtaatagatctgtcttaaaaaaaaaaaaaaaaatgcaagttcagtgataaagaagtgaacttattttgtataaaacttttcaatgtaaaaaaaatgaacctatctttttaaaaaacaatttaatgtaaaagtgatttttcattttttcaaaataagagatcaatataaaaagtaaatttgttttaaagaaacaaatttgatgcaaaaataaaacaaatgataaaaaagactccatttttatatttattttttaaataatcatttatatatatatatatatatatatatatatatatatatatatatatatatatatatatattaaaaagattggtaggtttgggagctaaataaccatggtggtgccaatttaaataatttttcggccatattgctttcaaatttttgtatggggcttatgaaaaacaattactattcccaatacagatataaattttgttcgtcatgaatgagtagtttcaaataatggcaaataattgttttgggacacgctatcttggaatttagaaattaaagtcattcacccatttttttcattttttgtaataatttttgcaagtacattttggcagatgcttcaaagtgctttgggtgctagatttggaaggtttggaaattgaaagcctaccaagtatagttaggacactaattcatttaaggtacttgagattaaggcattctggtttaaaaatgcttccaccatctataggcaacctaatgatatggaaaatgaaaaacttgcgatatctttatatagaggggcaagaggatgatgccccattgcaaattgataccttgtaaaatctttagacaatatcaagcataaggttcaagcaatggagccaaaatgattcaagcaagttaaatacttgtcttgagaagttgaaattagaaggaagatatggtatagaagaggttaggttttcaaactccattgccaagttacattgtcttaaatcctttgttccttaagacatcggaagggtctaccattccatcctttgctatgaactttgggctctatttctctacgttggaaatgaagggacacatgcaaaaattgcctgacgcccttcaattccctccaagtcccatcactagaatgtgatcctatgcccgttttggagaagcttccgaaattattgattcttggattaagggcaaactaataccttggaaaggaaatgcaagtgtcagtaaatgggttttctcgactcaaggtacttcaacttttgaagttaaaaagattgaccaaattgaatatagggcaaggtgtgatgtcatggcttacacatttacaaattctatcaaaagtgaaaatattgggatttaagaggcttctaaatctattagagctaaactttatgattctatctattttttcataggcatggtttttgagaatcaagggggttatctccactcacaaacttcttccttggatgttacaaggtacttgcattcatcgatctattttgaatcccttgaactaccaattttgttagggttaatttaaccctcttcccttaaggttttgattaaatatatttgactcttcattgatttgaaatttcatcaaatatcctccttattttgagtgataagaaaagtgagtaaaataataagtaaaaatgataaaagagttatttgataaaatttcaaaccaataaaaattaaatatatttaaccaaaatttcaaaagaagtgaatgatattaacctatcttattatacgaagatattaattatttagtactcaacacgtaagaaagagctcttgagcaaaacatttttatatatcattggtcactctctcctttttttacatcaatggatgtaaaaaatgtggtaaacatgaaaaaggaataaaattttctcataaaagtaatagcattactgccacttatttcttgaattatcttgtaaggttaatgttgaaagagagagagagagaaaaccttaattctcattcatattgttagcttcttacaatagagaaatatatatatacaaggttaggttgaactaactaccatatatgtgacctatattaagaaaggaaagaaacttgtacactaaaaatgcattatattcaacactccccctcaagctagagcatatatgtcatatgcaccaagcttgttacaaatgtatttaatcctaggacctctgagagatttagtgaagatgtttgctagttgatcatttgaattaacaaaacttgtagcaacacactctgatgcgatcttctctctaatgaagtgacagtcaacttcaatatgtttggtcctttcatgaaagactggatttgatgcaatatgtaatgtggcctgattgtcacagactagctttatctgttcatcttttccaaatctcaattcctgaaggagttgcctcaaccatatgagttcacatgttgccaaagccatagctcgatactcagtttcgacgcttgatctggccactacatcttgtttcttattcttccaggatattaagttacctccaataaaaacacaataccttgaggtggaacgccaatttgagggtgaaccagcccagtctgcatctgtgtaaccaacaatttgggtatgacccctgtcttcatatagagagcggcgtaacttgcacactaaactagactccccttgagcaacaaaaccaagtggttgctccatatacacttcctcgagaagttcaccatgaaggaaagcattcttaatatccaattgataaaaaggccaatgacacatagcagccatggagagaaataagcgaacaaaagcaatcttggcaacaggagagaaggtgtcaccatagtcacaaccataaatctgagtataacctttagcaaccaagcgggccttaaggcgatcaacctgaccatcaggaccaactttaacagtgtagacccaatgacatccaactatagatttactaggaggtaaagaaacaagatcccatgtgccattggagtacagagcaaccatttcatcaaccattgcctatcgccacctaggatgagaaagtgcctcactagtactcttaggaagagaaacagaggataaagtagagacaaaggcagaataggatgaagataatcgatggtagctcaaaaaattataaataggatgagaattacaagtagattgattacctttctgaagagcaatagtcaaatggttagtagatgacagggccggggtaggagaaatcggtgggacaggaggtgagtcatcaggtacctcagctgaagagagaggaagagcaacaacacgatgttgacgatgataaacccgaagaggatgagagagcacaccggaagagggagatatatagggaagtggcaatacttcagaaatgggaagagattcaaaggataagaaaaatagagagtccttaaagaaggtgacatcagcggagagaataatgatgagtgttaggggaataacaacgataacccttctaaattcaagagtatcccaagaaatgcatttcgtaaccttggcagagagcttgtcttgtctaggtgtgagagtatgaacaaaacaagtacaaccaaagacacgaggaagaaggaaataaagaggttgggtaggaaaaaggagggaatgagggatttggtcatgtaatatagatgagggcatacaattaatcaaataacaggttgtaagaacaacatccccccaaaaacgaaaaggaacatgactatggagaaggagggtacaagttgtttcaacaagatgtcgatttttacattcaacaaccccattttgttgaggagtatgagcacaagatgactgatggaggatcccatgttgggacataaaagaagtaaagggtgtaaaaaaatattcccgagcattgtcactgcgtaacacttgaatagaaacattgaattgtgtttggatttcagcataaaatttctgaaaaatagagaataacttaaatatatttttcattaaaaataaccaagtacatcttaaatagtcatcaatgaaagtgacaaaatactgaaatcctaaagtagacgtggtctgacatggaccccaaacatcagtgtggacaagttcaaaatgagactttgcccgattattcaaatgctttgggaacgagacacgagtatgtttcccaagcttacacgactcacacgcaagcgatgacaaagtggaaaaataagggaccatcttttggaacttggagagactaggatgacccagacaactatgaatgagaagaggaacatcgatggaaatgcaagctgtaggagatgaaggtgaagtgaggtgatagaggccttgagactcacaccctatgccaatcgtcttccctgtgctctggtcctacaagatcacagatttatcaaaaaaagtgatagaacaattaagagtgtgagttattttgttgatggaaataatattaaaaggacactcaggggcataaaggacaaaatggagaggtagggaagggagatgatgagccaaaccaatacctttagccatagtttgggaaccattagctaaaataatagtaggtaaggcagaggtagtagtaatagatgagaaaatgtgtttattaccagagatatgattagatgctccagaatttagaatccatgggccaagagaaggagactaagtaaagaagactaagacattaccggtttgggcaacagaagcaacaaaaactgatgtggctgcctaatatcggagatagacatcataatcactactagtaagggtgatactctgagatgtggagctcgtagtggagttaggttgagatagcaaaggatcagatgactgagcaatgtgggcagtccgaagaggccgcccatgtaactgataacaatgatttcgagtgtgaccaagcttattccaataggtgcactaaggacattgtcctcgaccccgattgccactatgttttcctcgagagttagtttgagaggctaacacagatgaatctgaaggaccatcagtcgacaagaggcataagagacgagcaaacacatcatccaaagatggaactgatggactagcaagaatatgatctcgaacagattcaagatctagacggagaccaatgagggttaacaccataaagaacttgtcattctgtatttgttgagcttcagcaccattagtgaagggcatcaaagttaagaactcttccttaagaaacgcaatccgaccatgatataagtagacagatccatgtcctgttgtctcacatgaacaatatcagaaaccaccttataaaatcgttgaatatcattcgtgtataatcctttagcttgagtccaaaatttaaagcaagttttgtaggcacgaagatgatggaaaattttgggatcaacagattgctataatacgctgcataattgtgcatcgatcttcttccattgcactttgtcaacatcaggtataacatccttaggtgtaacaagatgatcctcataaccttgtcccataaaccagagttccacgaacattgaccaagagagataattctcactaccaatcaatttttttctatgtgatagtaggagatccagagatgacggatgtaaatatgggatttttagttgccatatccacttcacttgaaattgaatcacgtttggatcgaagagagccctaaagggaggtcggatcatagttgtggaagaagaacctggtatgtcaggacccaaacaaaggagaaaagtgactggggatgaagaagaggccttcccaaggcacacacaggtctcggccaaggaagggaattgccgtcagaggctgaaagaagacccgcggaggctgaaatgccaaaaaaatggagaagtagggttcggagaggactgacagaggcctagaagtgcaagacggcaccggatgagcctattggaaaaagctcagcaccagaaagtgggccacgtgcccttacgcgccgtcgcgtggggctggagaagagtggcgtgtgggtgggtttttggctccagtggtttgagaaaagttgcagatctcctctttgtgctcctaatgacgtggtcggtgtcgaaaaatatcgccgaaaaaatgttgacggtgatgaggattttctgaccacgatatggctgaccagaaagctttgggaaatgaaaaaggtgaccggaatgaaacacagtcactggacggattcccggaattaattatacgggtaaaccagaaagaataaagttttcccccttggctttgataccatgttgaaagagagagagagagagaaaaccttaattctcattcatattattaacttcttacaatagagaaatatatatacaaggctaggttgaactaactaccatatatgtgacctatattaagaaaggaaagaaacttgtacactaaaaatacattatattcaacagttaatatgattactcatgcttcattttctaatattatttttattttataatttagagtatacttgaaaatgaaatagctgttaggattttgtattttcttcttctatacatttggaaggatttttattttttatttttttttattgttctttttcattcaactaattttttattttatttatttcagcataatcgacaatgaaaatatccctggattttggatatactgtgaaaaaggtaagcttgaaactcccttttaccttagatgattgtgggggtgtatgcatgtttgcgttccctcacttggatgtgatttcggtcaaaccagcctagtaattgatggccaagtatcattcttagttcttcgcataaccctaatgatgctagagggaagcccaagatccttttttttttattattattgaaatttctcttcggaacctaatattagattcaacaattttttttggtggtgaaatatttgaataacgtcacctattgattaaagagaagttaataactgctattgttttgagtataatttcttaacgatcatatattacttcttatttatgattatactctaaacgcacaaaaacaattgaaaattgccagtttagtgaaattttttttcagtatatatgtgtactaatggctgcgatccttgctacaactttgtacatatatgcttgcttacttctaaaagttgggttagtgatactcaagacctgtgctgcaacaggtcaaacattagaatcctctagacaggcagttgaaaatttagcttcctgcctagaacgtgtcaagaaacttacgcagatagagagaagctgaatcatggacactgatcacacatggttaaatgaagaccatgcaaacccttatacaccactcatccaaggcatgcaagcacttgtcaaatactcaagcccgaaatcacatgatgtatgacaagtgacaggctagcttgttgactctctttttgtcaattatcattgtttgtaacgctaaaggattatgatgcatatgtttgatctctgcaagcagagcatgactcctactacaatttgtgtctgtgaatgaatagtttcgaataatggtaagtagttgttttgggatataagactagaattctccttttttttccttcttgtaaatgaagaaacatggttctttttttcaagtattgcttacttgcccaatgacaccaaaacacagggaatttagagagttaaaaaacaggggattttggcactgggttgagtttgactaactgaaacacttgatgaagatgctacttcttgccaaaaaacagttttcttgaaggggatgggtggtttttaatgcaggacttggggcatcggcaaaactagtcttgccaaaagggtgtgcaatgatattatttattgccatgttgctgtatgggtgaatgctcatcaaaattaagtccagtttatgcatctctgcccttcacataaaatactttttcccatcctttgatttaagggaatctcaaacaatccccaaatgctatgtaagaacaaattattgcgcaagaaaggtgttttattcccaaaatgaaaggaagctccatgttagtattaaagtaaagtgctacctaggggttcgattactccatcaattaagggaaggtcagtatgtgctgttttagaattactattaaacggactcctaatactaattaaaaatattgagattcaaacttggtgttgggttcgatttagcattaattgaaaatattgataatcaaactaggtgtgattggcttctaatctactcaacccatccaaattgcaaccccaaatcttaattttttcaaatgaaatatttatttcattaattttactagtgaataatatccaattagatctaaagttggttcttttttcgttattgtaacatgatatggtagttaaaaaaagggcttttctttccgtatatatatgttataaaacataaaataggaaataatatactttcatttgcgatttttccatcacctttgtagcataataataagaacgatgataataataataataataagttttcaattatttgaatgattatttatgggaacatgaagaaccaaatggtcttgaaaactactaactaatgatgttgctgcatattatattatggatgataataataattacaaaatatcaattatgtgaatgattgtttattggaacatgatgcaaccaaatgatgttgaaaactattagtcaaggatgttgctgcatattatataatgggcgatgacttaatcaaaataaagtccagctcatgcatctctggcattcttctagaacatggtttttttttaattacctcatttgcatgtatttagtaaaaatatattttatgattatgactctacatccatgacaatttttttatggcaaatattatgtgattatctttcgtacatacgaacattttcaaaatgagggaagtgacttcgaaaaatacacttttaatttttgtttagaaagtgattttaataatagttttgaaagaaattattattctttaatattttatagagcgaatctatttgaaaatttaaaatatgcttaacatattttttatatttttaaaaataaattttatcaataatgtttatttttaatcactctctatatttatataattatttaaaaattaataaataaaaataactaaaaaatattcttttaaaaatattatattttttatttttaagaataaaaaactgttttttattatttgattgataaacatattttcttgttttgttttgttttgttttagtttggataataaaaaattgtttttaaaagcatttggaaaaaggtggtgagttggagaaaaagcaatatagttctttgcatccccatacctaacgactatgggtgaggaagttattaattaaaaccccccttggccagctgtggctttcttggctggcagttgaattgtcagttattgacttattatttatgagaacatgaaagcaactaaatgatatcatttattgcatgccatgttgctgtatattatattatggatgattgctgatcaaaatgaagtccagctcatgcatctctgccattcacttaaaatactttgattgaagggaatctcaaacaatctccataattgttgcgcaatcaaggtgtttgattcccaaagtcaaaggaagctccatgctagtattaaaggaagttcgatagctccaaaacttgagtatttccttcttgagagaatcagtttcatccagagttaagagagggtcggtgagagaacacttcaatggcgacagacgctgtggtttcctttgcggttgaaaggatcggtgacatgctcattcaagaagcaattttcttgaagggggtacgggggaaagtggagaggctgcagaaagatctaagggcgatgaaatgcttcttggaagaagcggagaagaagcaagaagaagatttaagagtgcgcaagtgggtttccgaaatccgtgatgtggtttatgatgttgaggacatcatagacatgttcatcctgaatgcagagtccctgagaacagactactttctcaagcgtgtcttcaagaagttgataaaccgccataaggttggcaagaaaattgaagacatccaactgaccctccaagacatctcaaataggcgggaggctctaggaataaaaaatattggagaaggaacaagcggttcgggtcaaatgttgcaggatctaagacgctcctctcctcgtgcagaagagcgtgtcatcgtgggccttacacaggaggcacataagctagtggagcagctgatcggaggaggccaaagacgccgcgtgatttctttggtaggaatgggcggcataggcaaaaccacccttgccaagaaggtctataatcatgaaaaaattgtggaacactttccagaatttcgtgcctggatttatgtatcccaagattgtagacccagagaggtttatatgcaaattattaaccaggtttctgaaccgactaaagagcaagcagaaatgatagagaagtatggtgagaacgagttgggggatttccttcatgatcatttgaaggagaaaaaatatttgatagttctggatgatgtatggaggtgtgccgattgggattttcttgcaaaagtgagcagcaacgatcctgattgccttggaaatgtttttcccgatgggagtaacggcagcagattacttcttacaactcgatataaggatgttgctttgcatgcagatgctcgaactattccccttgaaatgcggcttctttcgaaacaagagagctgggacttgttttgtcggaaggcgttccttgatgctgatagcgagaggtatcctccagatttgaaggaacttggggaagagatggtgggcaaatgtaaaggtttgccattggccatcgttgtattggggggtttgctgtcaagaaatatgtcacatacagaatggaagcaggtgcatgataacattagtgcacaccttgataaagaaggccaaatgggagtaatgacaatgctaaacctgagctacatcgacttgccccattacttgaaaccgtgctttcttcatttaagtctcttcccagaagattacgtgatctcctcaagaaaactgctccttttatggactgctgagggttttgtgcgagaacaagatgaccgaagaatgaaagacatggctgaggtttacttgaatgagttaatcaatagaaacttgattcaagtagtgagaatgagtgttaatgcaagggttatgaaatgtcgagttcatgaccttatacgagagttggctattgaaaaggcaaaagagcaaaacttcatgggaactagtattgcagatcctctatccccctccgccaatttatctctcttttcatctaaatcccgtcgacgaagtatttattctgactttgagaggtatgcttccattgaacatttaaccccataccttcgctctctcttatttttcaatttggggaaaaattgtagagcatcacaattggatttcattgccaaatgcttcagagtgcttagagtgttagatttggaaggtttagaaattgaatgtctacccagtataattggggaaatgattcatttaaggtacttgggattaaggcatactcgtctaaaaatgcttccaccatctataggcaacctaaggagtttgcagactttggagataaacaatcttagacaagtgccaaatgtgatatggaagattaaaaacatgagatatctttatatcgaggggcaagaggaagatgttccactgcaaattgatacattgcaaaatcttcaaattctgtcaggcacaaccttcaaccaatggatcaagaacgattcaagcaacttaacttgccttgagaaattgaaattagaaggaaggtgtgaggtagaaggggctgtgttttcaaactccattgccaagctacctagtcttaaatccttgtaccttaaggcatcagatgattccagcattccaccctttgccataaactcttgcctccatctttctaagttggacataaagggacacatgcaaaaattgcctgaaaccattgaattctcaccaaatcttacacaattgacattggaagcatctaggctaggttgtgatcatatggtcgttttagagaagctgccaaaattgttgactctcatattaagggcaaacgcataccatggaattaaaatgcaagtgtttgcaaatgggtttcctcaactcaaagtacttcaactttcagagttaaaaggattgactgagttgaacatagggcaaggcgcaatgccatggcttatgcaattacaaattcatagacgagtgaatatcgtaggatttaatgggcttctaaatctagtggggctaaacattatgggtggactacatcttgccatagatttgctcttgaatccaagaaatcgtcattggcatggaacaaggtacctacattcatctatctacttagatctcttgaactatcaatttttactacttgtcacttcttgaattaacttatatcaccaatatagttactcttgctatattttttaatattattttatttaaattatagcgtgcttgaaaatgaaatacatgttaggattgtgtattttctccttttataaatttggaaagcaaccttttcttctattaaaacgaatccatctagtggcctgatgaccatacttcatctttctttgtagacacattaagccctatgcatcgctatttctctcatatgttttttcaatttcatcacttttgtacatttgataggttttaaatgcatgtgcagaatcaatatatatttgaaaaataaaataaaacaaatgcaaatatttttctatatatattcaatccatattaggaaaatagcagtaccattaaatggttacccaactccattgcttttgaactaactagaactttaattttaaatatacagtggaaagttaaaacaactcagattatctctcttcaacattgtaaggatgattttttttttcaattttttttattgttctttttattccactaacatgttttgtttgatttttctattcatttcagaatctttataaatggtcggattggattgcaagtttgccgcgaaaaaggtaagcctggaagtttggaatttacttttaccctggatgattgttggggtgtataaatacatgttttcgttcctctacgtggatgtgatttctgccaattcagcctagtaattcatggaagtattagtcattgttcttctgcataacagttagtgatgccagagagaagcccaagatcttttcactgaaatttctctttaaataatgaatcccacttcagaacctattattagattcaacaaaacaagtttatttatttttttattttatttttttgccaaattaaataacttcagcttttattgaagggaaatcaattacttctttagttttcagtttcttaacaaacatatattacttcttatgattttactctaaacgcataaaccaattgaaaaatgaaaattgccaggtgaaatttttttcattatatatgaactaatgctgagatccttgctacaactttgtacatatatgcatgtttagtttaggtacctaaaagttggccatgtgatactcagacctgtgttgtaataggtcaaacagcagagcgctccaggcaagcagttgaagaattagccgccgttctcagatatccaagaaaaactcgtggccaaaatcacatgtatgacaagtgaaaggctaaaacttgttggctctctttttgtctattttcattgtttataatgtatgtttgatctttccaaacagataatttgagcatgccaaacatgttcgataacctgaagattatgctgcagcagattttccaggggcttctacctcatgcttgattccatgatggagtgattgaaaggaaacataaggccatgctattaaaatctcatgtattttagttagcaatctctactttcagtgatggtcatactacggttgaacatatttatactgtatctaaaccaaaaccagtgtgcttataagtttgttgaatcaaattattagatatttgtttgtacaattatatgtctattaagtgacaattaggatgatgtatttgaaggctttgcttggcatgcaaaagtgttattgttattggtttgaaagtggtaggtttgggctttttgcagggtgattttattttttaaaaaatcaatccattaatagaacttgtcttttaaaaaagtgaacttaacctttggaaaatgaggtcagtataaaacttttcaatgtcaaaaaagacaattttaaaaaagtgaattgtccattctatccagaatatgaactccattcaccgaacagagagctctgcttggggtattgctgcctaggtggtggtatctttgattaaggtatcttttgattttctttacgggactgttgaattagaatcagtgtgcctaggtggtggtgtatccatataatacaaggaaagacaaagtaacaaaaaacagaaggacaaacataaaactttgggctacagagtttcccatgtatgatacgaggttttctgtgttttttgagtatcagctcttgctttttcgcatccattgaaggtggggccagagagcaaattaggatggtagagtcagctgaaaggttgggtgacttcctcattcaaaatgctgtttccttcgaaggagtgcaccaacaagttatacgtttgccggctgagctaatgcggatgcagtgcatcctaaatgatgcagatacaaggcatgaagataatgctggagtgcacaaatgtattcctgaaattcaaaatgctgcctctgttgctgaagatacctagacctgagagtcccaaccagtcaattaagaggattgtgtttactccataggaactccagttcttctccttagtcccatccaaaaattaaggtcttatctttctccagcctacaccccaacctcagggccataatatcatagctcatttgaaaacctccctttcgcgcactctagacttgttctacccactcagccggccgccttggcaaacgaccacaataccatttgtttcttcatcaactgcaatggagccagagctgagtttatctatgcagctgctcatggcgtcactgtggtcgaaatccttgggcctgcctacgttcctccgattgtccattattttttcctacacaatggaactcagaactacagtggcgtttcagagcatttgctcgcagtgcaagtgattgagctccttgatggcatctttattggttgcattatcaatcacatgattgtggactgcacggcacatccttctggcatttcttcaattcatggttggaaatatctcggggttccaatgaaataaccctatctcctgttctctatcgctggtttgttgatgttacccaataccaattcgtcggtcactatcattgaatacagagacaaagcacaagccgccctctatattcaaaaagtggatgaatctgtgtaagcttggcagggaaattgaagcaatccaaatctgagtgcaggtgaagaattaataaccaaattagggtgcttgtgataactcaacttaatgatttaataatttaattcaagttattaaataggttaagtatgttttgataagatacaggttaacttcattaatctcccatgagattttggttaaatatacttgaatttcattagtttgaaattttatcaaatccctttcttattttaagtgatagagaagacgagtaaaaataaaaaatgaaaatagtagaagagatatttgataaaagttcaaaacaatgagaggtatgtgtaatttagtcaaaagctcaactaggtgaatcaaattaatttaataaaatatcttaatatcataacttaaaattataaataaatttaaatattcagtcaaaataaataacttattcttaaatttaattttttttaccttatttgcatatatttagtaaaaatatattttataattataactctatatccatgattaattttttataacaaatactttatgattatcttatatatatatatacaccttatttgcacatatttagtaaaagtatattttacaattataactccacattcatgattatttttttttatagcaaatatatatgtaatacttgcattttcaaaatggggaaatgacttcaaaaaatatgcttttaaattttgcttagaaaatgttttttcaaaaaatatacttttaatttttgtttagaaaatgtttgtaaaaatcgttttgaaaaacaatttttgataactattactctctaatgttctataaaataaaattctatttaagaatttgaaatattcttaacatatttttatattttaaaaataaattttattttatttttaattattctctatatttatataatttttttttaaaatagtcattataaaattaataagttaaaacaactaaaaggatattttatgaaaacattatattttatggttttaagagtgaaaaactattttctatcttaattatcaaaaatattttcttgttttgttttgttttttttcaatggataacaaattatttttaaaaacacttgtgtaccttactgtttttccttctattaactttcaaacggcatgtctttcggaaaaagtggtaactcggaaaaaatgcattattattcttgaagacgagagaaagattctgtgtcccatttttttttttcctttttcatgtttttctttcgttatctctccctccttttttatattttagcgtttggatggttgaacaaaagtcttagactatgacgtggctgtcacgtgaaggtgcaactttttccctaaacgttaagagttagtagcttacccttttatggataagaatttgtctttgcaattgggaataggcactgagtacattctggattttgtcatttttgatccttattacaataccttgagagttgaagtctctagttcaatcttgacacctaaaagcagttttacatttggaaatgtaatgtaatgaagaagttcaaaaaatcatatggtagaatcaaattctttattcacctttttttattgataggtaattacctttttattcatattttcttcccatggggactcttacctggaacctcactcaaacccaaacccatcctctaccatttgatccatgcaaagggcagaatattttatttaccttggagtggttttagagaactttgtttattcttctctatttgtgcatgctaggttcttaagttggagttgtttcatgtcatcatgtgttgggaactctgtaacctggggcaatactatagccttaagagttagcaatattatcatccttgattaggccattatagaaatcctgcaatcgtaacataacctgattgaaccataattttgaccagcatcgacttttttgttattggatgtcaaatgtagttttgtactctctgcctgaatgttttggttttttgaaggtattgtccaatgaatgctgcatttgataaaaccgtcttttttgcaggttcagtgattgggagcaattcttcagagcttccc

SEQ ID NO: 12195 - DNA, 9133 bp, Vitis vinifera
  Intron number 1 from transcript GSVIVT01010952001 (locus G SVIVG01010952001) derived from phytozome v7.0 (chr-ID chr7 ; pos 2706595 to 2715727 reverse strand)
tgcaatccattgaggtacaagagaactagttaatttggttagactcagctaattaaggagataaaaaatgctcaattttattgtaagataactctagctaagaaaaaacagagatagaattaccatgacttagtaatattttggggtgtggtcctttggaattagctataatgtgtttatttgtttttagattaaaatgattaattatttgtttaagataataaaatcctaatttaaataaataagaataaagatttcttgaatattaaatgaaataaatcaaattaaaaaaagaatgttctagagagtttcataatctagtgtcaaattcttagaaggatagcattataaaatctagggtttaggatgaaagtcaatccacaaccaaattgaatcctaagattaatgttacatccaaaacttttttttttctttttaaaacatatttctaaaaccatcaagtgaatgagattaaaagttaattattggttcaaagtttgactttttaacatttcctactccttgtagctttattttaggaaaaaataacgataaagaagattaagataactaatgatcaaaagttaccaaaaatcactagtattaggtaataatctactatatcattccccaacacaaactcacaatgataggtgatggtcaattttgattttcaattttattcaatcaaagcctatatccatttttgtagatttgacccttaaattcgttaatagtaagaccaaattatagtaattagtgatcaatgtcttctcaagaatgactactatcttgataagaatcatttgtaatttatctatagtgatctcatgtaaaagatttattcttatcaattaaatcttgaaaacataaagaaaaccatattttgtcatgttcttgctacttttctttggattcttcaccttcatcatgttatcagatttggatcaatcaagttagccaaacatgatagagggtttctttttacaacccatgtttggttgccaagaaaataaaatagaaagattgaaaaagaaaagaaaacctaaaactctattaaagacttttaagaggagatttcactccctacattctatcttcctcttttcctccttcaaaacctagaaataaaagagtttaataaattcaatatcctaacatgtgatacacttccattgtccacttattatggagaaaaattataaaaaaaaaacctaaaaaaaactctaaatattatgagttccaaatgagtaaaatgcattttgaattagattgaggcatttggaactcatttttggtatgttttagagctcaaaacttgatcaccaatggttgaattcgaaattgaggtgagttccaaattgttagaaaaattaggcaaatccaacctatggtaatcaccctagaggggggtgaatagggtgatagtctctttttgcaaatttaaattatgtgaatgcaagagataattatatgcaaatacataataaaataatataaaaataattgcatataaggtaagagagtaaggaaaaagagaatgcaaacacaagattttatagtggttcggcgcaacccgacctacgtccactctcctctagcttcaatcctaagcttgaggttccactaattcaaggcttccaaaacaaaccttcaaacaatacaattgaattatgggtccaatcaaccctcttggacttttggctctaagtatcctttacacttctcaagagataccccactcttgaacaacccctcaagtgataccccacacttgagaatcccaaagtgatactttacacttagacttttcttctcatagatttacaaatgaagataataaatgatctcacaaaatcctagtacaaaactttaaggctcaaatgatacaagaaaaataggattgaatgatgcactaatgatatgcaagttttaaaataatagtgtactaaaaaacacttgcccaagactcaaatatattcaagaaatgtttaggaaggttaagctcatgaaataataaagattgaagcctttttatagaagaaaacgaccaaactagccattgggggttcgactggttgagtagggggtcaatcgattgactagcctttaatatttaatacttggcaagtgactgttggaccttgaccgccctttgaccaaacttcaaccggttgaggttcaaccttaactagttaaacaaccgtatagaagaaagagaaagtttttgtatcatttgaccagttgagctaaataggtcgaccgattcctcatttggttcaaccgattgagttgtttttggctcaacaactatcattttcaacttaaaaccttttaaacaagtttgaaaaatatttaatacaatgttttagttgaaaacatgaaatcatcagattttaaaggatttaaaacaaaattacttctggatgattttggtgcataaattaataatgtaatgcatgaaagacctagtgcaccaacaactttataaagagatcctatgaaacttaagtcttgaaaaacacttatctttgaggtcttctttttctaattgatttctctttgacttgattttatttttgtaattgccactttggaaatcgtctttcctaatcatacttgaaatataatcattagtttcaaaccttattttgttatcatcaaaatcgagattaaccaaaccttagtttaacacaaatcaattttgaactcataagtggaaaaaaagtgccaaatttgaaatcaccatggtgagttcataattcattttgaattttgaacttacctactactactttgcttctaacacacataactttttcatttcagctttgatttgcacataatatgaagtgttggactcttgacttcccaaactttgaaatgaaatataacatgctcaaaaatgactttggaaagtactctaaatttcacctcaaatttagagtgcttgttgtggccaatttttgagttccaaatttccatgtgaatttgattgtatttgcttcaaacttctttcattatgattgcttgccttttatctcatttcataatattcgttgctagtatctcatgcctatggttttctcattatgcttttatttggactttttatggttcacaagagcaaagtctctcatttatgtatatttaacattttctactcccttggttgagaatgaaatttgtactaagcattctttttaccccttaaatctagaattaggttcaaaaatggaagttagatccatagttaggatcttagcatcaatttaagttaagtttgatgatttgaactttttatattgtataaattatattatattggagcacatatttagctccaatcactggcataaccttggttcaacaaggttaggctaagtctcaatcggttgagttagttgggaaatggtaaccttgatgattagtagttgatcaattggttggttaatcaatactcaaattatatctagtggctttcaactcttatattgaacaagaaagagttatgagaaaataaaggatatgcttaattaagaaaaacacccaaaaagggatgggggaggtgaattaggttttttaatatcttttcaaacacaacaagttctagcacaatataaacaaaaataaagagatagagttagagaattcaaactcgtgttttatagtggttcagaacttccttgcctacgtccactctcctcaatctcctaaatgagtaagggttccactaacttgaagcttcaaccaagcttccaatcttcttacacttggatttcggctctaatgggctcttacataatctcttcaagattcaaacctcttgaaggctttaacactcagtttttacaagaatgaatccctcaacctagcttaaagataactcaaatacaagacaaagctaggatgacacacaagagtgcattaaaggatatgcaagtgatgatttaatgcactaagaaagaaatgaaagctttttggttaagaacaggtaggtagacaattgattgcaagtgttctcttattcataaatgaagtggagctctcaatttataggtttctaagctcgggagccaaaaacagcaaaaaagagcctcgaccggtcgagctagggttcaactggttcactagtcgttagagcatttaatgtttggcaggttatcgttgtctcgaccggacctcaactgggaagatgaagttactggatgagagaaagtgtttttggcactcctcgactggacctcgaccggacaaggacaaccggttgagccgtttggccagagtctcgaccggttcagtcttttggccccgaaaacctatctttttcaattcctttcttttctaacacttgggcaaggtctttaggtgaaataatatgtcaattttaaaactttttgcccaaggtacatttgttaaaacttgggttttaatgaaatcgaagttttaaaggataaaccaagttttctaagatgcatgaaacggtatgaaaatcctaagtgcacccatgcattcatcttacattcatttcctatgatcaaaagtcttcccaaagtcttgatcttgtatccatttggtcatttgatgaatttctgaatttatacctcagattctttaccatttaaaacaattagtcacttaaccatgatttgttattatcaaaactcgattaggagaacccttgggctaacaagttctaaattgttttttaactatatttgaagcattaagagaatgtttttagatctgcatttacttttaaacttgcatttcattttagtgtatcattcaaccctaatttcattgttttgaaaacatgatcggaccgaccggtttaaccatcgactgatggccttttcgatttggtttggtgaaatagaccgtctagagtttgaactgtctcatttctcacttccttccaagctcatttactatattctattgcaattaactttctcttgtgatgtgaaggtataaatactacataaatgctttgtaggaatttcaatgtgagataggttaggccttaataataataaaataagcttcacatggaggggaattgaaacctaggacatgtagtttacataacgagtggttgaccaccaacttacacagctatttggtcaacaacatggaaaatatgtatatatctttaaatttttatcatatagaacatttaaataaatataaatatttatatctaccattattggtataataattattaattataaatataaaaataatataaattaattaatataatagttttaaaaattttaaaataacaaaatacatacatacatacatacatacatacatacatacatacatacatatatatatatatatatatataatttcttatcattatttttaatattattaaaatataaattatatatttatgatgtcactggtttgattatgaaaacaatgctttatattgaaattttttgttataaagtatatttaaaacaataatccaaaaaggtatttggagctagaagtccaagaaagttgattggaactatagtccattgtaaacttgaaggtttgagttagaagccttgttaaaaaaactgtcactcgattgaaaacttgaggagagtaaatgtaagttgagttgtgtcaaattgctgtaaaattttgagtttgtattccctcctccccctcccccctctcattttctttatttatttgcaatttgttcttatattgatttttattatatcattttctatattgtcacttacattatttaagcttcaatttgcaaaaatgaccatcaccatattcaccacctataaggtgaagtaagaccaaactcatgtcattattatgttgtacccttttatgtggtgacatagaagcccaaaaaagacaaaataatgatgaagtttctcttgctcttggtatagtgggtccttaatggaagacttgtatgatgaactattagctcggtggcacaacatgccccttataattgtgttgtgccaaagttataagaaccagtgttttaaaaaccggaccgaatcggccggtacaaccgttccaatccagttcccccttttaggccggttatcaattagcgggccggacggtttttggagaaccgaacggttcaacaccccaacttttatttgactaagtgggccactttagtccattccctcacgacccaacattgttggcctacccatttttttggcaaaacggattgtatcctctccccggcctaacattcattgcccacacccatcctgtaaaatggacccttaatcaagagttgagccataaggcccaacaaccacttggcttgactgtccaacttgagttacatgggaagagatttgtaaagcactttatttttcctcttacttccaatgtgggataaggtaaaaggacttaaaagcaaaaatcaacttttttcctacggactacaacaagggggtttgaacctagaaccacaagctcatttgtgttaatttttaacagaaaataactacatagtctatttcaaataatatatatatatatatatatatatatatatatatatatcacatatgttttttttttcattttcaatttgttttcatatataaatacaactttttttttagttaccattttgaatatattgtcgtatttaaatattgtatatattttgtttaataaatttaaaccattaatacatgtatataaaaatgaataaataatattgtaaatattatttaatttttaattatatattttaaatattttataattatttttatttttaataaatatataaaatatatatttatgacattaccagtttgactaccggtccgattagtgaaccgtgaaccagtaattttttcggttcaatattcggttcgattctaaaaacattggtaagaactctcaaccatatggatagttcaatgactcattaatatctctacttttgtacaaaagtttcttattttaaaaataaaaaactaggtcatacttaaattttatacatttgactcaaaaataaatttgtcataaattaataaagttatcctaagaaataaaagaatataattaatctttttttgtcattttctttattttccaaaaaattattactaaaaacataaatttaataaaataaaaattagttaatttggataaaaagtcaatataaaaaaattcacaattttctaaatttgatatatatatatatatatatacacacacaacacggagtaattactaataaatagaatttgacataaaaaaactttatgttttttacttaactgaacataattagaaatcctaattaccatcttattaccaattttttaagttatcatatcattcatcattataaacttttgtattacaatccaattatgatattttaggatatttagaaatatattaaattactaattttcaaatatttttctttattatatgaaacaacaacggagtaaattttggtattttaggatgttctacaatttattaaattaattttattttaattaattgtttttcaaatatctttattctaaaatacaaataaacaaaataattttttttaaggatgaagactacttatttacatacagtatacaacagtaataaaaaataaattaataattaataacattcaaattaaggtccatttgagaattttaagatcataaaaattaaaaaaattacagttttcataatttcctaataaatgagagttcatcacatgaaaattttcatataaataaataaataaaaattatatctaataagtcaataattaattaaaaatatttaacattattttataatttattaatttaaaaataaagtttaactagaagaaaagaaccaaaaaagaaaaagaattctaatcaaattttaactaatttattttttatttcaatagatttttaacaatttatatgattctaaaatgattgttggaaaaaaaattaaacattataatacagtttataataaaaataatttaaaaaaattaacgacgaaagagttgtcatatttagacagcaactttgcctgccatacacaaaagcaatttgaaatttgtgggccgtcctttgtagtgggctttatgcttcggcccactacaaccgcactgccttggaagtatcaaatcaatataaccacaaaactacaaggctgacgcggtacgctaccatcataaattgcttcaccacaagaaccaatccaaaccgttgaatactctcccacttcctcaatccccaaatttggaaacgtgtcaaaaggagatgcggggtgcattttaagctcaacaatactggattcatacaatctctgccaaactcgcgcattttttaaattttcactattttttaattcccgaaatttcaaaacctccattttttcggaacgtatttacagagagagttttagtgagaggagagagagagagagagagagggagagctctgttgataaagagaaaaacctagagagaagcagtaggaggagacagaggaacgaaatgaagggtaccctaggaaggcatttgacggttcagctaggtcaagtttctcgcttccagaatcttctggaatccgtaaccgccgccgacaacatcgacgatgatgtcgataacaaagatttcattctgagccaagacttcttctggtaaatttcacgtttttgaatggcgtattttgattggagaattgcaagctcaatttgattattatttttgtatctgtgcaaaactcactgaaattggggacaattcgtttattttttacattatagtgctgaagaatgaaaaatttaattcatctatgtaatgctataaatcaacaaatggattcatttatgagctcatgaagaatagagtggattgtatcattcggatattgcatcacaaagttaagaaatatttagagtcgtagtattatcttcttatcatctgatatctccaggaacttctcgttcctttttctttaacttagttgggggttgggtggggttactgctgattatcatagtgtctgttctggtttcatttttatatcttgggtttaattgaataaggctgcaatctacaggttttttccctgcacttattggtggagatagcctt

SEQ ID NO: 12196 - DNA, 11094 bp, Vitis vinifera
  Intron number 8 from transcript GSVIVT01001871001 (locus G SVIVG01001871001) derived from phytozome v7.0 (chr-ID chrU n; pos 6491946 to 6503039 reverse strand)
tattgcatattctatcaccaccaactctaagaccggtaatttactcacatttcttctatctttttctataggttcagctgagcttaaatttctctcataaaaattttgacattatgacacatacatgcataaatactagaaatatagtaaacacatgaggtaaccggtgttgaaaatttgcatatgttttgttataaaaggtaaaagaaaatgaatagagattctctttttcatactgatcttatcaataaaatttgatgtatgtgagaaaaggtttttaggtttaaactaaaacgtcatctccaatatgcccttgcaagtaagtggcaatagataaataattattttgttgtgaaggatcagtgagatgtgtggtttacgatagcttgtgagaatgtcaactgtttgatcctaagtccagggatactaaacttgaagtgtgttcttggtagctttatctagaaaaaagtgacatgcaacttcaattgtttcatgtgctatgcaacttcaattgtttcatgggctaaggaaaacaagatttgctgttagatatgtggctccaacattgtcaccaaaaatttgcacattgcagttagggaacaggcaaatccacaagtatacattatagctaagtatggcggttacatcagcatatgcatggcattgaaattctgcacttccgcgagccattgaccattgtttgcaataggaccatgaaatgatgagttggacaaaatatattgtataatctccagagaattgctacatgttagagtatgttattacaatatcatattcgggtgttgtgattttctcttttttgactcaatagcataaataggtggaaaggcatgggggagttaacaagacaaaagcctaaacctcttccatctcttctttcttctcttttccctcatttgtccaaacgctagaatcacaaacttatagtttcaacatggtattagcgcacgatcatagtatttcccctagattttcaagacaattaaaagaattagaaaaaaaaaaacctgtcagcatgcttgcaacatgatggtgtcatgttgatatcatcatcttgagtggaaatttgcaggccgatctgttatatttctggtaactgatgttttggaactggttttgaggttatttgattgaaattttgatttttttattttttattttcgatattttggcccttattcttggatttgaaatttagcattgtttggacggatgtttttagttcaatttggtcctgctgatttcctaatttattttattagttattttattatatgttttttttttttttttttttgtgcatttgggaatgttctcttttggtctaagaaggtttatattctgtttctggactattgagggttgattagtagtggtgtgcttggtttagttgcattggacaaattgtttttgatatttaggatgaaagggagttcaactttttatgcttcaaagtgtttggatcccttaaaatttttcatggctaatgataagtaacaccttctcaggtatgatggaataccaaagtcaacatttaaaaatttaatggtgttaattatgttgcttgggctcatactttagtttttctacatggaaaaaggaattgatgttagaaatatgtgaattccttaattttagggatctaattgattgttattttgttaccttatatattcctagtacttgattttgttttgccttttttctgataggtagacaagaaaatatattaaaagcacttgaaaagtggcacaccaaagtacacaatgttttttttttttttgataggtaagaaaagatctaatataaaaagaggcgccaaaaaagcgactcacggtatacaatacctatacacccaccaccaaaatggccaaaaaagaagagaaacacctagctggcccaacaaacaaccttagctagaacccaaccaatcaataaaactaactatagttagagggcaatcaactataaacaactttgcctttgactaaagagaaagaacaaaagagtatttgagtctcgggattgacaacacatcatccttgaaggccaatctatttctcgccttccaaaccatccaaaaaatgtaaagaggagctgctttccacaccttcttgcgctttttgcccacaaaagaaccatgccaactaaggagagtctctctaactgatgaaggcagcacccatgacagcccaaacaaattaaagagcaaatcccataagacccttgtttttgtacaatgtagaagaagatggtctatggtctcctctttctcaaggcacataaaacatttatttgccaaggcccatcctcttttttgaataagatccagggttaaggctttgccccacgtagcctcccatgcaaaaaatctaatcttatgttgcacccacacattccaaacgcaactagaaggaaacaaaaagggcaacctacttctagagcaaggtagagggacttaaccgagaactttccactctttgtttcggtccaaaacaccatatcatccacatctctatgcactctcttcccatgaagccgctccaagaatctttctacctcctccacctcccaatcattgaaggctcttgaaaaatagggattccaacccccccaacccccctgagccaaggggtcccaaatatcggccacccacgcttccttatcaacagacaaagcaaacaaagaagggaatgacacacacaaagtggaatccttgcaccatctatccctccaaaattcaccctccgcccattacctataaggaataaaatcctagagcccacaaaatcccaatccattcttattcctttccaaagcccacaccgtgcacctctctcagttcccgagagcaccatacccctctttcttccccatacttccctctaattacttgattccacaaggcctctctctcatttgcgaaacgccaattccatttacaaagaagagccttactgagattggatagacatttgacccccaaaccccctttctccttacttaagcacactaactcccatattactaatgtggctttcgctccaaattaccacctcttaaaaggaaatccttttgaatttgctctagtctccgtctaactgagcttggcaagcgcaacaaggacataaaataaatgggtaaattcgacaaagtgcttcgaattagagtcgccctccctctcttggatatgtattgtctcttccacatagccaaccttctacggaacagctcttccactccatcccacactgtcactgacttaaacggagcactcaaaggaaggcccaaataagtggacggtagactacccactctacaaccaaaatccaaagcaagatcatcaatattctccaccctacctattggaattagttcactcttttccaagtttattctcaacctcgacatgacctcaaaccacataagtaaccaactaagataggtcaaatgatcttgagaagcttggcagaataccaaggtatcatctacaaacaacaaatgagaaatccgaaccctttcttcactcgtacccttcaccttacaagccgacagaaaacctccatccacaacccttttaagaaaacaactaaacacttccatatcaatcacaaataaataaggcgaaagtggatcgccctgcctcaatccccttcagctttcaaagaaacccgtataggtgctattaaccagcatagagaagcttgcattggaaatgcatcacatgatctacccaatccatttctccctaaaacccattttatgtataactgtgagaaaaaaagaccagtccacattgtcgtatgccttctttatgtcaagtttgcacaaaataccattctcattattcttcaggaccgaatcaatggcttcaatagctatcaacactgcatctaggatttgttttccctccacaaaagccccttgggccttagagaccaccttttttagcctattggctaaaaccttggccaaccacttgtacagacttcccaacaaacttataggcctaaaatcccttaaatctccagccctcgctttttttgggattaaaaccagaaaatttgcatttagacttttaacaaatttaccatattcatagaattcccttaaaaaactcatcacatcatctttcacaaagtcccaagcaaactgccaaaaagccatagagaagccattaggccccggagctttgtccccactacatcctagcagcgcaccaagcacctcctcgttcgtgaacggcacctccaaagcaaaagcatccaaattcttcaaagtctcacactgcagcccggataaaggaggacaccagtcccccgggttggacaacaaagatcgaaaagcattgaccaccccttccttgaattcagtctcctccgaaagctaaacaccattaatcctaattttgtccacattattctttcttctgtgagcattgactatcttgtgaaagaaacccatatttctatcatcctctttcagccacactttcctagatttttgcctccaagttttctcttctagcaaaacccattttttatattcttccctctcttcttttctagcttccaactcttccaaagatagtttgctagtcttctccttagcatcccaaaattccacctgattcagagccaaatccttcctgaattcaacccttccaaaaatatctctattccactccttcaatttaaacttcaagacctttaatttttccgccaaaataaaacttgaagagccactaaagttgtcctcctcccaccaagacttcataatatcattaaaaccctccacttttagccacatattctcaaatctgaaaggggaggggcctcttctcagacccctccatctaaaagaattgggaaatggtcagacacaggtctcgagaggacacactaccttgacccgctaaaatggcagtcccactcatttaccaaaaaatgatttagccttgacaatgattgattgttcacccctccactccaggtaaaaggacccccaagtagagtacacaatgtatataagagacaacaaaaataacatctctttccttggaactcaaccaatctacaaaatactttcatggtcatagaacaatcatctaagtacactttggcccaatccaaaaagatacataatggaaaatttgattgcttgaactaactattttgcatcttcaaataacctatttctttcattccataacgcctaaaataggcacaaaagagcaaccttccaagttttcttctgtttcttccccataaaggaaccatgcttactcaagagatttccttttacaaaggagtgcattacctatgtcactccaaataaaggaaagaccgactcccacatgattctcgcttaagaacggtgaagaagcatgtgatcaaccgattctttttcccttttagaggggtaagggtaatgtctattccttataatccatcaatttcttctgagttgatcaaatgttaaaatccttccccaaacaactttccttacgaagaaatccacctttgttggtattcattggtttcacactatgcttgtggggaatggctcaattcttccttgggctaaggaaatgcaaaaacatttgatagagaacttgccaagcttggtttccttttaacctaatccatccttctcattctttctaattgagctcaattttattttttggaaaaaggtcatttgaataatcttttaagagattatcttgtttttagtttaaagtttattcaatttcaattattatcatccaaatttgaataattgtaaactttgagtctttcaaagttagtagcatagaagtaggaaagaaatttggttagattccaatttgaaccgactttcaatttctatttatttaggccttggttgtatttcatttttttttatcaattttatagaaacatcaatttctcctctaatttcctacagtctatactccttacaagtctttttttgataagataagtattgtattacggggagacgctaaaatagcgactcaaaatgtacagtaaagagaagtaaaactcacccccttataagagaaaacaaaaacctgttcacaaagatatacaaaaaacaacccctcccttaatgtggacccacccaatgtaaaagttccaaaaaagtcgatggaccatcttttgtaaacaatttagtccccaaccaaagtgagttaagaaaagaagttttcaacctttggatggacaacacctcatctttaaaggcaattttattctttgtcttccaaactatccaaaaaatgcaaacgggacccgctcgctctctaaactaacttaaagaaaccgttccaacccaataaggtttccctaaccgaagacaaaaacacccaagacactctaaaaagagtgaaaaacaactcccacactgcccttttcttctcacaatgaagaaggagatggtcaatggattcctcttccgcttgacaaagataacatctatttgctaaggcccgacctctctttttaacttggtccaaggttagaactttgccccaagatgcctcccaatcgaaagtgccaactccatttgcaaaggaggcccttattaagcgtagaaaggctcttaacccccaatcccccttttatcttatcaagacgcactattgcccatcttactaagtgaggtctccggtctagggccccatctcctcacaaaaaatctctctaaatcttctccaaccttaatttgactccccttggcatttgtagaatagacatgaagtaaataggtaagttggatagtgttcttctaatcaaagtaattctccctcccttggagatatattggcgtttccacatagccaatctcttacagaatctctcctccattccatcccaaactgccacagacttgaaaggagcacccaacgacatccctaagtaagtggagggtaaactacccaccttacaaccaagctcggaagctaactcctccacattctcaacatttcccactgggatcagctcatttttatccaaattaacttttaacccttatattgcctcaaaccacataagtgtccagctcaaaaaagtcacttggtcctcgttggccttgcagaaaatcaggatatcatcggcgaacagcaaatgggagattttttccccttctccccctgaccttacaagtcttaatcgatatgctttcttttcttgttgcaatgcccacttcataaccgtactctgataccacttgtcatggacttaggcctttcctaagcacacgtgcgacacttagacaacacaagccacttgttgctaagttagctttccccacatacttagttagctatgctaagtaatgcacacaactcagaagctagggacatgaaggaagcaacacttggagacttttggaagaatggaacttatattgcactaaaatgctttacaaggctagatttctctgaagtgtttggtgccttggctaagaggcaatcctctatttataagcacccaaagaactctctggaaccctcgaaggttccttacatctctagaattctctagaataacctatacaaatcctatgtagtacaagacatctctggaacactttagatttctccacacacttccgttgtcttccattcttgtgtagagatgtgtggacatctctaggtggttccaaaaacttcctactctcttatataagcttaaacgagggtcattttgagcaggttgtgacaatgtgtacctaaagaagtgagcaatattgctagtgatggggtatattgactcgttaaattggttgtgacattggggggctatataccttgtggatgcacacttgcaaagtatgcaagggtcattagagttatgatcattgccatgacctttgagcatcatctgaagaaggttgacctcaagaagaagggtgaccatgagaagaaggctaacgactagagtgttggattgttgatgattggtggattagcaatattggtagaagtaataagatcactttgaaaatcctggttgatgcgaaactccttatttaatagagaaaggaggtaaattggtaggatgctagttttaaccttggttgagattgaagttttgaatggtttgctttcaaaagaaagaccattatgaatataaagaagaaagattcatcaaagaaagtataattgacgaatactagttgatgagtgaagtacttattgacaagctcaaaacctttctttttgaaattgtataagtccatgagcaattggagaatgcatgcatgggagtgtaataggaaagaggtttctagactagtccaaacttgttgaggggtattacatccaatgacttcaggatggactttttggagagggagaatagtagccaatagagaagttgatcttagcattgccaatgagtgaatttgggattcgaggtggagtttagtagcaacttaagagtgcatggaagagatctatcaagttatcaacacaacaaagaagctcaatggtacaaagttgtggcaaaattttgaaaagccataggtgatagatattatgtccaagcttggtaggaatcgtgttggtgtgatattgggaagaatggaaaagatacgttgaacaataatagaggaggaagagttggcattggagcaagagacagatgaagattttagcaactgaataaaatatttactcttatcctgctctaatagcatatatgggtagagcttttcatgtgttttattgaaagtacaacaacaataaatataagaggttaaaccaatcaggtaaaaaacaatcagatagagattgcctctttccaccaatctattggataggatgttatcctatactattcaaattgaccttattaatacattttggcatataaaataatataattaggtttaacttaatcattatctctactagtaatcttccatgtgatccatgaacacaatcctattaatctatttagtggcgacgctcttgattaacttcatgctgttatttcatttagttttggacttaagttttgtgaattattatattcttatgaaacctaatttcatctttgcatttttgtctgctatctagttcttttctaactcatgcatcataatctttcttggatccatattcaatatgaattgtggttggaacgtctacagtttgtcctgcttgatttagagctcgttttttttagtgttctcttggtctaagtgctgggttccaaatatgattccctaacaaactgatttcttttttgaaggaaagaataaaatgtaacaaaaaatgcaaccattttatgattccctaattagaacatgtttctttctccccctcttttttggtaacacacaaagtggaaccattttaagagatttgaagaaatcttaagttttttgaggaaatttattgttagcttgtgactattctacctatattattaaagcttttatgtcattcctttcaaaatcattaatactttcctatacaaactattaaaatttctaatgattaatttaagaagttcttgagtgaaactaattttgtatttggcattgaagtaatgactgtggatacagacagtagtatttcctgacatagacatgaggcatttagctttctgaccaaaatcaaaatatcagggatgaaaatatttctttgtgaattttatatatttaaaaaatggatttattttgtttaactttttttatttattctttttggtacatgggagcaacttagagaagaaaggtttctaaacagcatacattattcactttttctattagtcatgaaataaatccatgtttccattctctatgtgtctcctttttctcagtaatatctgtcttatctcatcaaatcatctcatgactcttttttttcatgacctaagagtttctataatgatcttcctaactcaactatagaacctatttccatacggaaatattttttgataggtatttccatatggacatatgaatgcagggaatctttaacacgatattgtccacagagagaaattccaaaggatttacaagttcttcaaacacttcagcaaattggagagttttcatcaactatgttctaaaaatcttctttcgtgttttagactaatagaactaatttttcaatttgggttgggaagtgcctagagcctgttcgatcagttcaaactgtcagaaaaatggtggtgaaggttaagttgaaaggaggggtagcttttgaagattcagtattgcataaaaatatggcctgttttttatggttggttgacatactgttctagtcccactgacactagtttttttttgcatattttaatatcaaaagttgctcattccttaaaggacatgccattatctgttgagcaatggatacttggtgagattctggataaacaattgaagagaatatggagatgatggtcatttgggtgtttaatatctacattttttttatcatgcttttgacttccattgaaattatttcacattctgttagaacttcctcaagtttattgccctgtttgacatggatttttgacaatgaatataccttccttaagatcttgatgtatttgttaatatcagctgctatgcccttggttgttgtgatgaaaacaatagatcaatttgatgtctttttgtaaaaaatgcagatacacatgtaagttgttaagtatggtattgtgttgtgatgctgaagaccttggcatttgtcatatttcagaaacctgtacagttacagagattctgaagaacagtgctgagaactatgaaatgctgatcatattttgaacttgaattgataaaccatgaatttttagaagagactgttgtcagtagcatcggttcttttagctgattggcttacagaagcagttgtattatcctctgtttaaggacaagcagctaaaattactttttctaatttttttattacaaggataacatatctctctcattttgcagtgacaaatgtgggtttgcttttcattatgatttctaaaatggtttgattaattttcaggtggcattgcacttactatcagaaagagaaaggaa

SEQ ID NO: 12197 - DNA, 266 bp, Vitis vinifera
  Intron number 1 from transcript GSVIVT01004727001 (locus G SVIVG01004727001) derived from phytozome v7.0 (chr-ID chrU n; pos 15562793 to 15563058)
ctactaggtatccttccttgatgtcttgttgaactatttttttcagattgtatttagtagccaatctacatttacttagattcaataatatcagattttaataattataggatatatttgatgaagtggactgttagaaatggtataaaaaatgaaaatcactttttgatgcttctatatgttttcaattctttggtaatgaaaattttacatttccaatttgatgggcagtgtccaaaatttagaaattatcgagccactgcatt

SEQ ID NO: 12198 - DNA, 7495 bp, Vitis vinifera
  Intron number 3 from transcript GSVIVT01015755001 (locus G SVIVG01015755001) derived from phytozome v7.0 (chr-ID chr3 ; pos 16969591 to 16977085 reverse strand)
aggaggtagattctcgatcagtgtttgttggtaatgtgaggctctttctccttatttagtctatggcttaccatttaaatatatgaaacatcattttggtaggatttcctagcttttgtggatttctgttagtggtcgtggttggtattatacagtagtgtctttgatggctattgcctaaacgcaaatttcatgattctctttgtttaatttgatttcaattatcaatgaaagaagttatgtttgttttagattctggaaataccatatcacatgtcatgcttgttttattaatgtaaacttgttatggctcggtgggagtttctccaaatggtggtgtacatgctcatacatgtatgccaatgcctataaatggctttgtgtgaatctagtcatcttatgtagaaatgtacataatacatatataattcaaattattaagagaaaacacttaatatttgcactacattaatgaattatgaaatatatttgtagagtcaattactttaaaaaaaacaaaattacttgaaaacaagaatagtcaattttttaaatgaagaatatgctagcactttcaatttgtgacttgagcaagaagctgttaggatttattcttctagacctttgtatgctaattttgtagtgtttcttttccatttcacacagaactgtgcaagctactacatgtaagaactgcccctcaatgccttcttcttcactcatgaggttttaaattccatggtggcacaggaagacctttgagtactattgacctaagaagtgttttggtaaactttgcagttggaatgccctttcatatatatctagatggtttttatgattgaaacaattttagtttctatttttttaataaaattataaaaatgctcaaaaagagttgcaaactaagtgtctatgatttttataagacatgcaaaaatgagaaaaggaaaagaaagcaaaaatgaaaagttattcttgaatctttatggaagtcatgatctgaaggattgtaacacaatctcaagcttccctgcttgtcaatttagtgccctcagaaatagtttttatatctgaagcttttattgagttagctcaagggcctgccaggatagatgtggttctatcatgagagaactgcatgtcttgcaaaattaagagtgagaagagtaatcttctttaggaggttctggcaactatgtagtggatgaccatgcagcaaaattctctatgtagatcaccttatttgtagataatgggtaatccctgacaatttttcaggtataagttgggaaccacttttttatccattgtctagtagcacgtgagctttggaactttgtctctctatcttcaatgctagttgggttcctcccagagcagtggatgatctcttgagggggaggaggcatactaaacctaaataatccttcaaaggcctggaacatggcttcctttgggctttttcatttgtgtattccagtgcagtggaggctgatctgaccaagttgactttaaagggagctttttgtattctatgtttgctactttcaaaagtggtttgtgatatcttgagagattggtggcatattggtatattaggttaaatatttgtgctttaaaggtttcaaatgtggcttttgttgtgcattttactgagcattacagtttattcatagaatatttgaagatacaaagagttagttgtaacattaaattagcgattataccaccattaaaatttactagttaatttactgtagggatccaaactaagttatcatcaacatttctgagattttcttgagagatgatgaaacatttgaatttattcataattctgaaattatataactgtgactagatgggactaccagatggaaacgctgatccaatatccgttgctctatcctccttgacttacacctataaacctatactcagttgagcagagtggacacttatgtcaaactgtcaaactattgaggatgtgtctgctgttcattagttgtgtgtgtattttacctgaagggaaatctttgttgtttagatctgcaggttttcttctttgtctccttgcagaaaggggaagtagaaggatctcaatccataactgaattcctattagtctcttaaaacttcatcagagataaatgtctagtaaggaagaagttctttcttgtttggggagaacacaatttgttcaactatggtatgtacttcttagaaaaaggagggatggggatggcaccatgaagctccattgctgtcttgacttgcacatatatacattgtattagcggcctatttcttttgtttcctgcctgggtttcctgtttgttctccctttagctatttcttaaccattgcattagtttttggttgctaagaattctattaagtgagatgtcggaaatattattattacatgccttctatcctgacaatcttaaactcataaattctatgtgactgatctaacaagactgtgttaacatattcatattcttgtaggccgtgaggtaaagctcaagtggcaaggattgggaatgaggattgggaggttcctggtttgattgcatgtacaataaaagaaaaagtcccctatcaaagcaatatgttgttattctggttactttctgggttttaagatgttaaaatcaagctttactaggatagtgtttgtggtaatttagtgtgggtggagatgagttatggaggaaggtcatcattgggcagtttggttaggtgggatactttggatggctattagaaaagggtgggatgctttttgtaccttgtgtacaacaggttttaaactaacttctggttgacgataggtatgggaagtcccctctcatagatcattttcttaatctattctccattgtggtgaatccagaagctaggatggcagattgttggagtatggtgagcagtcaaggtcactggaatctgagattcattgggagccttcataattcggagttggagatggtggtgttgtattgtatttaagatgtgattgtgcttcagaagagtgagaataagcttgtgggaaattatttagtgattttgcttcacaggttataagttgttgattctgaaattgaaaattgaggttgcagggtgtgggattggccattgagtcggagacccttgctttgatagagggtttaactcattgagcttcaacaaccttatgatggggggattttgcatggcaatagcatgcatatctcaagtgaaatgtgggccacagaaattagattcatggtcggtgcaattctattgacctggcaagagctttgagtcgtccttccctttggacccataaatcagtcaatcaattgtgaatcttttgaccaagtaatgagcttctcatttatagccatttctgggggaaattttgccacattgagtttgtagtttttcttttcctgtgcttagctaatccttatcctcgtcttgtttcaccattcatccttctagaggataacttgccttcttgtattgtcatattcaaaatttctatgatggtttatttcttataaaaatagataaatggatagataattaaataaataaagttggtttctttgttttgggagaaaattctcactttggatttgcttagaaaggataggattctagtcagttggtgctgtttatgcacaatggatgagaatcaaccaattatttgctcaagctgtgggatttcttagactgtatgggtccctattcttttcgttttttggtgtttattggatttagcattacgttaatgaaggttattttggccagttaagaaggcagttgttttttccaaagtggaagggaataatatggaatgtgacattatttattttggtgttcatagcagtggaactgtataatcttctattgttggatgcagccagtgttgcaattaaaaaatagttctatgaactctctgtttgtgtgctctagtagatctgtagtgaatgaaagactatactttatagatttgattatgtgttgtgctgcacataaggcttggatacccttgttctctcctatttgttggttataccttctttgtaccttgacttcatctcccttttgttaggcacctattaatttaaagtctagtttacatatcaggggaaggaagaaaaaagagaaagggcaccattcattttttatttttctttttcttttccttttcctttttaatgctgtccttgtacgtgtacagaatgtcaacttgacagctgagatcttgtccttggattattgcatttatgggtttttaatgtgcaggggtgtttctcagttctagaattcagcttcaacactaccttctactacagtcagaggatcatgcttcattctaggagttctgtgattaaatactgctagattggttataaataattctgatataagcataaaaataattgaaagtaataggttattcatgaaatacaagaagagaaaggagaaagactaaaaaaggaacaaaagaaactaagaaatactcctcacacctaaaaagggattgaaaggacagaagagaactataaggttttaagatgagaaaaagaagaaaagggaaataactgggcaaatcagtttcttcatgcacaataaatctatgtgggaaacaagagccattaatgagcgtatgtactgcaatttccttaaaccatcctcattaatgcacaatcaccaatttccttaaaaaggtaagcattaccaagagccattaatggttgctagttcctgatgatcagaaccttctggtaacccgagccatccctttgttgtgcttcaatttccttgttcctaaacatacatgaatataaacacatattagtcatatgcatagaacaggacacttttgaaatatttactaaaaaaatacatatgttctagtatcatatttatctcaacactgagtttttgaatctcttgttccaataccaaattcaaaaaaaagatgatgcaaaactgcacatgcaaaaattccttttccaaagagtaccaacatctcagccccttcacacaattaaacacattttaatttgtgaatgaaaatcacatattgcaaaccctaagaagttcttctttcatgttgctgttcctccgtgttgaagaaagcagccatgccattgaagaagctcttaaggaccaattccctgtgtcagcagaatcagagctaagggaggagtgcacctgtgacaaaggttcattagttgtactgagcttttaattggttgtatgagattttaaaaaaatgggtgagcaaattgatggaaaaaaaaaaagaaaagaaaaagaaactaaaactaggcaacaaatctacactacattgatatatgatagacattagcaattcctataactctattttgggatattattgttatttgggcaggccattcttattacattttttgtttaatttttattactggtgggtgcggatattatattctcattatttttcttatgttatcttttgatggtgggatgttcttccaacttatctttcccatttcccaacttttaatagtagcagaatgagtgtatgttttgtgtggtgaagcagtgctggatgaagaacatgttttcaggattcaagatatgaggtatttctagttaagctggcctcgatgaatgatgctctagcaacattatctcttgcagtggattggggtgggtgaagctttgtgatggagataagcccaaagctctcactgccagtatcatctagagagagataattgggtctagtgcttgctttatttggtttcttagacaaaaagatggatgctttagaaagggaaaacataaaatctttgaagaattccatatcattacatcacaatgcttaggctgttatgttaaactatccatagtatttcctcagagagagtaacttatcatcttgttcatcttcatcttagattaacaaaggatgttttctttttcttcttttcttttgatttcttcttcttcttcttcttcttcttcttcttcttcttctttatttatttattttaatttttttattttttgtttatcttgctaataagagagatggtgtattctggaggttaaggggttagcttggtccccatccctgaggaaagtgcatatggttggaaagcctctttgctgaagaggagagttaagaggctgtttttcagttcaacagggaggatgctccaggttcaggcagtttttccattgcatttttttttttcaggattattggcctattttgagagaggatttactcctctttttttcttttttcgttttttttttaatatttcttcagtggttattgccctagtacctaagacaggcattcactatgtgcattgcaccaaccttgaaccatcgactgtgtgaccagcctttataagattatcaatgaaattctttctaaatgggtttagaaaattctttaggggattatatcctttttcaatgtacttttatgaaaggtaagacgattctgggtgcagctctaacattgaatgagttggtggatgaaaaattgcattctgtgaagaaggagatgatgtttaaagttgatttcaagaaagcggacaatcatgttaattgggtcttttgggtccatgttcttgtataggagtttgaatctaaatacagggcttggatttggggtgtgtttttcctccattggtttcactattcttgtgaatgagaaagcagggagcttggttgtggcctctcatggtctctctctcaatctatctactattttggtggatgttctaagcagctagagaaggtcttcattaagggatttgaggtgggtaggaatttgatcatcattgcccttctccaattggctgatgatacaatcttcttcgctagagccaaggttgataggatttctaataacaaacactttctcttaagtctttggtcttttaatgggtcttaaattctgcttaacttaaacaaaagtatcctttctctcatcagtgtcactcaagtacaactaacttggcttcttctataggttagacaaacgattggcttttgtattcaaagctaagaggtgatacccagatcttctagaggtactgccaagacatttaggatgtttagcagctcagaagcctctattcctttagggtgtctataaaacttaactttgatagttatacattggggaattcgggtcatatggttattaggggtgttattggagatcacactggtgtggttactgccttgttctaaaaactgtcaattctaggtatctttatatgctgaggttttagtcttgttggagagcttgtatgagctagacctcttactgttcaaaccggcttcagttgtaaaaattttgatttgacctgtttcgatctttattaattttgattttggttggctaaagttgtttcttggcaacaaccctggaacttgatttgcaggtggattattcttgtacccctgaagaagtgcagca

SEQ ID NO: 12199 - DNA, 2871 bp, Vitis vinifera
  Intron number 1 from transcript GSVIVT01003307001 (locus G SVIVG01003307001) derived from phytozome v7.0 (chr-ID chrU n; pos 8836139 to 8839009)
aaggggcccacataaacttgaaggtcaagggccaggtatgtttctttctgatttatagggtttgattttggcttctgagtgttctgtttggttgattagaaaacgccggaacatgattgggacaactgtagttttggagcgggtttacagcgtctcaaatctttttctccttcggtttcttggcaatcaaacagacactagaatttgagaaataagttcttgcttggttatgattaggagtttaattaatttccactgtttttgtggcttgagttaaagctattcgctacaaatttaagcttttttttaaataatagaattgctttgtcaggaggttgatcgcttttggtttatagcctggattctactccattgtgcttgaatcagttagtgaattcataatccctgtttccatagttctaaattttgactactttaagtgttctcaatatatgcttgcatttcaaattgttgtatagatgatagaattattgcaatagtgtcttctctcattgaatttcagtacttgttttacttgatttttttcctgaaaattaaaatggacttttcaaatcctaatgttatttctcttttgtatctatttgatttttatttattacatgtcattatcatcgaagtttattctttccatgtctgttattacaatgcaattttatatttacttggttgaatctttattctcgaaatgctttggctgtgtttggttcctgaaaaaattgaggaagggaaagaaaatgggtattagagaggaaagtaggaggaaaggagtgaagaagaaaaaaattactaaaaaagggaagagagaaaaatatatttgcctagtaagaaaactcagaaaaatatgattgtgtctaaaaaaaggaaaaaaaaaatagtcataatacattttagattagatttggttttgaaaatttatagatccgaatactgagagagtgaataataagtagttttttttttttagcccaaaattttatttttaaaatttctctttgagagttaaagatgaagtagagaaatcaattgcacaagacaagaattttatatgaaaaaccattcacaaagtctcccaaagaacagcctccctctccttgcttcacactctagtccaattctaaaacctagatatgattgcttgatctgattgatcttcacctttgaatgacctcttttttctttccttccacaaatttcaaaccaggcacaaaatagcggccctccaagcattcttcctctacttcccaacaaaagaaccgtcatgttaaacctagtattagagttgtttctcctatgaacttgaacagcacttaatatgatgtgtacatagtttcaaaaggtgcactttaggctcaaggcgtaaccactccctagtcattgtgccttgcttgctaagacatgcaccttgttgaagaggtgtgcattgtcttctatacttttcatttttaaacacttttattcttgaaatttttaattgtatattgaaatttttataatttcattaatttttgtgttgaatgcttcttttaaatgtttggaatcttaaaattttaattgactggattggattttggattatattttataaaattgatatgcatactaggtcaagttacacttcactcaagcacgcgccttgtgttgcgccttgcgacttgtgttgcgtcttgcgccttgcgcctaagctataggatacttttgcaccttaggtgcgccttgcgctttttaaaactatggatgtgtaaattttcatgtggggagcctagttttatattttaaatggtgagtttgaaaatgctaaattttaatgcatgatatactttctctgctgcatcttgtatatatttggtggcggatcaacctcgactcactccttaaaactggatccttacccatgtgtttgaaccatgtacactttcagctggagtttatcaatgagttgggtagattgatttttgattgtacattgcttttattataatttcaattataggatgcagtgttactgtggctgactctatctggatgccatggatctattcttatgaaaaaaaaagagtattgaggatcagagctttttcatgtcggacctattattattacaaaatatggttagattaggtcctgctctatatggataccttttgtttaatgttgagggagcagttcatttagaaatcagatcattactcaaatgttgcttgtgcatgtcctccttccacatgatataacaatattatgatactttccctcgtaattttgttaatttcagctatttctatcttcttgcaaatgcacccatttttattctatttcccctttatggcacatggctggagcatccatcttaattgtactcattttattttaatttatttaaatttattttgggaagttgcattatcaaacttaacgcttgattaatatattaaagttttgaagcatcagtatcattgttagaatctgtttgcaatttgtttttatttttgtttttgcttttgttttccttttaaagaaacgggttgaaaaaatctccttgttgtgtcattcttggcagtattttgagaagtcttctcacaatttaatgtggattaataatctaggatttctcattttgtttgtagtgttagaataatgaccatctctttgaaaacattcaatatctggtaatgctccttacttgaatctgtgaaaatgcaagtttcttgtatgattgaaaaattgaggcttttggaagttcagtgttattttatatggatagttctgctcttgttttcttttcaacttccaccattcccatccttgtaccccacaagtgaatttttttaaaatgttcttttctggttgtgtagg

SEQ ID NO: 12200 - DNA, 4618 bp, Vitis vinifera
  Intron number 5 from transcript GSVIVT01030194001 (locus G SVIVG01030194001) derived from phytozome v7.0 (chr-ID chr8 ; pos 10656065 to 10660682)
ctgctgcatttaaggtgcaaagaaactatatctgatctttccactattggcattctgttattatgatgtatttgctgtcttgttgatttgtgataatttagatgtcactttatctaacttgaggacataggaaactataatttaaaggttaccacatataatataagtctgagctacctaaacaagttatagattggatagttcaactaaattaattaaaataatgaatacatatatctacaaaataaaaacaaatgtaccactggaaatttttagtctgagtattgttatgttatttgttgataggttgtatagtgcacatgtaggacattaggagctaccatctaatggttttgtcttgacaatcttgcaataatcaaggattgcatgaattttttatgtttgcaggctactttccagattatctcctaccacaccaaatgaatataagggtttgtttggaacaatttcaaaaacagcttttaaaaaactgtttttaagagttgttctcaaaaatggttttcaattatttttgagaacagaattctgtccaggaacttaaatatgaaaaaaacaaaaaaaagtttcctgggctcattctcgatcaaggtacaacatacttatgtacaatacaaaagtttctaaaatattcttcacattttcaattattgcttggaacactctacacaaaacaactgaaaacacctaaaatgtgttcttaaaaccaattttcagaacaaatgcttagaaaactgttttgtatcaaaggtttgccaaactgtgttttctaagttaaaaaagcgctcttttttttttctttttctttaaagaacaaaaaaccattttcaagaacaattaccaaacaaggcctaaaactctattttcttttgttgtttattccacaaaaaccttagtattttgatgttcctataatttggcatcttccaagggactgttgttcagaggctgtttatagtagatgattcccttaccttggttaaggacttccagtttgccaagttttatgatagaagccattatgcaagaaggcaatcatggtagaccaagcattgttagccatgtaaagatttagcatattataatttctttgataggtgaataggaaaaaatgaatttaaaggtgcctaaaaaaaagggtgcaaccctaaccctaatgcttaggaggtatataggacacaccaagtccaaaaaaaaaaaaaaaaaaaaaaggtcccaaaacagcacctatggctacttcatgcacaaactatctacaagatctagttagaagttgttgatttctaccccaaagtagctcggtaaagcaaggaaagactaggagtctttaaccactaaaaatgttcactcaaaacattaaaaaaatcttttgttcttttctttcaaaatagtcccaaaatagacataaaggggtcttcttccaaaccaacttcctcctttgacccataaatttactgtgacatccattaagggtataacaaactttccttggaaggatccaggtggctcaaataaagaaagcaccaaggtctaaaaacttgatcatgatggagtagaacataactcgtcgactcttcccattgcatgccaagataacatctattcaactcattccaactttttgcccttgtatgatcactcatgagaatttttccccaatcttcttcctaaacaaagaagataaccttggaaataccttagaagcccaaatttcagttgttggaaagttcaaagcaacctcaaaacacagagacttgtagtatggcttgacagggaatatgccttcttggatgccttatgcacaaaacttattggtgaagcccaaatttctgaagttggaaagttcaaagcaatatcaaaacacagagacttgtggcatgacataattgagaatatgccttcttggatgccttttgcacaaactcatcagtagagttgacccgaatctacaccaggttcaaaaggcacaaaaactcttctgccacattcgactctcaatcaaagaagcttctcctaaaccttggattccagcaggctgttatccctgctcctgtttctgaataatcctccacctaagcatccctatgaaccacaaacgcaaggaaaaaaaaaaggctcaaatcctccaccacgccactcatctgtccaaaattttgttgtttgaccatttgatgtaagatctttgtttgttgtataatgagatgagagatcaaatatgatagaagaaaggaaagaaagaagagatggatccttggtaatcacgctaaggttccttggcaatcacatctaagggaaacaatcacacctttaagaagctaaatagtcacaaaattgttaataaatctagtcattaaaatggaagacacataggtttatataagactcatggaactccttttcctaataagactaaggctctttttcatagttggaatataactcagtttctaaagcaaattagaactaaaactaatagaaattaactaggaaataaacttctaaaaccaattctacaaaaacaggctccaactaaaactaagaaatgctaaagtacttacttatttttgttgaatattattccctatgatcattataaatggagatgttacttctcacttgaaaatcttcctaacagacctgacctctttgtatcactttctagaggttgcaatcataagcctctccatcaaccttggagcaccacttcccagccatttcaccatacttccccactatgactctactccagaggcaatacattcacaagaaatctccataaccatttccaaggcaatgctttattcaacattgagagccctttgaaccctagtcctcctttgttcttctcggaagacattgtgccttaatcgacttgatgaaacttaccattgaaaggctccctgccttaggttgaaacccacacgagattgcaatcaagaaaaacccacaaaagtcacacgagatttacgaggctcaattccctaacttgttttttatttcttctctaaataacaatacaagacatagctcagcaagatcccacaatttctttagtgagttcatgctctctcatgctatgttttgagaagactctccctccctaatatacctttgtatattctctatctcaagataatttcaaaaggcattttcggtcttccttttcataggtgtgacaccaaccactccttatgtgattaggaggaagcaatcgtagtccttaaactacaattaaaattagaatctgaactcttattcaaactcaaactataatcacaatttgaatccaactcttagctttcaaatgtccttggctcattcctcctcatccatttgaaattcctcatgttattgcctcttgtatcaatccacgtaccaacccttcaagttcttggtttgctgtgcaacacgtctttgttggactttccccaataccaagacgtctctttggtgttttgcctcaagtgtgcttgctcttgtgccttgagttagtctattcatgtgcttgaattacccatgcatctgattagctctctaaagcagcctatcacatgcatcttgatgcaacccatgcgcatgctaagccctctcttagcttgcacatctagaaacttgccttagtgccaatccttcccctggttcatgttttgttgctccttgagcgtattaaacatgctcatatgtgttcccgtatctggatcacgtccatttcgaggcaacctgctcttgcatccgtcttgttgctgctatggtaccttgccatgcccaagccctcttcttggtgcaacaaccaatcatgacattgcacgcatgattcctcatctccatacacaaggtattgtgcccttgtgccaagtcgtctcattgcacaaggcattgcacccttgtgccattgtcaggagggggagattacatcgcaccatgtgccatacaaggccatggcttgcacgccaccacatgtcatgtagccaatgatgctaacaaggcttgccccatgtgccttgctcatgtttgaggccttacactgaagcccttaagtgtggccacgcccatgccaccttacctccctcaagtcactaaagttcccctcccccctttcttcttaaagagcattttaggccattttggaggagacatcatccatacttgagaaggcataatgaattttaattaagtcatgaatatttaaacatttggcttcaagtagagtctcccttttgaagtttcctctttaaaggaaaaataccatcatgccatgccatgtgctgcccttcgctagcctccagctcacattgccttggttatcggccactcatggagccagggtgccgctccatgaggcattggtgccacatacttcaagtcaaagtgttgcagctgggaggcattttatttttttcttattatttttagcttacattctaggaaaatatgtttatatttatgtggagttctagatttgcttgaaatatcccaatcctttcattaaatgtaaaattctattgtgtttggaaccaatattgttttactactaatcagtatagtgatgttgtctgagaatgcagcaagagcgccctagtcttccagaagacatatcccc

SEQ ID NO: 12201 - DNA, 425 bp, Vitis vinifera
  Intron number 2 from transcript GSVIVT01031203001 (locus G SVIVG01031203001) derived from phytozome v7.0 (chr-ID chr1 4; pos 1203560 to 1203984)
cgcccctgtggagaggtgggccagctgggcctaaggtgaataaccaccaccataatccaattgacgatgcttctttgttcatcatttcttgatctgggttttcaactttgatttctgggcctctgtttttcagtgattttgatctggttttccggttttggttctgtagttgtgttttcgttatttcatattgatttcatactcccttaatgtttgttttgttcttttgtattgattcatgcttccttgatctgggtttccagttctgatttctgggttgtgttttttgtatctatttcatgcttccttgatctgtgtttctgattttgatttctggattgtgggttttttcaatcacttaattgtaattcagtgattctgtgatcttgacttggggtggtttttcctttctcagtcactctgca

SEQ ID NO: 12202 - DNA, 5677 bp, Vitis vinifera
  Intron number 4 from transcript GSVIVT01014324001 (locus G SVIVG01014324001) derived from phytozome v7.0 (chr-ID chr1 9; pos 2652998 to 2658674 reverse strand)
cccacaatattgttaaatctttgcatataagacatgtgacatgttagcaacagataataataagtcatgaatctctatgtccatgagggcattatagagttttggttcaaatattatctgaaatggcatataaatatttttaacattcttttttaattagattaaaaatgcccatctccaaatttaaaataaaagaaaataaattaattaattaattgagtgtgactgtgtttgattttttttggaatcatcgaatttgctgctatttgctccacccaaataacaggtgatatatatttaacaaaaaaaaaatattattatcttgaaatttctatacttcaatattctttttttttgtttgttttttaaaggattaagctcatttgtgatcttttatacaattattttttgatattataacacatgtagcatgagcttccaccttgtccatctttaatctagctatttctatatatatatatatatatatattatatatttttttctatgaatccaaacaacctagagaaaccagggcttccctataaatacattgagttctacttccctataaacgtttttaacataaaaaataaaaaaaaaacactttaaccgcgattcgaccattgatctaaccagtgaaccgtgaactagtaactttttcagtttaatgaccggttcaattctaaaaacattgcttagacctacacaaacactaatgtctctcctcacacttattcttaatcttatccacgtcatggatgtcctgtataaggacaaagacaagtacacacatgttgaaaacattacaaaagatctcattgcatccatactcatagaccctttgcccatataattgtggctttggctttacgatgtttcctattgcatttgagatttaattgggttaggacagtaagaatgcaatgcactgttaccatattgttgtgaaataataatagcttccttttttttggttggattatatacaaatgttcaaaaaaaaaaaaaaaaaaaaactcatcttctccccatcttagaaacatcaaatcacaaaagaaaccaagctagctaaatcttaatagggtttggttgatatataaaaacttgatcaatcacgttcatgtctcattattttgtatcaaattcggtcctactactttatatcttggtcccatcatctgttttttatatcattcttttacatctttattatttatattatcatacactgatgtaaattttattatatgtactttcgacaaccaagatgaaaaatccgacaaatacttctttgaaaagggaaacttttgccaactaattagggagagagcccacaagccaactaaaatctaaaatagtaggccatggtatggaaattaggatgtggcaccaaccatgccaagcaatctgcataagatttcttccctccaaacaatccaatttatataagattttattccctcataacaatattccaatttatgtcttcctcaaaaatcgaaagaaaaaaatagaagaatactactacaaaccacacaatgaaaatgaagatatagcatacgacatctaatgtgaagtttgatgaggatgataaagaaacagctcggtacatagggtttgtttttaaaatttgaattatttttaaaattttattattttataattatttttatatgagcatgtgaaaatatgttttttttttcaaaaaataatatattaactatatttgagcgcaatacaacaaatataaaatgcttaagaattaacataaaattggcttttatttatgttttttatttgttttgaatagggtttgtttttcaaaagaaactttatgtttccaattgtattttatagattactgtaaactaattaatatttttatgaaaaataagttaaaaataatttggaactaataactttttccaaaatgttctgaaataagacttttaaaatgttgatcctaattatttttataccacaaactaaattaaaaagtaagtttgataatgattttaaaaagtgtttttaacttaaaaaaaaaaattaattaagtatttgataaattaaatatttttaaaaaaatgtttttaacataaaaaaaaaaaacaaaaaaaaaaaaaacactttaagtaattcttttaaaaatattttctatcaatgcctactttcttcaactctaaaagttatttttaaaagttttaaaaatatttttaaaattttaccaaatatataattttttttttcaaagacattttttatatcaaaagtacgttgtataataattatcaaacaaattcttaggaactcttaatataaatttgataatataatttttcatgttttctctttacatttaattgttgcaaaactcaatagatcaacatcgatcatcacactaggcccccaacaaaaatcagttctaaaaatgtatattctagttcaatttttattaatttaaaatattgataatccattaattgggtccacatattttattttgcctcatcttaaccccaacaaatttaaagtaaaagaaaataaataaattaattaattgagtgtgactatgtttgatttttttggaatcctcgaatttgctgctttttgctccacccaaataacaggtgatatatatttaacaaaaaaaatattattatcttgaaatttctatacttcaatattattattattttttaaaaaaaggattaagctcatttgtgatcttttatacaatcattttttgatattataacacgtgtagcatgagcttccaccttgtccatctttaatctagctatttccatatatatatatatattttttctatgaatccaaacagcctagagaaaccagggcttccctataaatatgagttatacttccacataccacccacaagggcataagcagcaacgacactttcttaaggttcttctttaggcaaagtatggcttctttctcactatcaatcacccagagggctgatcctaagctggcttgcaacactgcaaactttcttcctaacttctgggttactgtttcctcacccacaccctgatgatacggtaaatattaagaattctaaaaaaatattatttgaaaataagtgaaaaaaaaaaaaactaaaagatgttatttgaaaacatcttattttctattctaaataacataaaataaaaaataatttttaattgtccaacccatttttaatgtttttttgttatgaagaacaaaaaattgttctagactgtcatttccaaacaaactcataacttctcacttgtaaaaaagagtttttttactgctaaatcccatcctacaaaaattccgaatcacaattttggtggtttttagcaaatgtagagtataagtttaccttgttaacatgctcaacttcaatccacaatattttcacaattttgacagttttatcattattagatttatcataaaagaaaaaaaaatccttggtaagccaatgtccacaaaaggaaataaaaaatgaatatcctaaaatctcccttacttcaataggatgagagtgcatcaatgttcgtcttatcttatcctcatttaaatgtatgaacatcattcatttggtcccccacaatactgttaaatctttgcatataagacatgtgacatgttagcgatagataataataagtcatgaatctctatgtccatgagggcattatagagttttggttcaaatattatctgaaatggcatataaatatttttaacattcttttttaattagattaaaaatgcccatctccaaatttaaagtaaaagaaaataaattaattaattaattgagtgtgactgtgtttgatttttttggaatcatcgaatttgctgctatttgctccacccaaataacaggtgatatatatttaacaaaaaaaaatattattatcttgaaatttctatacttcaatattctttttttttgtttgtttttttaaaggattaagctcatttgtgatcttttatacaattattttttgatattataacacatgtagcatgagcttccaccttgtccatctttaatctagctatttctatatatatatatatatatatatatatatatatatatttttttttctatgaatccaaacagcctagagaaaccagggcttccctataaatacattgagttctacttccacataccacccgcaagggcataagcagcaacgacactttcttaagtttcttctttaggcaaagcatggcttctttctcactatcaatcacccagagggctgatccgaagctggctcgcaacactgcaaactttcttcctaacttctggggtgactgtttcctcacctacaccccccatgatacggtaaatattaagagttctaaaaaaatattatttgaaaataagtaaaaataataaaaaacaataaaaagatgttatttgaaaatatcatattttttattctaaataacataaaacaaaaaacaatttttaattgtccaacatatttttttttgttttttgttataaaaaacaaaaaattgttctaaattatcattcccaaacaatctcctaacttcttacttgtaaaaaagagttttttattgttaaatcccatcctacaaaaattccgaatcacaattttggtggtttttagcaaatgtagagtataagtttaccttgttaacatgctcgacttcaatccacaatattttcacaattttgacagttttataattattggctttataataaaataaaaaataaaaaaatccttggaaagccaatgtccacaaaaggtgataaaaatcgaatatcctaaataaataatcacaaaattattatactaaaatctcctttacttcaataggatgagagtgcatcaatgttgatcatcttatcttatcctcaattcaaatgtatgaacatcaggtcccccacaatattgttaaatcttcgcatattctttgcatatgaaatatgtgacatgttaccgacaaataataatgtcttgaatgatgtccatgagggtattattgaaatcgcatataaatatttttaacattctttttcaattagattaaaaatacccatctccaattttttgtttatacatttttgagagagtaattaaaatcgttttattgaaagttctcttcttgtacaaatccaatgtttaacaaaaaaatttaatatcacttttaaaaatgttgaaaatcactttaattaaaagaccaaaagcatttttttattttttttttccaaaaatcacttcagataattgttttggttatatttggctccagaaaatattaagaaaagaaaaaaaaacggaaaggaaatgattttctcaaaactaagaagcctagctgcccggcctataaatgcatgagttccacttccacataccaccgacaagggcataagaagcaacgacactttcttaggcttcttctctggccaaagtatgtcttctttcccactatcaatcacccagaaggctgatcctaagctggctcgcaacactgcaaactttgttcccaacttctggggtgactgtttcctcacctacattcctgatgatacggtaaatacttgaagttctaaaaaaaaattattttttgtagtattagatgtttatgttgtttatataatttttggtccaggtaacac

SEQ ID NO: 12203 - DNA, 3186 bp, Vitis vinifera
  Intron number 9 from transcript GSVIVT01008262001 (locus G SVIVG01008262001) derived from phytozome v7.0 (chr-ID chr1 7; pos 3848882 to 3852067 reverse strand)
tggttgttcggtgggaaaactcaagcctttattttgtggattttctgattgacgtcggatattgctataaaaattcaacggggatcacaattccacgctcaaaatattgtgaggaaattaaaatttcaggtgcctcaaaaggttctcttttaggatttcaaattgcgtttgttaatttcccgaaaagcttcaataaaatgggtggactctttcattgttacccaagtctagcctcatggagttgtgggagccagtgaatccaaagaatgggaatgtatttaaaatgaatgggcaacgggtgaagccatacttggagggcatgagggagaaaggagaggaatagttgatatcttttcatcctaccctcttactattttttaatgtaatgatttatttcacgagaatggcatatggtgggttgatttgaggatgtgcatcatagtgctatttacttttgtttttatggatttttgtcgtcccgtacttatcacaattcaagtgtaagtcattgctctactttgctaacactcttttctctcaaaacctttcaagaatcaaacttggaaattcttagtagaaaagtttggtaatgcacaatcaattaatctcaatacgatgttaagataacattaaagaatatgaggtacccttccaatagtactcccatctcttaaaaatattcaaaaatcaaacttgaaaatcttttcaataaaaaataaaaaataaaaaaccttgtgcatgatctactagtcctagcatggtattgaggtgtactactaaggagtatgggatggtatatcatggatacgatgaaaaaggattaaagatgttaactagtataatactcatgagggtagatgcgtttggtcaagataaaattatgtattattttattatatgcatctaataaatttattttatgattgtttcatccataatttttaataaatgtaaaatttttaggaggtttcgtaaaatagttttttcatatatatatattatattctttgaattatcttatgtatctccttcggagttgagtcgcgttttatgtcttttcttctactaagacatatatgaaagtgacaagcactaattctcagccataaaattcaatatcgagtcctgtattcttgtactaagagacatatatggaggtgaccagcattcattttcaaccataaaagtcaataccttcacaccaaacgtggacgtacgagattgcaccatattttcaaacgatatgtgaatgacactgcaccacatgtcactcaactactaacctttaagccacatccgtgcatgagggaggaaatcgcgtgaatatgaaggtgaggtcaatcattctaggagttacaaggtttccacactggaaatcgcgtgaatatgaaggtggggtcaatcagtctagtagttagaaggtttccacacttgagggacaatgatgtgggaaacaatcccattgatttcggagctggtagtgcagcagatatcaaacgcaatgatagtggaagctttactaccaaggaactgcaccctcaactaacaatgtcaattctctccaattatgtagttgccggtggactgcatgaaatattcttgtgcttaaggggaatattttgctatgaaacttttgcatacctgaaaataatcttgtcatggtttttttttttttcttttttttttcccacaaaataattttgcttgaaactgatctctattggtaattttgctagcttgaagtcgctatgaaaaagtttttatgctaaaaactcttttaccataatatatccttttatagcaataatatttattggaaggactaaaacttgtgtcagcaataatcaacgttgaagacccatctttcgtttgaaaccaaatcatcctcctttgaatcgaaatccatgcattttccatccttgaataacaacctcataacctcatttgggtcaaacaagcaagcaaacatgcgaatcacgtaggggcccccggttgagggattttggatttgaaaaaagtttctatttctaataacgaaaataatggacattaaattggtagcattttataaaataaaaaatattgcataaatcacttttatttaactttcattttctaaaaaccttagagaaaaaaaaatgtaaaaattacatcggtccatgtaaacaatatcaaacttgctttacttactctataaagataatgtccactcatataagatataaaagtttttaaaaatatgatttgaaaacacttttaaaaaaacattttaaaacaaattttttaaaaaaaatatttgagtaaaatgtttgcgggatgtatcctttaaattataaaatagttttctaatttagaaaaatattttattaggacaattattttataaaatatatttcaattcttctcaagtgttttttgtaaagcatgggtgagatacatgattgaaaaatggagaatagtctaacacatctattttatagagacgtgtacgatgtttaaaaataaatttaaaaaatggattttcaaatgtaaattctgaaacaaaattttatttttaaaaataattaaaaaatatttttgaaaaaccaaatttctcctctatgctaggaaattaaagacctactttggcagatgcttttgaaaagaaaaaagaaaaatacgatcttagatttataaaatccaaatttaatatattccatgcatatgctatttttgacttaaatgggtatcaacacgacacgagagtataggggaggattcaatgttttttttcaaatgtatttacaaatacatttttcctatttgtttcctagttggtgacgcagcctccaactaaactaagacaaggaatagctaataccttattttcgaaaggtcattgcttgccacgactttgcgaagacggggctttcgaagactgcctaaaaagacggtaggggtatatagtctttttatataaaaacaaaattccaaaaatgtgtttggtgcggccacgataattcttgccatatgtttcagtctgcacctccaccacacgatacatggccttcgtaccacttgcgatagtacaataaatacatatccatggtaatcttccattatcacattcctatcccaagttcgtttcccatttcctccaatggctctcttcaccgttcctattctcctagtcattcttggagcctt

SEQ ID NO: 12204 - DNA, 3609 bp, Vitis vinifera
  Intron number 1 from transcript GSVIVT01003278001 (locus G SVIVG01003278001) derived from phytozome v7.0 (chr-ID chr7 ; pos 14033794 to 14037402 reverse strand)
tgtagccagagcaacaagggcgcttcatttttctggtgggtctatttctgtgaaatggcatttcaaaagttattatcataatgtaccactatagttggtggcaaagaggatgtgtattcatgtgtaatacggtaatggcttgtcaaatatttggaatggcttttgagaatgtttaggggaaaagcaaaaagatgggaaaatggattttgcctattttatgaatgattcttctttcaaattcttgttactagctatatacttgttttcagacttccctttttagtatcaattctttggggacaaataagaatgattgtcattctaggagggactaaaatattgtctatgctttatgtaatggtctaagcttgtgtccatggtgaagttgtcataccattcacttgcttatggtgtttcttggaagaaatggtggtatcattggaaaaccaaggcccgtataaaattaaagcctttgcttaatagatactaatgatggagtcgatgctaatttgctccatagcagaagacccctggatagctaccagcccaaacatgtgcatagaagtggagagataaccagatatttatttctttacggcccacaatcttaagtttagtggacttgtttagactcgcagggattgcttgtgtggctgttgaggagatttctggtagccctttagtggttttggtaatatagtcctttggaggtgtgcctctgtagctactatttggtttatttggctggaaaggaatgctaaaatcatgaagaattgttcactgaatgattcctgggaaagagtacaatttttctaactactttgggtttcaatttctaaggaatttattctgctaatcatcattatgagggattggggacctacttgtacggttgataaaggtaaaagaaggaatactcttcactgaattactcctcatctttcaagtttctccagcctaattgtgatggtttttatgggtaacttggaccagaagggaatttaaggatcaatttggaaccattggggtatccttttttgagcttatttcaaggctgctatttggggcttgctatagaggcagctactttagcatttgtgaagggtttgaaagagatttctttgaatgccacctgttgggttttatttgacaacagaagcatgttggtcaaacttcagaggaatataattcacataatttgctttaaatgagatagtgcttttgagttaaggatttgtatgagctacatagccaggttttataataataatttgactgattcagcaacatgtgtgaaatcaagttgtttaagtaggagattaagcacagtttgttcctctattgtggatctttagatattaaaggaaatattggtgaggccatcttcatcctaaaatgaataaaccaatgtaagtggaactctttttgtgttaagttttgtcaagtaggccaagtactagaggtcttacatttctttgttggcttggtctctcacttctctgttatgaaatttttgttgaggagacaaaagactatacctcttccattgcttcacttgttatctattgatattttaactgctgcattggcatcgtatttcttccatctcagactatgacccagttattgattaactgagacagttgttggttgacaatgcatggaaatgcgatgtttcttttttcacttgagttggcagaaatatactggatcgaggtcaatgtggtcataaacctggaaatttcatcagaagctatccatttttatccttgcctctgtgaatgcactaattctctctatttctatttgtttgcataaacttgtgtcaatgggtctaattatgaactatgcttctacatgaccctttgagatgtcacatgcattgcattcccagataattgtaatggaatcacagcctaggaacagtattctccttaaaatctttcaactgaagaaggttcctcatcaaatctccattaattctgttttgtgtcctccaagcctttgtacggggtaccatctagtatcaactcatttctggaaatcgcatgaacattttatagttcttattcaaagcccattttcatcgtatgatccagcaaggacttgctgagcacccatctccttctctagtggaacctgattgcaatatgtgtagcattctccaaggaatgaaacttccaatgtgcaaggttgctaaatagaataggagacaataccaaaccattgcttgaaggtttcatctttcacaagtgtacttctggctatagtaatatgctgaagatgtgaagattctttaaaaaacagcatattcttacattcttccaaaacttcacctttttcattttccttacaagaattgatccttttactaaaggaggtaggggccctactcatacacttccacaactaacaagagtgtctatcttgtagttgtacgaatctcacatgaaatgttattctcatacttcatcatgttttttgcttaattgcattaaggaagaagcatcattatggtttcattttcttgggtaaaatattaataacgagtaagccacttgttcagttttgtagcttttttttctcagaatttgtatgttatgtaagtgcaatgaataatgtttttcagtttatggaaagaaagaaagatcgtgctctttccataaaggtctcagtagagagatggaatagggtctgtgcagcctggtgttcaaagttaataagcttcttaactttatagcaataggttaagttaggaccagtggctaaaacaaaatcattgtgaggtctcctatgactcttaagtagatgacaatttaatagaaacttaccatcaattagctcaactcagtaaatccttaactacttaatgatatctgctagtcatcttttgtcattcagttttgtttgtggccatttctgttgttaagtctgaagcatcatgtcctttctcatatcctcattctagtttatttttgcttcaccatgtcttgaaaatgcttttaactggagctaataattccctactggtgcatccttggccgttacctcttacctaaatcctctcatcttatcctcaatttttttctctctctctttaatttctgatagacacattcattcctaactatcttctgttgtcttgttgctcatacatctcaaaattcctcctttcagcatgctcagtaacatgtttttcattgcttgcctaatattatgcatgagaagtagcgattcatgtagccatttaatcaaatcttggctttcctttgttctgtatttgtatagatctgaaatgaagaaagcaaaggcccaattagtaaggattaaccctctgttgagttgaattattgcatttaatgggtattccgtatttttcaaatgtacaatatcctgggcctaagctgagcatcaaatgttgatgtatgcacttcataatggggaatcatcaggctcataggcctcataggtttgagcttccaatggttcaactcttgtgtgctcttgtctatatgaagtataaccttcacatgcccttcagacttggattatttccatttttcatgctatttagaattttgtgcatgatttttttccatgcttcaggta

SEQ ID NO: 12205 - DNA, 15499 bp, Vitis vinifera
  Intron number 2 from transcript GSVIVT01022573001 (locus G SVIVG01022573001) derived from phytozome v7.0 (chr-ID chr8 ; pos 5262251 to 5277749 reverse strand)
gtgaagagtttgacattccacgctcccagaatgttaaaaagtaaataataattgtttattatttttgcatacttgatttttgcacgtttccatccatgttgtccaagtttttaggagtttagttaccacagaacatggttttgttacctagacgtcaggaagagtccttgcaagttagtgcatcttttaggaagggtcctttgcgcattagtgcattactgctgttatgtatttgtctacataaatgcttcaaagagttatgaataaatattaggaagaaaaaagtattttttctttcaagctttattctattttatcaaagcgcaacccacaagttccagattaaaaaacgttagtgttttttagtgagattcttgaaacagaaagctagagagaaaaaagcagtagtgcacaaatggcttttgaaaattttgtgcagctaaccattccacattttgatggtcactatgatcattggagtatgttgatggagaacttcttgaggcctaaggagtactagcatgttgttgaatttggtgtagcaacacctgttgttggagagctactaacagatacatgatgcgactcatggtagcttagctttaaaggcgtatcaacaaaatttataccttaaatactattactaaagtagccaagctactatagcatagtggttctaggatcgttcactgggaagggttttcgcgaacactagtgatattcaaattaggaaaattggtgattttcttatggatgttagctttaaaagaagatgtaaatattttagaaagatttaaactaatctaagctaacattaaagactaaaatgaaagggtgtaaaaacaagtttctcaaagataggatagctatgctctggctcttatgcaaattggaaatctcaggataggctcctcgcattggggttgcaactatggtgatgcttgcttcccgaaccggtatggatttagcaaatcaagttttaatcctttaaaatggcaaaacagatggtagtgaatttcatcaatggttattcaccttagacttcctttgaatggctcgtaagagataactaatggtctaaagccaaaagcttatcaaatattggcaactcaaagtcattccaggtgataaactcacctttcaatggccattgaaattggttctaacggattaatgcaaaacttggaattgaaaacctcaccttccaatagctcgtaggagataactaatggatagaaatctaaaagcttatcaagtattggccgttggaagttgtccaaaggaaataaaaaccaaactttgcattaatgaaccattaatgaaaaacgactaccttaccttccaggtgcgagaaatttccatgggattgcatccaagccatcacataacatccatactttgagaaactaaaatttttagccaatcatcctctgaggaaaagccctcagaggctgtttggctactaagaaaatagaaatggggaagaacaagagaaaagagaaaaacagagctttatatatttctaagttaatgtacagaggatcgatcccccaatatcccgatcttggaggtgttgtgcacctctatatatagcaaaattacaagacaaagctttatgtcggctgaatacaaggttacaaaaggaatttacacgagaaaatatcaagctaaaaatatttgggaaatcggtggtgcgtgcatggagaaacaaaggattcaaaggaatttcacaaggtgcctaaatcctccttgcgaaattttcacaaggtatttcttcatgttgcgaaatggccaaatttcgcaccatgaggaaaatctccttgcgaaattttcgcaaggtaaaattcaccttgcgaaattggtcatttgacatgatgcagttgtcttccgaaggccatatcttcctcattttagctccaaatcatacacggtttgaagcgttggattcttgacttcctaagctttgaaatggtatatagaatgtagaaaatgaactttgtgaagtgcttcaaaagtgcgaaagaagactgcagctattttcttcactctgttttcctcttctccattgcttgtgctcgtgtttccacttgaaattcaagcctgtaatcatccaaaatccttgcttaactcacccaaatagctcctccatcaattggcatgcttgaattggttcataagctgataaaaacatgtaaacttgccacaaaatggttaaaaccaattactaaggaccttaatgaattaattgggttaaatgaatatgattactactcaaaggtgcttaaaaccattattattaggtctaaaaaatagcactttttgctagtaatcaatacacaacaaaaagagttggaaggactaaagttgaatgatttaaaggcaaagaattacttgttccaagccattgatcaatctatcctagaaactattctcaacaaagaaacttctaaggatatttgggattcaatgaagaaaaaatatcaaggctcttctaaagtgaagcacgcacaacttcaagccttgagagaggatttttagactctacaaatgaatgatgatgattctgttaccagttattgagcaaggactatgggaataaccaacaacatgagattccatggggagaagatgtaagatgttgctattgttgagaagatattatggtctttggcatcaaaatttgattatgttgtttgctcaactgaagaatacaaagacatagatgcactctcccttgataaacttcaaagcttcttgttagtccatgaacaaaagatgaactgaagttcaactatataggaccaagctttaaaggcttctatctttatttcttccttaaattctacatgaagaggtagatttaaaaggaaggggagatcgaggtaatagagatagcagttgtaatggacataggattcgagtactttctccatgtgcttatgagcaagaacttcgagtatacatcccatttgcttgagaaaactaacaatctgcttttgtgagaacatgaaaggtcataaaggaaaacaaaacggaaagaaatattttctattatgaacacgcctctcagagcatgacacatgtccatcccaggtttgtataaaaactaaagaaatgttctaaaaggcaacattttttttactaaaacaattggcatcgtctatgggaatccttgaacaaaaagcttttcgttaacaatggatggggaacgagaggcagagaaggtatgttcgtgtaaggaccgtctatcctcaatggagcagcgcttgaaagaccaacaggaggaacattgcaagtaaatcgaggcattgctcgcaaaaactacattgctccaacaggagaataggatcttataggcagcaacagttgtccatacccctcagtatactcctattccttctttggccctagatcctcaaccatatctctaaccagctgcttctatgacaaaatttgcgttaccaccatctctagcaaaagaggcagccaaaagtactcattcaagcattgagtacgttagtactacacgaactgtatctagagtttgttcaccgcaaccacgtcttgaacctcaaggtggagtgcaaaacactaattccatttttcggatccttgatggcatggtagctacctcgttcgtgtacatgattctatgctaggaaactccacgacacttttctatgcccaagttcaatatgtttgatggatccggtgaccctttcaaccacttcatgcattttcatcaggtaatgacccttgaaagccacaacgatacacttttatgcaaagtttttctgtttagtttgcaaggtcttgctttatcctagtttcatagattgcctgctaattcagtgagatcatttagaatgttatctgaaatttttgctacgcattatttatgttcggttagaagaaaataaagtgtagttagcttgttccatgttaagatggatcgaggagagtctatctgaagttttatgaagcgtttaagagagatgaaggggtgggcattctctagctaaatggagttagtatggacacaatgatgtaggctattaaggaggcaatttttcaattctatctctcttgatccaccaatgacaatagatgagttgttttagcgagccaacaagtattctatgcttgacgatgatctatgtgcaagtttgcaacggacaaaggcattagcccaagaagataaccattggagctccaattgtaggatggcgaaaaggagcacatcccatgtagggaacaagcgtagaacaaagtatgattgtggggtttgcagaggacaactgtttaccccaattaaactttcttactcttgactactcaatttgattcagtctactgaagggtttgcctggcctcgacccatgcacaatgatcctagccaatgagataaaactcggttctataactttcacatagaacatgggcatttcatcgatgaatgcagacatctaaagcatcttgtggaaaacatgattcacgttggaaaattggcgtaatatgtgaaggcatcccgtcctaagtgggaaagtggtccatctttagttatagcccctgttcaaactaatattcggcttgtgattagtgtaatctttagagggtcgttgaaggaaagacaaaaacaacaaaactatgtgggatgtatagtcccacatccgataatagccaacatttagtacactttcactggaaatagtgtaaaaccaatagatggtcagatcgtcttcgattcctccgaactcagaatcgttttagcttctcatgaagatgcgcttgtcttagttctcccaattaagggacatctagtacaccgaatcttggttgattttggaagtgttgtagatcttttgcatttggtcaatttcttgtaaatggggtataaagtagacgtcctggattctctaagatgagtattaaccatatttaatggttcagaaattgtttccatgggagaaattgtgttacccatatctactggccttgtaactatgttgtcaatgatccattatctttcaatatcatactcggacgcacttggatccacaaaatgaaggcaatctcgtatttgtatcattagaagataagcttcctcacggagcgtggccaaatcgatctgcgaggtgataaaaaagcttctagagattgttgcagtatggctcaaattgtttttgggggccatgagattgtccccaccaaacagctcaaataacaatgacaacatgggacttgggacgatgttgaggcacacatagtcgaggcactatatagctacagtctattcgactcaagttcaaccatgcaggtactacttagctaacttctttcaatacttgaagtagattcgtttatgtcattcattcgtagtaatatagatgcttttgcttggcaaaactcggacatgattggtgtggatcttgagttggctattcaccacatgagcattaaacttagtagccgaccagtcagacagaaaataaggagattccatccataacaacaataacaaataatttgtgaaaaagtcacacgacttttggaagtaggttctatctgagaaattcagtatcctgaatggctggcatacattgttgtggtgcaaaaaaagaacgggaaatggaaggtatgtgttgattactttgatttgaacgaagcttgcccaaaagattgttttcctctaccatgaatcgattagatagtttatgcaacaacgggtcacaaattactctcgtttatggacacttactcgaggtgtaaccaaatccccatgtactcacccgattcggagaaaactactttcatcattggagacgatatttactattttaatgtcattcctttcagtttgaagaatgcgagagcaacttatcaatgcatggtaactcgaatcttgcgatctttggttagccaaatcatggaagtttatgtaaacgatatgctagtcaagtcccgcatacggtcaaagtacctagcgcaccttcacaagtcattcgagttgctctaaaaaaataagcttaagtcgaaccctttaaagtgtgcatttggtgtaggatctagaaagtttcttggttaccttgtgacgagacgggggattgaagcgagtcttgaatagttgcaagccatcctcaatatgtcgtctccaacaacaaaaaaacaaatacaagctcttactaggcaactcgtcactctcaacaagttcatttctcgatcttcgaataagttatgaccattcttcatagcgttgaaagaatgtcgagattttaattggaatgaggactgtgagcaagccttcttggttatcaaaagatatttttcaagtccacccatcctcaactaacctatcctaagcgaggacttatacatgtacctagataccttttcttatgtagtaagtgtcattttggtaagagtatctgataggcatcaacgatatgtcttctatatcaacaaagctttggtggatagtgagacacactacacaaatctaaaaaggataatactcactctacgcactgcaactaagaagttacgagcttacttttaggcacatctagttcattttatttcaaaccatcctattaggttgatacttcacaaaccaaatatctttggcaaggtgatgaaatgggaaatcgagctcgacaaatatggcatctattttcagaggaaagcatcattgaaaggataagttgttgctgattttagagttgaattttgttgagatgaggataacaacatagatgactcaaaagcattgtagatcatgtttatagatggatctgctaaaaaagaaaaaggaaaagcggggatagtattgagatcccccaagcagatagaggtgttacaagcggtctagtttgactatgccatttccaacaataaagttgagtacgaagccctgttggttaatctccaactagcctataatccttgcattgttcgattatatgtttatagagattcacatttagttgtttcacaattcaacggattgtttgaggtaaaagacgaacggatgttgtcatacttaagggttgctcgaaatataaccagtcgatttgaggaactcgaaatcttccaaattcctagggtagaaaatgaaattacagattcattagcaaactttgcttctactatgcccccagtcttcggataggttactatggaagtcgttgcccaaccctcgatatcattcagcttaccaaattaggtgcacactcttagtgaaagccatagttagataaccccgatacaatagtacctcaaattgggaatcttaccagaagatagcaaggaagctataaggatccaagcacaagcagcgaggtacgctctaatcggtgaagacttgtacaagcaatccttctcgggaccgtatttgaggtgtgtttctagagaataagctttgacattactacacaaaattcatgaagggatatgcggaaaccactcgaatggacgatcattatctcatagagtgataacccagggttattattagccaactatgaagaaagatgtcgagtagtatgtcaagaaatgcaaaaaatgccaaaaattagccaatgtcatccacacccctaccgagatcttaacccgatcactaacccttagccattctcattgtggagaatcgacatagtcgaccctctaaccctcgggtcatcccaaaataagtacctgttgttggccatagactgcttcatgaagtggttcgaagctgaagtgtatgctcaaataaaagtcgaggacctcatgaaattcgtttgaaagaatatagtgtgttggtttggaattcccaaagctataatctcggacaatagtccgcaattttccagcgatgctttccagcaattttgtgccaagaacagcataggaaattcttttgcttcccccaagtaccctcagagcaatgggcaagccgaaatttcaaacaaaacattactcatgtatctgaaaaaaagattgggttcgagtaaaaatgggtaaaagagttaccagcggtattatgggcttatcgaactactccttgtcatcctatgggtgaaaccccgtttgccattacttatggcatggaagtagtgataccaacatagcttagatttcacatgtctcgatcagagtcaaatgaaccaattaaggagtccttcgatttactagaggaaaaaagaatcacaacatcaatcaagctgacaatgtatcaacaaagtgcaatgggacaatagtggaagcaagtttgaaattattcttttcgtcgaggagatcccgtgctttgacacaacttcgatgaagaaaaacccaaacgtaattgggaaagcctttttaaggtagtacatgcaggaggcagtggtgcttaggggtactcaaaccccacccatggaatgtttcccatttaaagatttactattattaaagttgcattgcatgaaaaactccaaggtaaaatgcccttaaggcagaatgcccccaaggcgagatgcccttaagacaaaacatctaaaaaataaaataccatgcgcaaaatgatatggaaaggaaacaataatatttgcataaacagaaccatcattaagaccaaatgcctacaaaaaagaaaaaaagaaagtgttaaacaaaaagagctttcttaatatttctctaacatcttactagtcatcacttgaataacgacatccaaaataatctttttagaagcattggtactatcataagctttactcgtagttgcagatagatttgggattggttcatttacacctccagttcccttatcttcctcgtcttctccttcttccccgtcatcgtcctcaacatcactcactacgattttgtacttctccaaagtacttgtaatccaagttaaaagccttttgggtctaggcctttacttctgccatatactttgctttcaaatcaagtaaaacttggtgtttttcccaattagctgcctctaacttttcaaccatctctaaacgaatgctttccaaccctttctttaattaagacttctcttgacatagagaagtttccttttttcttaaacactccactttgtttagagttgttttaagattctcctcagactcagctagtcgcttctccaatttaggaatttgatgagacctgtctttatatttatcacaaacggattgagctaagtctttgagaacttggtgaaccgatagcttctcccacattatctggtacctacgacccaaaatcgttgaagccgaccaaatctaatcaaataatataaatcaagaatcgatttcgagaaagtcaagatgaaagaagcataagagaagggtagtaagtgaattaccgtaggaactaggtcgtttatcgaaagacaacttagcatatcaatgacacgtatacatctttcgctcaaaccatctaaaaggatgctggtagaatgagatgatgaagtagatgactttggcagaggaggaagatcaacaatattaaaaggaggaatgtccttttttgaaagaaaaaaatggctaaatcaaagagcatttcttcaagagtcttcttaggtcgatcactcgaagatgaaacaagaacttcaagttgagtagtattcaaaactacaatacaagtaagggatataatcgattgattatgctattgggagactagggaatgtcgaatgagttgacgattaacgagcttttgctatatgcctttcctatttaaagcagtaccatttctcttctcttttcgttttgggcaaaattccaaggcccaagtagtatccccaagcttgagttcgtcttcatgctccatctcggacgcccaacttgttgactcttgtgcaagatttacaatagaaatgtgagttctatgaaaagaagacaacacatactctaatggagtttgattttgtttaacagtttctttagtgagctgacgttgtgcctttatctgtcttaaaaccccatcaattctctcctattctcgttcaactttatcctttttcccttgtagcagtttctaatttcttcttccgagcatatccgggaaggtcgctaattgccttgtgaatacgcgaatcgtagccataatgtgtggattgaatctgatgaattttctgagcagcaaaaggaaccagatgtgagtaaagtttttcaaggtggggatttgtcaaaaggaatttgaattctctctggcatatggaaatttcaaagcaaacttcaccttctcaaatttatccgcatgaagcccctctactcatctacctcgcgaagattcgcctacatttgagaaaacggtcacttagaaacacaaaagagaaagtagaaaaagccaaagaatgtaagtacatacctgatttacatgaagaatgattcaaatgataaactcaatttgaagatttcgaagcacacccccactctcccaacaagataataaagtgttttggcatccccttgttagtagtgggaagatcaactaccaattgtaaagaatgagcatcagacgatagaaaaaacttgtcgctttgatagttcatcttcaaagtgtaaataaagaaaatttctttaagacccaaatcaaggttgtattgataattcatgatggacacacccaccaaaaaatggataatgttaggataaacatgagtagggtggatttatgtgtaaaacagaaattggtggacgagtgatggtatagggagatgaagtcccacgtcaaaatgatcacgaggccaaaatattacattataattatctcgaagatgagaagtatcatgtacatcactagaatttcatggaaaatgatttcttatactctcaagaacatgaaacttttgacaaaaatcaagttcttgcattttgagcaaggttagtgtcagaccctggaaacctctaatcagactaggcgaactcatcagttttttggaagactctctaaggttaccaattggctccatagcttccctttcggactaggtcgaatcagatgaaatatctatacctgtctgagacatctaagaatacaatagggaattttagaaaaaaagtacgagaccctataagaggtattcaaatcttcatggaaaacatattcgttttctttgaagatatggtttttactcaaaaactagaaccaacgaaaaatattcccccaagagaacaacaaaaataaaatgctggaaaataaaggaagatcaacccaacataactaaaaatcatatcaaatacatttatcacaagaattgtgaaacattcacgaaaagaaaatggaagaaataagagaaaatgacaaagaaaacaaggaaagaaaatattaaggaacttactaggaaaaagggcgagtaagaaaaggggttcaaaaaaccttaaatccaaaaaccctagagcaagttagtaggaggaggtttttttgcctgagggcttcgaaaacgcgaaatctgacaaatgaaggggcgcctgtttcaaatgtacaatttaaacatatggggaaggcaccacgtggcttaataacgtaaaaccatagagactaatttttctttttctcgtctaaatcctagtaaagcttcaagcaagaaacagagagacaagtgtaatggacataggattcgagtacatcctctgtgtgctcatgagcacaaactttgagtatacatcccgtttgctcaagaaaacgaacaatccatgtttgcaagaacatgaaaggtcgtaaaggaaaacaaaatgaaaatgaatattttttgttatgaacacgcctctcaaggcatgacatgtgtccattccgagtttatataaaaactgaagaaaggttctagaaggcaactttttttactaaaacagtagcaagcatttcaaagttaataatgatcaatctcaaggaaaaggtagaggaaaagatcaataatttgacaaatctaaggtagagtgctttagatgtcataaattcagtcattatcgttttgaatgttataccaagttgcttaatgacaaagaaaaggaaaagaaatcgaatttgacaaaaaagaaggaagtagaaacattgttgatggtaattcaagtcaatgaggaatcttagtcagatgtatggtatgtggatatagactgcagcaaacacatgtgtagaagtaagtcttctttttcttacttaaatgaaaactttcattctacagtaagttttggtgattgttctactgtgaatgtaataggaaaggatgatattaatataagaaccaagaatggttttgtagaaacaatttctaatgttttttacgttcctgtgaaaagtaatttgttaagtgttggtcaattgcaagataaaggttatgtgataactattcaaaagagtgtttgtgaaatatatgagctttatagaggagctattgcagttgttcaaatgagtttaaacaggttgtttccattgaagattgactatgcctaaccttgcttgatggatcaattgaaagacccatcatagcattagcatttttgctatggccacttgaatttcaatggattaaagactctccaatagaaaaatatggtgaccaatcttcctcaaattaccattccttcccaagtatgtgaagaatgtgttgtaggcaaacaacatcattctcaattccctcaaggaaagtcttggagagcaaaaaatgtcttggagttggttcattctaacattcatgggttgataaaaccatcttctaataggggtaaaagatacttaattaccttcattgatgattatacttgaaaattttaggtttattttttgcaagagaaattaaaagcttttagtgcattcaaaagctttaaggcatgtattgaaaatgaaaccagaaaagccattaaaaccctctatactgatcatagtggagaatactgctcaaaagagtttgaagttcttttgtgatgctcatggtattcaaagagagctcatagtcgcttattcacctcaacaaaatggcatattagagaggaaaaataaaactatactcaatatggtgagaagcttgttggcaagaaggagaatttcaaaaagtttttggtcggaagctgtgaattggagtatctaggtcttaaacaaatgtctactttttttattcaaaacatgacactagaagaggcttggagtttgcggaaaccaactatagatcacttcagaattttggttgcatcgcttatgcatttgtccctcgtgagaaaagaagaagcttgacaataaaggtgaaaattttgtatttctcaatgtaagtgaagcatccaaagcatataaattgttcaatccattgaagaagaagattgccaccaacagagaagtcattttttatgaggagagaacttggaattggaatgggcagtagcctactctagtcatttttatagtgaagttgaagaacaaagacaacaacctctacaccaataattctagcagcttctatgtctgaaaattcaccacatgtagctccaacagttgttgaaacttcaccaacaacagtggaagccactgatgcagcagatgaatatcatcttggtcatgcttgaaaaaggcctgtgtggataacaaactgtgtgataactaggattgaataagttgaagatccaatcacccactttgctttatttttagattgtgaccttacaactttcaaaagtgttgttaaagaatcaaaatggcgaaagacaatggatgatgaaattgaagccattgaaagaaacgacacttgggagctatttgatcttccaaagggatataaaaccattgggtcttcaaacaaaactaaaggagaatggagaagttgacaagtataaggcacgattggtggcaagggatataagcaagaatatgggattgactataaagaagtttttgctccaattgcaagacatgatacaattagattggtgatcacattggcaacacaaaattcatggcctatcttccaattagatgtcaaatttgcattcttgtatggaattttagaggaacaagtatttgttgatcagccttatggttatattaagattgaaaatgagcataaagtgtatagatttaaaaaagctctttatggattaaaacaagccccacgggctttgtatagtcacattaaggattatttttgaaagaaggttttcacaaatgtccatatgaacacactttttattaaagttgaggatgaaggaaaaatgctcattgtctgcttatatgtagatgattttatatttactggaaatgatggtgtcatgtttgaagagttcaagaagtctatgatgattgaatttgaaatgtttgaccttgatatgatgcattacttcctcgacatagaaatagtgcagtccactaatggaatctttatttctcaaaagaaatatgtgtgagaaattttggataggtttcaaatgaaggattgtaatcttataagcactccaactgagcttaacttgaagctaattaaataaagatcatgaagaaaagaaggtggacaacacactttacaagtagattgtgggtagtttgatgtatttaactacaacaagactagacataatgtataatgtgagtctaatagtagatatatggagaatctaatagaagtgcatttttttagctaccaaaagaatctttcgttacttgtaagaaactaaagattttgggttgttctacaagaagggtacaagattagatttgttcgagtttactgacattgattatgcaggagatcaagatgatagaaagatcactttggtttatatttttatgatgggcacaggagctgtttcgtggtcatctaagaagcaaccaattgttaccttatcaactacagaactgaatttgttgttgcaacagctggtgcttgtcaagctatttgattgaggaaaattcttaaagagccacatttcaagcaagtgggagctactataattttgtgatagcaattcaaccattaagctctccaaaaatcctgtgctacatggaagaagcaagcatattgaagtgaagtattattttttaagagatcttagcaatgatggaataattgatctgaagtattgcagaagtgaagaacagctagctgatatatttactaaacctctccaatttcttcgatttcaaaaattaagaaggttgttgggaattttcactttggagaatcttgcttgaaggtgttgcacaagtaaattggagcctaaaagctttcagtttaagggagggattattaaaaaataaataataatagtttattatttctgcacatgtgatttctgcatgtttcaatccatgttgttctagtctttaggagtttagttactatagaacatggttttgttacctagacgttaggaagagtccttgcacgttagtgcatcttttatgaagagtcttttgcacattagtgcattactcctgtatgtatttgcctatataaaggcttcaaaagttctgaataaatatcagaaagcaaaaaaaaaaaattctttctttcaagctctattttatttgagttatcacagaaatc

SEQ ID NO: 12206 - DNA, 2968 bp, Vitis vinifera
  Intron number 13 from transcript GSVIVT01020528001 (locus GSVIVG01020528001) derived from phytozome v7.0 (chr-ID chr 12; pos 4783448 to 4786415 reverse strand)
ttgttggacaacaggtttgttgtaattccaatctttctctctgataaaacatagtttgtctttcttgcagcagctctactgagggttatttttatctcaatatactttaccagagccttctgttagtgtgcatgatatacattttctgcccaaatcctactagcataagcttttagaaaaattgactgtctaatatggtatcaaagtcttgtttggaggaaggtttgatcttcaaaccttaccacatgtttatttcctcaatttattaagcttaaaagagaccactttattttcccaatttattaagcccatatgtgagggagggtgttagagtgcatgatatacattgtaaggcccaaatcctacatgcttaagctttttggaaaattggttgtctaacacctttgcttaatttccaaagaatgctttctgactcttttccttgtgattgttatattgttgctattaatgatcataatcacatcaatatgtttcctcgctgcatgattgaattcttagtatcactattttggccttgaaagaatagggaagaaatatgagtttattgttctttctactgtatgtgcacctgagtttgcctcttgcactagacccacatttgaatcccctggtagcatgtaggatacatacatacatacatatgcatacttaaatacatatacatatatatatgttatcacaataacaaagccttaaatctcaagtctggttggttatatgaattctttctaccattcagctctagctagggctatccctttattaagttcaacactaccatgtcttctcttctcgcctcggccctagttctttttgttcttccttgtcttttgaacactttcttcaatttgatcaaattcccaaatccaataatagttgcatttgtttgtctctgtttcatatgttcagtgatcttaaatgatgctccctcatcttgtcctcaactgatgtgcctgcttgtagcctcccatgaaactattcatttcttgttctctctcttaaattagtgctgcctggagactcccttgcaggcattcatttcttaatcttatttttccacccattcatattagcacgctttgctatgctcatcttgtttattcgacatgttttttcttgactgccaattttctaacccatagagcaagataagctttataattcccttgtaaaattttctctttaacgtgataagtattcaagaactgaaaaatgctccaaagcagcttctctacttaaaatatcttgctctatttctattcatattgtcctctttaatctttcattttggtgaagagcatagacatactcataagatcttggaaacactgacaattttgcttttgataattcatttattcaatagaaatagaagttgagttgtcaatttgatatggttcttcacttctctatcatgtaattcattgtgatgggtattttgtagtgagcatttgttggtgattggattgtggtcagcttacctaatggcatttgcttaaatacttgttttctttttatagaaaggatggaatattgccaaaatagagaaaacagaaggaatgagatattcttcaaggaagcaaaataccagaacccatcagccatagaaaaccttgagagggtgcggcagtcctctacaacttcagaaataaaggcgtcttctcttggcaagatcataagcttgctgattggttgacctaggcctccaactaaaagaggaaaccatttccttggctaaatcatgatccaatccattccatgaatgtctctccaagggcctctatagacacccacaaaatcaccaccaaggacctcctcccatcatggaggctccttattctcatcaagaaaggcccttctaaatcctcaagtgctggtaataccttagcttcaatcctgaacacattacctgccagctttgggaagaatggaaacaacccaccactgcaatcttaataatgcttcccttgcccaattcacattgatttcccattgaaattcatcaaacatgggcttaaggtaacatataggagggaggaccactggcgcctgacatctgctctcctccaattggctgagcagacagtctacataaattgagatgttttcaaacttaaaagtgttttggtacccaatgaattactgtggaacaatttttgctcacagctgatcaagtggctcctatgttacttccaagatttttgtccttgtcctaagaatcatccacacggtggctagtgtaatgcaattccccaacacttcactcctgactgtcatgacaaaatcttttgaagaaataaccaaaaaatttgagttgtctctcagagtcagttaaatagaagtctgtagagctcatgagaaatataatagtgaagaaaaagatggttcactgaaagagataaagtataattccatgtaaaaaactggacaaaaagtctcaagaatccaaagatgaatttggtaaccttgcatccgaagtagtgattcccttcttcagactcaccattcaaagagtatattttccttaacatctttgtacaccattgtgtgtgtgtctttctggacatatcgtgcatcatatatcatgggttgtacaagttcaacgctagcagaaatgcttaactggattcttcatccttcattatattttttttcccctatttataatactttttttcttttttgtaagttgaatgcatgtggcatttttctttatttgtaaccctttacttcccactaatactgaatttactggagttatatatatcaataagcaactgttataataagtcttcatgtatgtttttcttttcatgtttttatctatgcagcagtatggtatgcaagtccatgtagattcagtaagctggtgaagcttttatagtcttaaagatcatagataaagttgtcatataatataactgcttattctgtgcaggagcctcac

SEQ ID NO: 12207 - DNA, 822 bp, Vitis vinifera
  Intron number 2 from transcript GSVIVT01022247001 (locus G SVIVG01022247001) derived from phytozome v7.0 (chr-ID chr7 ; pos 17818152 to 17818973)
tgattccattattgaatacaacggttttgtgattggtaggcctatcttctttttctcccctttccatgaggagaaagatatttttgaaaatagtttagccatgttttcgaaaatagttctcaaatttttttttttgaaaacaattcttaaaaatagttcttaatatttttgggaacaaaaatctatttgggagctcaaatatgaaaaatatatatatatttttaaaatttttccctatgaagaataccatttagttacatagaatgcaaaagtttttaaagtattctctatatttttaattattactcagaacactctacaaaaaagacaattgaaaatgatttaaatttgtttaaaaattaacctatttttagaacaaattctcaaaaaactgttttccgagttagaaaacagtttccaaacagaccccaaaattaaactgttgttagaacaaatactctttatggccattgtttattgttggtccctcattgcatgaggttgagtctgatttggtgcaatttggctacacaacatggattccctttatgttgtgttagtataatgatctatttctgaagcatgcttatgttggagtttcggtttttgtatgttcatagactatagccatcaaaggcttgtgaattatcagagcacctgtatgtctatccatagttgggatggagtccactgctttcctgagtttctgaaactgtcatagattaccattcctcaatattctatgcggttgtttgatctatttacttcatttccattggttctgcagtttgtgatccaaagagtcttctctttgtatttggg

SEQ ID NO: 12208 - DNA, 6082 bp, Vitis vinifera
  Intron number 3 from transcript GSVIVT01034519001 (locus G SVIVG01034519001) derived from phytozome v7.0 (chr-ID chr1 8; pos 20002645 to 20008726 reverse strand)
ctgtccttcgtggtatttttttcctccattctgctgatgcagattatgaaatcattgtattattttattaggttgagagcagcattttctctgtctacggttcttccactttttgtataatgctatcattgcttacaaataaaattttgagatcctgggtgcaaatttgtgttaagttactgatctgtgtatgaacccttttttattgatgagtaaatttcatcaacaaccaaggggaagagccctattccttgtagattttttttgataggcgccttattccttgtattttatgtgttatacacttgaaaagggaagcaaaattaaaacctcaaggagtctaaaaataaacaattgaagttccagtcccaaaaccctcatgagggcaaataaaaaaatttatgcatcaattttcagtttcaatgtgggaggcttcctagaaaaatctcatatgctttcttcctttttgcccccccaaaaaagcatgcatgtcatctatccattttgtttttttttctcctgataggtaaatatcccttgtattaatagctcctaacaaatgagcgcactgaagtatacatggtgtatgtaagggcactaaaagaccataccaagtggagggatacacaaaaatgcttgccacctatccatacatctctattatttttgtttttgacccaagtcactacctggtaacaaatccaacatttctttatgcaacacttacagatctcaagaacagaaaaccagtcaggccaccattcttggtaggatgataagtagggttgaagattttggttttctggaagcccttgaggtgggtggagattaaatttcttacctccggtatccggaaaatgtaatcattttctccatcctcaaggttgagaaaatttccaacttaagcttattcttgagccctttgggatgatccttgctctcaagattaacattgattaggatgccttcttgggagttgagatagacttgagagactggaaagttctcgtagatttgggattagtaggttgaagatttaggtgtagtggaagtcttttgacgtagctatggattaagtctggattatttaactgtaggttgcagaacatttaatcattttctccaccttcaaagatgagaaatttccaacttccagcttattcttgaagactttgggatgatccttggtctctaaaataaccttgataaaagtgccttatcaggggttaatatttgccaggttagactctagtggctgaaaagttctattagttgtgggattaataggtggtctttgaattaccctttttttttaataggtaaatgaatataatattaataaagcaccaaaaagagcacaccaaagtacataggatgtatacaaggatttccaaaaggtgtcagaaaaggataagggaaaaaaaaaaaaaaaaactaatccctccccgaataagaacccaaccaattaatgaagtcaaataaggacattgagccttcaactatatatcaattcctcgttatcaaataatcttcgatttctctccttccaaattgttcaaaagaggcacaaaggggctgctccccacacttttttccatttcctttcaacaaaggagaggtggtctctgaattaccatgatcttcatttaagagagcaaggctagtgctacaaggttaccggccctgtagtggaaaaagagtttaaccatcttaatagttggaagaaaacctactttactttgggaagaggtaggggtaatatatttcagccttgcgtggcccacatacttctgatccatatttagtgtaacatttggaattgagaggatcaagagtgattttctgtggttttggcataaatttagagccttcttgttttgtgggggactgtgtgttggccaagatctaagtgtgggatagatttgggaggaatttctttaagaaataacttgctcattgataagtgtttatgaatatttagtgggaacaaatgcctcttttgggtattctgctattgagagcaagcatggtttgcatgacaatggggaggaatcattctttttactactcatttcccatcctttgttccttttttttcaagattaaaaggagctcctttctaaattcttcaatatctagtaattcccctcctagaactgttcccaagatatctcaatggtgagcattcttttctctctctctttcatttttttttggaaagtttttactactctactgcagctttaggggagagttgatagtcattggatgggattggctttaaattctttttccaaccgccccccccaagatgagaatttgaaattgttcacagcatctatattaattaggatctttagaggggccccatcctgaacaaccacaaatacacacaagtccataaagtatagctgttgcatagtttgtgggcattcttttgagcatttatagcttaattagaataggtttaggtgggaaattgcatctagtgtatattctcctctgattggttttattatgttaaatttgatggaggtactttaggtaacctaaattagctaggaattggaggtgcaataaaagatcatcatagtatagtgttgaaagccttttctaaactggtggagaaagtttgacctttgagataaagattttagcacttttggaacacttgctgcatggctttaatcttttggttggaaggggagtctgctgtggtgatttcatgaatgtctaaaatgaaaagatgtctatggaagtatgatgagagggtttgccaagttttagatgttggtagtacctttggttcctctttcctttgctacttatttagctaatcatatgttgtagatcaattagccaagagggaattttttgccttatgggttgtgaatctttttagcttttaccttttgagtggttcatttgcttttctttgttgttgatcagcttttataaattttggaaagattcttagcttttataaattttggaaagattgtcatactttattttacttataaattcatatcagtgaattaatgtatttttattacaagagttgtcttatgcttgtcagtaagttgtctattaggctccttttcttatgctgttcaatctcttggcctttggtagagttttttcattgttaagagtcttagggtagacttggaagctgttcgaatcacattgatcatcttgttttggggtcatagtaataaggatggaagtgaaatgatttcatagtgtgcctttatgcctttgcaagtgtttgaatggcaaggaacactaggatctatacagacaggttgaatcctataggaagctccttctaatgttgtgtttgcaggcaactatcaaccccctagacagttgtccaacttatatatatatatatatatatttgatattataaacaagtgccacagagaagttggcactctcgtctccttgggtcctcgaagccctagatgtcagctgctgaaaatgatgctgcaggatggtggcttgctggaactctcagggaaggctgtgaaggatccctctggtatggaggtggtaaccagggacaaggagttggaactttcaagggatgtggacttcggttgtgcgttggaggagggggattttaatagctatcccaatggctttgttaagttcactaattgtttggggatgccagttgcgggctttgagaagaaaatttgtgctcttgttagaaaaatggaatcaagaaaaggtcgtgatgtgagggtgtcaaggggtaagaaaaggtcttcttcccgtttcaagagggaaattcgaaagctagagtattcggttaactataatagctctctgttcattgctaggggaagggggagtggtgctggggtttgagggaagaggttgcttctggatttagggttttttatgttgtttagcctttctgttagcgttgttattgtttctaacctttgttggttaggaccgcttgttgttagggtggtgggttttttttcctcttttccttctatggcttgcttttgggcctaatttgtatgctccgtgtatacttttttgcgcctttttgcaagtgccttaatatatccttttttacctataaaaaaaataaacaagcgccaaagagatggcacatcatagtaaacaggaggtatacaataagcaccaaaagatgcaagtaaaaagagagaacacaataaacatctctcttagcaagaacccaaccaatctacaacatcatttaaagacaaaacctatatctatgtacaccttcatccacaaaaacaaatatctaagaaaagaactcttcaaaacttgatctgattgctcctcattcacaaatgatctttgattcctttcttttcaaatagcccaaaagatttacaacagagcttctctgcaatccttcttgcatcttctacccacaaaggatctattccaccctaagagagtcactttatccttctttctactttctttttaatttattttgtttaggaatctttttcttgatgcatggaatcaaacctggaacttctccatcctcatttccaatctcttgtcactagagtcataccttagggcatatattcctggtcctgtataaataatatttttagtttcatattaaaaaggttggatagatagtggatgtactcttctttccataaaagttgaaccatgttttttcacatgctaaactgtaatgttttgttaaatgcgtttgcaatatactgtaaactgagaatctttagtgagctctttcttgtcctctttctctgactcaagtgaaggttataacacacttacgttaaacatgtttcccaatcctcagttggtgatttatgtgcatagttcattcatgtataggttgcgactccctaacctaaaatgttttcttactcctttgctatttgtggtcatgaatcatgttatattgtctcaatggaagtgttagaagagaggagtgggtgcattttgaagattcatcttggaagttagtagataagattgatgatgtgacttgtaagagctttatttagatgttttatggattgtaagttttaagaaacttgtaggaggttgttaaagtgtgggtctggtggcatgggtgatgtaaattatgaacacatggtgtctatttgtttactagttgctttagatttttagtaaaatcttattatcaaaacaggtgaaatacaaatcaaacgccagttaaattgaataacagtgagagaagtgcctttaaatgcagtattacaagaggccgaggaataaaagtgaagtaaatcccacaacgtctctactatccttcatttttcctcaaagatcctagcatttctctcttgcctcatgatgaaaggcaaagtgagatgagtgattttccatatgaccttgcctctaacaaaactccctaaacgtttaaaagatatgaccatcatgtcacatatgctcttgggtggaatccaatccattttggctagattgaataacttgtgccacaatcctagagttatcaaacaatgtagaaaaatatgatcaattgattctctactccccatacattagatgctccaattaggaataagagatttgtattgttttctcaattgtagcatgtcattgatgttcaccttcttgtgtgccactaaccatgtaaaggccttgagcttagatgaaaattcagatttccatacaaatttggctagaaacaatggaactagaattgataaattggacaaggccaaaaagaaagattttatcaagaataaacccgaagaagaaagagaccaagctcttgtgtcttggagagaaggggacaagtgaactagggtgagtgaagacataagtctttcaaggttcctaatttccaaatctatgaagacatgggttttttttggaatccctatggtcaactcctgaatgtttgtaaatttaaattttgcataacgtagggattaatattttaaggtggtattttttgctgttttttattttttacttttttacaattatcatggttaaccacacttgtatgtaatttttgcagaaaagttgttgtatttctccgagaaatttg

SEQ ID NO: 12209 - DNA, 10795 bp, Vitis vinifera
  Intron number 1 from transcript GSVIVT01009198001 (locus G SVIVG01009198001) derived from phytozome v7.0 (chr-ID chr1 8; pos 6060871 to 6071665)
tcttccctgctgttacccctgaaaaggtgcctgcctctcatctccaactttattgtttgtttattcttcttgttcttttaattatcgtttcttttgtttcccgttaattttattcttttttttttcttgtttttttggtttgaattgagttcactcaaagcaaatatcagtttgattgaattttcggtttgttttaacctttgtctggagcaaacgctctattcggtttctgaagaattgaggaaatgaaaattaatttgaagtttttctgttttctgttgtttggttcttaagaaaccaatgccaaaaaggaaaaacaagttatagcttgtatatgcaaccaaacaaggcataaatggattctttgataactcatttcttcttggttatgggtcaatatgctttgagaagatctccattacttttgatttccgtgcttaggtcccaggtttattaatgtaatttgcagttttagaacctcttttgggttgcgctagcttggttttttgataggcaaataagagtatgcatatacatacaagtgagacttgtagtacatctgtttttcagtgcacaagtaatttgattgtaaattcacatttgtggtttgtccgttcatggattctgctatcaattcaatggttgaaggaaaaatattctgaaactcctatgtacaaaacagtaggtatcactgtacaatcttggggaggtatcttacaattttggcatgattgtgtgtacttggtttgtgttctattgggcatttttaattgaattatatacttatcaaaatagaataaaaatctcaagagctggaattaatgcagttcaaatataggtggcactaaaatttctacattcgtaatagtaatggaagaccaatcaatataaattttagaaatttggcacattcatttttttttttttttgataggcaaacacacaacaaaaatatattagaaaagggcgccttgaggctgacccaagcatacaggatgtatacaagaagcgccaatagtcacaaaaagagaaagaaatacaataccagctctcaactagcgcctagccaatcaaaaaaattgattaaaggaagaggaccatcatttacaaccgatttagtccacagccaaagattacaaacaaacgaattcttcaacctatgaattaataactcttcattatcaaaaactatcctgtttctttccttccaaaccgcccaaaaaatgcacaacggggctgcgttccacaccttcctacgcttcttgcccaacttaaagccactccagctattaagagtatctctaaccgaagaagggaggacccaagtaacaccaaacagagcaaacaataactcccataaccctcttgccttagagcactggataagaatatgatcaattgactcttcttccataccacaaagaaagcatctgttagctagagaccggcccctctttttaagttgatccaaggttagcaccttcccccaataagcttcccaagcaaagaagctcactttggtaggcacacaagtactccaaatattactataagggaattgaacatctcttcttgaagctagcgaactatagaggaacttaactgagaaaatcccatctttagtctctttccacagcattctatcttccacaagaggattaagcctcctacctcggattgtcagaagtaatctctccaccccctccacctcccagtcattaaaggacctggagaagctaggattccaaaccccttcatctcccgaatgatcccataactccactaaccaagcctctttaaatgaagcaaaggcatacaaagagggaaacaaattactaagagagaaattcccacaccaattatcattccaaaatttcacccttctaccattccccacagaaaagacaactttgttttgcaagagagctccttccttccttatttccttccacaagcctactccaaacccctccctacctactctagtataccagccccctttttcctccccgaactttctactaatgacttgcctccaaagagcctccctttcattcgcaaacgccagttccacttgcataaaagggctctattgagagtagacaaacgtctaactcccaagccacccttccttatgtccgagcacacggaatcccaatttactagatgaggcttcctttccaaagctcctcccccccacaaaaaatccctttgaattttttccaatcttaaactaaccactcttggcattcgaagtaaagacatcaagtatatgggcatacttgacaaagtactacgaattagggtaattctactgcctttggagatataattccttttccacaaggcaagccttctccgaaatctctcttccaccccatcccaaacagccacggatttgtgattcgcccccaatgggatccccaagtaagaatttgatagccttcccactttacagccaacctcaagagccaaagcctccaaattctctactctcccaaccgacaaaatctcactcttatccaaattaatcctcaaacctgatatgacttcaaatcacatcaacaactagcttaaatgagccatctgatcttgggaagcttcacaaaaaactaaagtatcatcggcgaacagcaaatgagttaccacagccccgtctccacttcttccttttatcctgcagcccgaaagaaagccccccctcactgctctaaggatgagcctactaaaagcctccatcccgataacaaataagtagggagagagaagatccccctgacgcaaaccccttgaactattaaaaaaaccggctggagtgccattgatcaagactgaaaacgttgctgtggagatacaccaggaaatccagccagtccatttctccccaaaccccattctttgcaataccaatagtagaaaattccaattcaagtgatcgtacgccttctctatatctagcttacacaacaccccactctcatttctcttcagcaatgaatctattgcctcattggcaattagggcagcatccagaatttgtcttccttcaacaaaggcgttttgagctgaagacaccacctttcccaccaccttcttgatcctgtttgctagcacttttgccaacagtttatacaatccacctatcaagctaatcggtctgaaatctttaaggtcctccgcatccggttttttagggataaggaccaagaacgttgaattcaggctcctcacaaatctgccatgctcgtggaactccttcatcaagcccataacctcatctttcacaaaatcccagctgaactgccaaaagctgagagaaaagccgtctggaccaggagccttgtctccgttcagatctgagagggcggagaagacctctgcctctgtaaaaaccccttccagacaagctgcatcctcaccatcaatcctattaaaatccaaaccttccattgacggatgccaatccccaggatctgttagcaggttctcgaaagctccaaccacaccccccttgatatcctgctcttctgttaaccagttaccattaatcttaatcttagacaaacaacttctccttctatgggaattggccatcttatgaaagaagccggtatttttgtcaccctccctcaaccacacctctcttgatttttgtctccaagaaatctcctccataagagcccatttctcaaagttccccttagcttcctttctagcttccagctcctccaaagataatgtacgcatcttctcctgagaatcccagaaatccactttgtccaaagccaatctcttattcactcccaccttcccaaaaactaccttattccatgacttcaagattgcctttaaagccttcaatttctctgcaaggatgaagctaaacgacccgctgaatcttagaccttgccaccaccctttcaacagatccttaaaaccctcctccttaagccacatgttttcaaaacggaaagggacaagccccctcctcacccctcccccatccaaaagaatgggaaagtgatttgacactggcccaggaagagtactctgtaccaccccattaaaatggccctcccaatcctccgacaccaggaaatgatcaagccttgacatggtttggttgttcaaccctccactccatgtaaacggacctccttgaaggggcagatccctcaagtccaagtcatcgatcacctccgagaatcttcgcattgaatgagacagtctccctcctcttctacgctcactcggaaatctgatcatattgaaatcaccaccaatacaccaggggtcattccaaagacctcggatggcccctaactcttcccataaaatctctctatatcttttcattgtaggaccgtacactcctgaaaaaatccatctgaacccatcttcacagttcttgaaacgacaagaaatggaaaaaaggcccacctccatccccattaactccagcactctattgtcccaataaactaccacccctcccgcagcccccctggcattcagggctccccactccagaaatctccccacgcctaggcttcgcactacccctaaagacatctcaaccaatttagtctcctgcaggcaaactaaatccactttatgggaactaattaaggctttaattagcttcctcttatttctatcatttatccctctaacattccaagatagaatcttaatcttcatttaaaacacaaggatctgtccccccctcttctgtccgaccctttctttctggtctttccatcgtaattaaccgaccattctaactttttaacttcccgatcaaacctagtcaatcctagcgatccatttttcttgccttgatcccttctagtctttagtcttagcaataattttaggatttccccttccacaccttctgtcgcgaaccctagtgccttactgaacttcaacaggttactttcatcccaaatactactagaatcctccctatcttgcatttcctcaacagcctcctgcttatcatcaatagacttttccccctctgagtccatcacccacggttttccatcagacaacacagcgcataaaggagcttggatactagcaccttcagcggcgacatccaaaccggaaacatctcccaccactaaggctcggtcacacccagaagaaggagtagaagagaagaagtctcgttcccccccaaagaccgcggaaaagggctcatacctggatgcctcagctgtcagcgcctcgtcacttaacggcgctctcgcactcatcagataagcctcagaagccctccggtcccctccaggaaagcagacgacccccgcatcctctcctcgcaacatctcctctgcttcccccatctccacgacctcagaaagggatcgagccctaactcttttaaatctctccaacttggacccaaagcccaaatcgggtaagccctcacagcccataaaagagcccttaatgtaaaagggcctctcttcacagcccatcaaccacccttttaacataacgggccttgacaacggcccaaccttctgggcttccttaaaggctgacttaagaccctcctccccaagcccgcttctaatctgggcctccccatgaacaggcccaccattaagatcttcagacccaagaaagaaaccaccccttttgactgcagtaccagtggcatgacccctactccctatgctgtctgctccatcagtcgcctccaaaccgaaccccctttcagcggaatcagaggagaaccctgtagcgtcttttgaggagcttccacagggcggctcgacctgtactcccacctgctccttggactgagcctccttttccaacactcttcctctgcacactccacgtgagccactccctttgtcttcctcccccactgtgacgcccttcctgttgacacatcccgccggcaccacctgagagaaccaaggtggggtttcccaccacaactggactgagaaacaccccgacccaaccacaatttggacagatgtaggtaagtctctacctaccaccttcaccaataatctagcccattgcatttctgacatgatatccgttttatcatccactgcaatgaagccaccacagccatcacctatcaatttaaaaacctcgcggctccatagatgaagagggaaacctactactctcacccaagcctcatttgcactggctttattacagaaacaccccacctccgggtgccatttctccaaaaataaggcattgtctttcacccttctcatccctctttcaagaacacgcttggcttcacttaacagttcaaactcaaaaagcaaaagacctcttcccaatacagatatgttcagcttacctccgagaagccagacttgaccagcccaatctttcagaaaatccatctcagggggagggatcgctccattttcccatctacctactagacagcgatccaattgctctagtttttcaggcttcaccctctgtcccaactccaaccaaaccttatctcctaaccttcccgtttttgagtttgcgacctccacataagtctttggttctggctccttttccttcttcagcgcctcaaaggacacaagactttttgagcctccagtgggaactaccccaacctctctcaacttctctgccaaaatattccaccccccagtcagccccttcccttctggaaagactaagcaaaaacgttttgcctctaaatctcgcacagaacagagcaaaaatcttcctgccccatttgaacgacgctccaaattgtacttccttcctttctcctcccagacgatggaccaacctctatcatctctactcctgcagcaaaactcaattccttccaataacctacagagactaaaatctccaaatctaatccaagaggatattcctttgcttctctcccaaatgcaccctctcagcttacctcctgcttcatcaatcaaaatttcaaaagattttgactccacagcaaaccaccttcttccaccccttagattcaccatctcatctctaactccacattcattttttaagatacatgaaagaaaaaacatttaaaataagcatgtaatatttaaggaatgtgtgttgccctttggcatacggtgatattgacatcaatggactcactctaatggttgggatgccaacatgttagtcaagtggtcacattggtgtccttggaaggctatattggttttccaagatttctccagacattctcgttttgtgatgggtaatgggtcaatgatttgttttcaatttccaagtcttgtaagagttttgacaaatacaaattcttttattacaaccatcattggtatcttgtttcctttttcttagaaccttaactttagttgtaacttcattgatttggaaatagaggaccttgaaggtctctctctttcttgcatgcacctgtgaccttttgtccttgaggtgagaacttggtcattatatttttcaagcctatttacagtaatctttgtttttaaccttatccaacctatgagctcctattcattttcctctaatcaaattcatatgaaactctaaagtccaatctaaggttaaggtctttgtgtggctagtggccatcaagaaggtcaatatcaataacttgccataggtgataagatggtacaaagcctagagtcttaacaattgcaccgtgaattttttattttttatgattttttattttttagattttccccatatttattagatggttcagcgattttttcccattatggagattggagtgtccataatggaagaatagagagtgtttggtatgtggggaagtgagagaaaatgaagatagaaagagggaagaatctgaaagttgtgatggtattggtggagaaaaaaatgaggagaaagctagtcctaaccctagaaaaatcctttttagataggtcctctacaagccctagaaaatgaaataggttgggcctaaaaaatgggctgaatcgaatgggcccaagcacaaaatcaacatgggctttttacaaaaattaaaagcaacgggcctaggacaaattaaattttgtgtaattattatatataacttatatctatacaactttcaaatttcctttaactcgttgttaaaaatataaaaatacaaaatatacaaattatcttgagtaattaaatataaaataaatattaatttgtaaattaaaactacaaaattttttaaaaagaaaataattatacttatacaatcaattatttattttattttattttcttgaatatattcaaactaaacagttcatcattttagtataaaatatattttcaagttttatatttggttagtatggaaggaaagaaatttgttggcttttgggaatgaggtgcttttactccaaaggctgaaacattcttttgtatgtaatctgtggtcttgggtcagggtgtttataattttgagccctagttctcttgttagcttttttgagtggctaggctctaagtaagggtaggggttgttctttccccttccttggtttaaagtctgtgggttgcttttgtatactccttgtatacctagagggcgctagtttggtgtatcctctttctgtttaatatatttctctttacctatcaaaaaaaaaaaaaattttcaagttttatatgttattgctaaacatagattttatcatccatatacaattttttttcaaagaaataacttcaatatgcgtattgttacttgttttattatttttttggagttttttttaaacatatatgtgattttaattaattttcatctaatcaatattttttgtctgaatttccagccgatattaccacacaatccgaccaccgatattttgtaattttctatattttacccattgggtactatattgaggtatagggtctcttttttgttttggagaaaatttattcatttgctccatttgatcagaacttgtatatttggaaaggatttctcatccttcacatgtacttttaaatccttatcaattaatactgtgcttctgataaaaaaaatacaaagccttgctttaatggcagagaagtaaacctagccaagtgacaaaataaaggggatcaagaaggatccgagggatctcaataagcatgagttttttgaatcaatgctcaagtgatggttggttttgtttctgcaattcaggttaaactaacacaattgactgaaatgtgtatgactcagaacaagatagattctgcactcctggtcagatgatgccaattttggttttccttgtttgttctagcctgatttgacccaaggtgataatgccttttgtagtggtgaatatatatatatatatatagtccttgtatacttcgaaggcactggttttttggtgtttcctctttttgattaatatactttctttttacttatcaaatatatatatatatatatatatatatatatttttttttttcttttgataagaaacaataatttcatcgcttagtggtgaataagtttaattataggtaatttaacaggatccagagtatacctcttcaaatgagtggaagctcttagactgactaaataaataacttattcattgaaggaaccaaatgttatttcctaaattaaaacttaaaatgccatagaataaaaccactctaaagttttttataataggcaaagagatgaaataaataaaaaaggacctaacaaaaaccgtgcgacccaagtacacattaacgctatgtttggttttagccttctaggaaagtactaagaaaaggaaaaaattgttaagaaaaatgattttttttatttttggtttgtcatgaaaaatacgaaagaaagtcaaatataattaaaattaggtagaaacttattcattttcaaattatttaatctttatatagaagaggaaaaataagtgaaatgagtttgaaaaagcatgtaaaatttttttttttggatgatcaaactttaaagttattttctattttcctttactttttccatttttatttttttccaaccaagaactgaacatagggtaccatatagaaaacacagcaaaaaatgccaaacaaaaagggtgcaatcccagtacacatgaagcgtacagagaagcactaaaaagacatgagttgaaggagaaaaaacatagggctacacatttgtattgctagtcccctacaaaatgaaaactgtgtgtttgtgtgtgtgtgtgtatggtgatctttgcactatttggtgtggtgtggtgtggattggatgttgctggaaagaattagagtgtcaaaggattgtagcctggcatatttgctcatgggaaaggagttgtgaaagtcccactatgtgtagcttgctgcttcaggagagaagggaataagagaaattttttaaaacatagggggttccaaagctaaatcatatagagaacgttttctattctttgtttgtgtcgaccatggagggtgtaacaggaaggaataggtttctcctttcttcaattttagacattttggtccatcctggttaggagggcttctcttttgatttagctctttcccccttccttttgtcctctttatttttctcagatctcactagtgctttggtatcaagctagatgtgataatgtaatcagttagatatttacagttaaaatcaccctgtctattgcagctaacatcaccatgtctatttattctgtttgctatgttcttgttatcgtgtttatgatgcttgtacacaacaggtgcaagcggtcctcttgcttttgggagggcgtga

SEQ ID NO: 12210 - DNA, 3020 bp, Vitis vinifera
  Intron number 19 from transcript GSVIVT01010908001 (locus GSVIVG01010908001) derived from phytozome v7.0 (chr-ID chr 11; pos 15825337 to 15828356 reverse strand)
ctcgctttgaatattttactacgaaggttcgtttaaataattatcatgttttttgtagtttatcaaatgaatgaattggtagaaagaatttttcacagcctgtctcctcttagtgtctatattcttgtattgaagctgatcaacttgagtttagttagctattggttagaaaaagattggaagcttgttttacttttaaaccatgctgtattatcagccatccaaaaatagctactctaattgaacgaatacatactttggggtctttatgtttcttttagataatttgaaggaagcaactccaattgaggaactaaaatagggcaaagagagggaggaagggaataatgctaatgtattaaagagaatataaagccatggtttgaaatgcaatgctcttctttttgtggcttcagaagcagaataataatctatttacgtatcttccaaaccaaagttctttgaaaaatcctactcattagagcttctgtgaaagagatgtgctatctttgccatgtcagttcattttttcccttttccttcctttttgctgggagtttggagtggactatatggatagaaacatggattccttaatgcaatcatttatacttctcttttaatttttttcccttcttctgttgaagcataataactcattcttccttgacttttccaattttcatttttaataaaatgtaatttttttctggattttctggtaaaaaaaaagtttaaaattaaatgtttttagtttactggacattctcattcatacatatgtgcaaaggtttatatggagtgagacttagaccttgcctttgattgttttggtttagatatcctatttcctataattggcctcacattataaagaatgttatgtaactcatattaaagtttgtcataaatagagataaataaaagagaagagacatcataaaaaaaaggcaattctacagagatttttgacacttagtagcataatctggaagaaagaaatggaggaaagcaagaacaatttctgtaaggaatttcaaatttgtgcttaatgcatagaatgaggaagaatgtaaagtagcattcctcattttctaaggaattagaaggggagaaaatgaaataaaaggggtggaaggttgcatttatatgtggtctgttagatttcagttactagtgagtggttttgacagctaaggatgtcaacatggcgggtttgggacaggttttccctacccagatcaaaaccaaggcaggacagttggggtggcctccttgtttagtaacacctctgtaatcccattcccagcccatgttgcatatgcttacacatctttctcaatctttgtctactgattcctacccacaaaaatgaagcacctttgaagaaatgaaagattccatgttcaaatcgaacaatttccccaaaatgttaaaataaaatcaaacctgacaagaagaaactaatcaaaaacaaaaatccaaaactaccaacatgaaaaattcattaatgatacccatatagaatgggtcacaaaaaccaacactaaataaaatcagaagaataaaatctcaccagacaaaaagagaagatgtaggaagatgttcttggatctataaagaatcatgaatctgcttgagagttgagacaatgggtgtagacagactaaagggaagcttttagagagataatgggatctgtggctgtgtcgacctacctacggtgaggtgtggctgttgtgacctaccgccagtgagatgtggctttggtcttagatttagggatagggatttgggaggaagctgaggatgagcagtgtggagagaaggattgggaaaaataaattcttaattatatatgggatatgttgtgaacttttggaatttgaataatatttatgtaattctatgtataatcagagtgaggcatgacgaagtgatgaaacctgctctgatccagattcaggtttggggacaaaattccataccctttcctaccctgattaccatttccccaaacctggctcatcaggggtggaccagaccaggtttgaaaatcctacctgattgccacccgtagtggcagtggcataatggttgttgggcccaatatatatttatttatatatgacctttaagaaaaaaaaattctgtgaaattcccccttggaagacaccctacccaaaggaattgagatgattatactaaaagtgcatcaatacgggaggaagaaaagcagtagtaaaagaagcttgactttttccctttcaacttccattcacctatgattgcattgtacttcttcacaaaaatacacctaaaaccatttgaaactaatcttaccaacatggtaacatattaaagctgatggtataaaatttaaaaatcaatcatcaatgattccaatcttgtgttttatttgatagactgggacctgtcagaaattgggtgccttcaccatagaactgctgcttacgtgacaatctatgttccgctaatctgtaatgatggaatttcctcttgttaggggcttttctctgttccagcatgttttataatgcagtcaattaattttgcaatcctggcattttcttccctgccaaatttaatatgtagaggttttttgaaaattctgagtcaggtgttgaagattgtctaaccataatgtttgttggcatatagaacccccataacctaggtttatctagtatttgatgtctcatgataatatgtctatgacatgtctatacagtatccaagaatctgtggatccagcatgagaaactaatgcaagattcttccttttttgtaacatataccttgctgttaatcaagttgattagcttccattaggagtgcttcctgtctgagtcttaaatactgggatgcaagaaataatatatggtttttccagctttgagctcaaaaagttggcttctgtaagaaaggatattcattttgattctggttgcttccttcttgcaggtttttcccaagataaaagattctattcaggtatt

SEQ ID NO: 12211 - DNA, 3090 bp, Vitis vinifera
  Intron number 7 from transcript GSVIVT01013229001 (locus G SVIVG01013229001) derived from phytozome v7.0 (chr-ID chr2 ; pos 6520740 to 6523829)
cactttaccaggatctacccagtaggcaacttaaggtcagcacttccttgataatattctgtgttctttttttttttttttttttgttgtaaacaaattttgatagggtattctactttgtaagatgaagatttcttatgctatcttgtgcagcttgatgaaccttctcattttgtgcactgtatttgagatatttatatatgttacaagtttctgaatttaaagaagctttaactacaaaatttgtttcaaagatcctaaattcaaggtccactaagacatctgtgaaacaccaggtcagaaatttttggttttgaaactagctgtcagttggttaggccgagtatgcctttgttttctggatttggaatgcaaaccttttccttaaaaatattgtatcatagtataatcaatcaagcatatttattatgaaagatatcatgcagttatgtacttgcaagcacaataattgcacttgaactttcatctgtgatgatttatgtgagacctctttatttcaccatgattaatggtaaaaaattattgtagattggccaggtgaatactatgtcaaatacaggttttgtaaagttgtggacacattaagattgttttgattttttggtaggaaataattttttattttttattttgtttagaactgatcctttaattttttactgttggacttgcaatatgccaaaatgtgctccccacccaataaagactccataaggttatccctttggatgtcaattttacaggctgttcacctactgaaggctgttctagatgctttagtgataaaacaaaaatgaaaactttgggaacaactttaggaaagaaaaaagaaaaaaatatttgatgagctttatgctggaatacttgaataagttactgacaacatttctattatttattataaaaagaacgtcctaatattttgttagatatcaaaccaaggggaaaatttcataggctacccatgctttatgataccaactattgggcatttgagagaaaacctgttggtaagatgaatatagctgaaagaagaatgttctgatgtaatgatacaaattctacaccataaaagaatgaaagcaatgtgaaaggtgattaacatcatcaattaatcaccactggtgtgggatgcatgggaggatggggattctccacactagttactagggtctatttctaggagcccctttcaaatcatcatgggtgtggggtgtgatagaggaaagatttctaaacaggcttgctatgtagaagaggaagtacctatcaaaaggaataagactaactttgattaaaagtactttgtctaggttgtcaatctattttatgtctctatttgtcattcttagaaaggtgatcctaaagttgaagaagatccaaaaggatttcttttggggaaaggaatgcttcagaaaaaatgcatttgttaaattggttgactgtttacatggacaacaagaatgggagccttagtattagaagactacatgaagagttttcctttggagatttgctaaggaaagacttttcctttggaagcaagtgattgtaaggaatcttggggaagaagagagggtatgtcacttacgggatatgaagagggtatgtggtgggattgcataaggcaattagaagctggcatggggtttttaatagtagaataagttttatattggacaatggacaggtggttaagttttagaagaataggtggtttggtgattcattgttaggatagtcttttcctatgttgttttctatagccaccaccaaagattcatcaatggtagaagtgtgagagtaagctggggaggagggctttctgaaacccttgattctcaagattgatccatgaataagagctagatggggtagaggctttttttagaaggttgcaagatgggatgaagaggatagaatggtttggttggtaatgatgtgtggtaaattcttagttaaatctttctacttctctttatctataggaagagtagagcctttccttacaagcactatttgaaacccttgggtcgactactctgcattggaagcagtctaggagaggattttaacgttagactagctcaaaaggaggggatggatgtttctaaacagatgtgatgtgtaaaggagaagaagaaacctctgatcatattctccttcatcacaccaaagtggtaatctcgtgatagttgatttattctttgtttggtataattggggtgatacattattgagtaagaggagttcttctaagttggcatgtctcctttgttgggaagaagagggaagaaagcttagagagctactcacctactcctttgtgcttattttggaccataaaaacaagaggtcatttgaaaatattgaacagactgatcaaacaatcaaattgttctctgtataattttttggagtgtgttagagtgcatatggggatttctcaacgtccattgttgactttgttgactgtctaagctctaaataggagggggagttttttttttctttttttcccctctcctttttgtttgccttttggtgtctttgtatatgccatgtatacttggtcactttgatgctcttaatatgacttatgtgagtctgtgatgtggttttctgttggctgtttttgacatttttcttataggagaacataaatttagattaagagcgcctaaggactaacaaaatgtgcttcctaccaactctaaaaacatgtaacaaagaaattatttgcattctgctctctctctctctctctccttgagttgaaataatagggttaatgttctctcgccttaagttgaaataatagggctaatgtttaggatgaagaaaggagagaaaacgtagaagaggcttaagtttttccctgggatatcttaatgctaactatagcagcttgagaagtaaagcccagggatgtatatctatatacatttgttttttcaacaagaaatagggtctacatgatcatttatttcgaaattaatgcttcaattgctattttcttttgttttattgccaggttaaagtggtagatagaactgctattgttacagc

SEQ ID NO: 12212 - DNA, 6628 bp, Vitis vinifera
  Intron number 8 from transcript GSVIVT01022534001 (locus G SVIVG01022534001) derived from phytozome v7.0 (chr-ID chr8 ; pos 4477914 to 4484541 reverse strand)
gtacaacaagtgaccccagatagaagctactttaggtgagttgtcatagttaaattgttataattattgaaaatgtcagacgaatttcaggctcattggatttggataatgagaattccaagggacaaaaagaattaaggtgattgttccagtgcctcataagacccaaatgttattccatttgggtataagcaataagaacaattacaatagaaaggagaagcttaagaactgaataataaacctccatattaaatgactggatatatataatttgtttcattgttgaatccctctcaaactgagtagtaaatattcaataacatagaaccatcagagtttgagggtaggatatatgaatgtgaatcatctgaaatcctatgatggtctagcataatatatttaaggagtagatgaaaaccaaagttagaagcagtttgaatagcttttgaaggggtgcatatgagactgaatttcttgaagtcataaattgaagagaagctgcagtaatggttttggggagggaggtgggccacatcctattatttaattcagttgctggattttgcaaaaatgccctgttatttgactcggtgctaatttttcaatgagttcctgtttcttacttttgcaagatataagtcactttcttatagacatgaaaattcaaagtgagtagttaaagattgactggttcaccattggcatacatttaggtcaaatagattttaatgtatgacctgagcaccattagctgtattttattaataggattaaatcattcatttctttgattagatatgaactagatttatgaggactcaactaggaatatttaagtcttttatacgctattttagttttttttgataaataaagaatcaaattgaattaaaaagagctaccaaaagagcgacccaaggtatacaaggaacaaaccttttttcgccaccaaggctcaaacaggataaaaggaaatggagcctcaacaagtgccgaaccatttcaaaaaaatttactaaacgggacaatcatctataaacagcttagactcagaccaaagaaagcaaacaaaatcccttttcaacttttggaaagaaaacaccttgttaccaaatgcaactttgttccttgccatccaaaccatctagaacaagcataaagggcttgctctccaaaccttcttgtgctttttgcctacaaaagaaccatgccatcccaacagagtctttctaatcaacgaagatagcacccaagacatgccaaaaagcataaaaacaacttccataaaacccttgttttttcacaatggagaagccggtgatctatggattattcatgcacaaggcaaaagtgacacctattttctaaagagcgtccttgtctctaaacttgatccaaagttagaactttaccccacactgcctcccacgcaaaaacgctaactctaggttggatccaagaaagccaaattccactcattagaaaagacccgtaattgtctagttccaaaatgttgtagggggatttaacaataaacttgccactctttgtcttttttttttttttttggataaccgaggaaccttccatggccaaacccttagaactctccatggggacccaaaccttgaggtgttgactgccctgcaacaaccagcaccgggtaaattcagattcgaacccaggaccatgtgccacttagtgggaccacacttcccaatgtttgccttcaccaactaggctaccctggcgggtttgccactctttgtcattgaccaaaacaaagtatcttccacaaccctacacactctctgtccttgcaaacatgccaaaaatctctacaggcaatctacctctcaatcattaggaggtctagagaaacaaggattccaaatcccccctcccttcagctgaataattccaaacatcctccacccactcattcttggaaatggctaaagcaaataagaaaggaaaagacagacgcacaacaaatcatccccacaccatttatccttccaaaaaagcaccttctacccattagccaccaaaaagaaatgcctagttctcccaaaatcccaatccttccttatcgctttttacaacccaaccccatacccctctctcactagtattggagtttggttaaaaaaaatttcttatggtcctgggttaaaatatgtcagactggattacatatttgacatcattttctggtttaggatttgttgataccataatcccattatgatattgattataaacccataatattgtaatgctgctactaatttccagtactatggaaggaacttataaaattttactccaggaatgatgatgttatggagtacaggagtaaataccatgtgcagaaagaaccctttatcataaatttcatatgaaaagaagtacaaatcatgtttgtctgcattggtgtcttattttaatacttaatcctggaaaatatgcaattgttaggtgtacaacaatgcaattaaccctaccatacatgaacttatcatcaaattctgtgtcataaaagctttatggcccacaagcactttggagccaccagcacaaggttatatatctatctaatatctcaacaagatgtttgggtgttgatgctttctttttgttttatttctttgattacatggtgttctatgatttatttgtttccttatagccttttggcaccctgtgtactcctagtgtagtaggagtgcaaccccctttattttttgattggcacttgtcaataccttttttttcttttgttttttttaattaggcaataaaagacaatatattaacagcacattagaaagggcacatcaatgtacacatgacatatacaatatgcaccaaaaggcacttgtcaattctatgattacctttttttttaaaaaaaggatacctcaaagacaaagggaaaaatctccatggcttttttgtctctttccatcccaaaaaaaaggtgataccttaacctagaattccaccctttgggtagaagctcccctttaaggcccaagcttctccttgcccatgagacatgaataatttctggtagagatgagaggaaaacccaattatatttctcctccagaaatgaagatattgaactacctccacccctgcatgtctctcctctaaaataaagatgctgaattatggggataatgatgagctcatgaaggcccctctttctttctagcttcattggtacctctctctctctctctctcttgcagaggtgtcaccttctgcctcaatttcctcattaagacaataatagatgagttttttaatagcatcctcaaggataccttctagctataatatcttgatgcttcctcaatggtcaaaactcacttagccattctctctgtctctctctctctctctcacgcacgctactctggtgtcaccctctacctcctacacctatcaagagagtaaaaagcttatttctccttgatcaatgtatagaattgcaaaagtgtgttttttagatcatcctcaaaagtacctttcaggcatataccatattagtgcttaaacacctcccctttgaggtttcactctccatttcaaaccactaaagtaagtggtttctatatttacataatgtcaaaatactctatttcttgtgcatgcagctcatattggcttgcttaagtttcaccttccaccttagttaccttgttgatatggttgagcaatgccttaatcatcttttaatcaatctctagtcaagagaaactcgtacttaaaggtatctctaagcgtaacaccttgatacttacattctctctcagtccctctctctcatgttcttgcatgcttgctccttcaagttctaccctccaagtcaatatgccctattgagattcctcaaaaattactttaattttttttttaaattgagatgataaaatttttttactaccttaatatttttaaacattctttaaaaaccattatctttttaatgtaaccctctaagagtttttgcatttatatagaagttactctattttctgtttttaaaaatagaaaacatgaagtgtatccaaatggacactaagtgtttgtttcttagatcatcccaaagtaccctctaggcatagcattttgatgctcatgtttctatttcaattaggaccaggactcaagaagccctatagatacctcaatgatgagtttggcatcttacttgatatttgtttaatgattttggtttaatagtttcaaggtgggaacaggttggcatatgacgaaactgttttattcatttgataggagaggaggctattagagagtcccaggaaaacatatctatattagtgtgtctatattagcatatttcacaccttgcagacaaccttcactctcctccatagctcacctcaagcttggatgcttcaccatcaacatgacatggctgtcatacttcctcactaggcctttgaatcttgggttcaatattgatatcaacttattccagatcaaaaggatgtctcatagtttcttcccatgtctggaaattttcaataaaacctagtcaaacttcatcactcttcaagaaactgaactatgaagaaatctcaattttcacggtttcactgaacttttcagtttagcatgtcatacataggatgcacttgaaatatccatcctaggtatgatactggtataattaattcaaatttgagttgggtttatactgctgcagattcaaactgatatcaacccatttctacggagtggatatgggatgcatcccatagacaagatgcatgtttagagctgaaatgaatttatgtcagtaagaatgatctggtcaacttgacacatgtaatgaatttttataacaagtgatatgtttaaagtcattttgatttacttttaatttgtgtgtttattgttggaagttggatacaaagattagaactggctgaattgctattcattttggtggttgggtagctagatcctgtgggagattttttgaataaatttattgtgcatgcattcatctttttgggtgctggctttttgttagcactctgccttgtgcatgcaataccaaggccttatggagggcactttgactccgtgagttgcctatgatttcggcaaggtgaatgaccaaggcagatgggacttgcatatggcttctggctagctaggagatgagcacatgctgctggcatgcatgggcagcaagtgacatgagcagcagatggctcacactgttggcactcatgggcactgttggtactcatgggcagcagatggctcacattgctggcatgcatgggcaagtaggaagccatgcccaaccaagggcatgtgcaagggcctcaaacgtgggcaaggggtggtagtgacccttgtcaagcaagcacacacacatgagcatttaagccatggtgtgtgatgcaacccgtgggcgcaagtgtgggcacgaaataagcattggttggttgcctcagctagaacatgatctagagatggtgatgcacatgagaatgcttggcacgcctaagggtcaacagagagcaatgggagccaagggcaagcttggctcaaaggaatgctgctaagtgcgcgagtaagagagggcttggtacacacaatctgcctagagacacttgctacaaccctatataagatgcaaagagcagtcttatatagtgcagggttggtgcttggatggctgaggtgtggactgagtcttaaggagggacacctggcctaatgacttgagtcatgcatacttgagagcatctgggctaagtttgcacacctagcaacacgtgggccaagcacttggcagagtcatgacaaagtcgagatgggcacttggctcgggctgatcagatctctctaccacacaagcaagtggagtaacccaatatcggatgtgtatagtgggatgtgttgagcttggacgcatggcaacaactagaatgggagaagacaatttcaaagggctgaagcagttggatggaagacttttgaaattgtaaacccgtttgtgtaggattgttccttgataggtggttccactagcctatataaagagggctggagacccttctgaaggcattgaactcaccaagcagaattgtggaagtcttagctgaaagttgctttgtatttttataaagagagtaatatacaagttggggagttttagccctgtaatctggtgtgctttgttggtttcctctgtccctaatctcgtgtatcatcattttggctggcttagagggcttctaagcactgtacagacacgaaaatttgaaggaagaaaagtcgtctatgacacttttccatcattagcttgtcccatttcaccattaaaagccatgttccaggttacaagtagtaaccctgcaacaataaaggcctggatgatagtatcacattaaattttttaccctgggtaactacactggttttgtggcccagagacattagctgcctccccattaggagggatccctggatcaagctttatatcttgtttgcatactattcaatctgtgttgtcccccctgattatacaccttccaacactgacaacatgtgcaggacaatagcaaat

SEQ ID NO: 12213 - DNA, 1980 bp, Vitis vinifera
  Intron number 1 from transcript GSVIVT01024384001 (locus G SVIVG01024384001) derived from phytozome v7.0 (chr-ID chr1 6; pos 1898920 to 1900899 reverse strand)
gttaagtgtgctcgagtggtcgtccaagatctgccaggcgagtggaagctttggtaatggttggctactgcatctgagatttatagttcttgatgtccgatgttgtaatacatccaacatgatcagttcaaatgattctaatgccaggtctaaacctaattttcacattagatcctatcagatgttgtgcttaagtttatttttactcaattattatcgacatttttttatgatattgatgatgatgatgataattttgtttagtagccccatttggaatgacaaagttgaaccatctaagtatatatatatattgagtaataattattaacataatatttaagattatgttgcaatttttttataatgaagatataaaagagtggttaaaatgaaatgttgacttcaaatggaaagcattcaattttaagataataattttaagaataaaatttaaaataactacaatcttaaaattattaatgataaaaatatcagtttttacagatatattagtattgaattttacaaatatattattatatatttgaaaatattagtgaaaattatgacaaaaatttagatgacaaataaatggatcaaaaatcataaaaatattgaaaaaaaaaaactttaaaaaaatgatagataaaaataataatacatttattaaagttgttttgacaaaaaaaaaattgatattatgtgggatataatatgtgatatttgataataatatcttgtgtgtttataagaaatataaattttgtgaagtatatacttaatattaagcatttgatttcattaaatatcgtgtcaataatttatacatattgtcttgtaatagtttcttttactattaaaattaagatcaatgtggtttcatgaaactagtggattgaaaaaatatcatcttaatggagataataatcataacaaggcaaaataaaagaagcaacacaatacatatattaaaattatttaatcaaatttaaatatatgaataatatagtttgtagtatttcataataatatatagaattaaaaaaatacatttaatactaaaatgataatttatctactttatgacatatgtataattatttttctattttaaaatatttataattatatttataaatttatatatgccttttatatttaatttattatttttataagcaactaacaatattggtctttgaatattaaatattttttatttttctttcttcctgtttttttcttcttctttatttctttttctaatttttttttctttttgttttcaagaatttgattagacaaagatgattattttattaaatgccattgtagataactaaataaaaaaaaagtgataaaacaaaaaaaaaaagatatgattaagggaaagaaataagcaagaaaatataattttgataataattaatataaatagatatttaaagaataaaaataattcctaaataaaataataagctttagatttaaaaatattaaggaaaaaaatatatatgtttgacaattaaaaaataaataataattttttatttttaaaaacaaaaataacttattttttgaaaacatttttttattatttttcaattgtctcatgataattaattttaaaaataatgttataaatatgatgaccgattaaaaataaaatattacatgcaaaaagctatatttaaaaaacaattaaaatatagaaaagaggttccaaatatttcaagtttatgagaataattttgaaaaagttagttttcaaaatcgttttttaaaaacacttcccaaaatgccaaacaaatatgaaaaatatattccttttattgggaaaaaaatattttctcaatttttgtatacctatctcatgagttaaatttatttcataaaaaaaaaatgttgaaagtatttatatttaatccaatatatatgtggtaccgacaattataaagtcacgtgatggaatagcaa

SEQ ID NO: 12214 - DNA, 8191 bp, Vitis vinifera
  Intron number 29 from transcript GSVIVT01007560001 (locus GSVIVG01007560001) derived from phytozome v7.0 (chr-ID chr 17; pos 12061945 to 12070135 reverse strand)
atctactcttttctatcttcagaaaatctttccaggtatttttctgattgtttttgaaaattttgctcccttcccagttcatttgcacgaggattataatgttgtagttcattgttctgtacttgtatgatacaaaaaaggttgttttcttacttggccttttgttaccaagctttttactttgttgaccaattctgtgaatgtttacaaaactaggagattttgatggtcatgtaagtcatgtttcagaaatttatgtcattgattgcccatttttgtattgtttggctatccatggtgtagtttgttaggttattatgcactaattggttttgtttgtctggttggatatagtttgtttaactacactccttggtttgggatggttttgaatccttgctctatagaaaaaaaatcctaaatcctagaatacaattcttgccaaaatcaataaactcttatgtcttttctcaactagaggattgatgttctaggcctgaaaccagcaattttagaggcacaagattgggattaaccacaggaagctgcagttaactgattagtgaaactgggtagaaaacaaaagaagataaaagaaaaacactgcagaaaaaaaaggcagtccataaaatggagactgcttttattatatcttttatttcttccatacaagtagatttataggctaggttttgtgaccacagccctttattttaggagattcaaatcagctggattttaggagattcaaaccagctgtaatattagaactaacaattagaaatagaaacaagttgtgaaaagagagaaaagggagaatccctaatttttgttattaaaaaaactgttaataatacacattggacttggatatatatatatatatatatatatatatatatatatatatatatatatacatgttagtgggacccacaatacaataaggaaaaaaaaggaaaagtaaataactgaaataactgtacactatctaacactctccctcaagctggagcatatatgttatatgcaccaagcttgttacaaatgtatttaattctaggacctctgagagatttagtaaaaatatctgatagttgatcatttgaattgacaaaactagtcgccatacatcctgatgcgatcttctctctaatgaagtgatagtcaacttcaatgtgtttggtcctttcatggaagactggattggatgcaatatgcaaagcggcttgattgtcacagatgagcttcatctgttcatcctttccaaatctcaactcccgaagaagatgtttcagccatatgagttcacatgttgccagagccatagctcgatactcggcttcaacactagatctgaccatcttgtttcttactcttccaggatattaggttacctttaataaaaacacaatacccggaagtggaacgtctatctgtgggtgagccagcccaatctgcatctatgtaaccaacaacctgggtatgatctctgttctcgtacaacacaccttggcctgatgtgcttttgatatatcgaagaatgcgaattacagcatcccaatggctatcacatgatgactataggaattgactaacaacacttagaggaaaagaaatgtttggacgagtaatggtgaggcagttcagtttaccttcaagtcgacgatatctcccatgatttcctaaaggctccccctgtcctgatataagtttgacatttggatccataggactgtctaccggtttacagtctaacataccggtttcttccaagttgtctaaagcatacttcctttgggaaagaaccatgccagaactggattgagctatctcaatccctaagaaatacttgagtttccccaagtctttagtctgaaagtgggtgaaaaggtgttgctttagtttctgaataccattctgatcattgcctgtaatgacgatgtcgtccacataaactaccagataaatacactgcctcgaagagttatgatgatagaaaacggaatggtctgctgtactgcggaacatgccaaactcctgaataacaaaactaaaacggctaacccatgctcgaggagattatttcaagccatatagagaacggcgtaacctgcacactaaaccagactccccctgagcaactaaaccaggtggttgctccatataaacttcctcagcaagattcccatgaaggaaagcatttttaatatctaactgataaagaggccaagaacgcatagcaaccatggagagcaatagacgaacaaaagttattttggcaacaggagagaaagtgtcaccataatcagaactataaacctaagtatagcctttagcaactaagcgggccttaaggcgatcaacctgaccatcagggccaactttaactgtgtagacccagcgacaaccaactgtagatttactagagggtaaaacaacaagatcccaagtgccattggagtgtaaagcagtcatttcatctaccattgcctgtcgccagcctggatgggagagagcctcaggggtgctcttgggaagagaaacagaagatatagcagaaacaaatgcagaataaggtgaagataattgatggtaactcaaaaaattgtaaatgagatgaggattatgagtagattgattaccttttcgaagagcaatgggtaagtcagcagaaggaggcagagtcggggcaggagtagccaaagggataggaagtgagttagcaggtacctcggccaaagaaggagaaacaacgacatgatgacggcaatgataaaccttaagtgggcaagaaggcactgcatcaggtggggagataatgggaaggggtaagacttcagaaacaagaagagacttagaggtggagaagaatggtgagtcctcaaagaaggtgacatcagcggagagaaagtagcgatgagtctcagaggaataacaacgataacccttttgaagtctggagtatcccaagaatatgcattttgtggctttggtagaaagtttgtcctgtccaggagtgagaatatgaacaaagcaagtacaacaaaaaacacgaggaggaaggaaataaagtggttggtcagggaaaagaagggaatgaggaatttgatcatgtaatacagatgagggcatatgattaatcaaataacatgctgtaagaacaatgtcccctcaaaaacgaaaaggaacattactatggagaaggaaagtacgagttgtctcaacaagatgtcgattctgacgttcagctaccccattttgttgaggagtataagcacaagaagattgatgaaggatctcatgttgggacataaatgaagtaaatggtgcataaaaatattccctgacattgtcactgcgtaacacacgaatagaaatattgaattgggtttggatttcagtataaaatttctggaaaatagagaatatctcagcttgatttttcattaaaaataaccaagtacatcgagaatagtcatcaatgaaagtgacaaaatactgaaatcctaaagtaaacgcggtccgacagggaccccaaacatcagtgtggacaagttcaaaaggagactttgccctattattcaaacgctttgggaactagacacaagtatgtttcccaagctgacaggactcacacgcaagcgacgacaaagatgaaaaacgagagaccattttctggaacttggatagactagggtggcccaggcgactgtggatgaggaggggagcatcagtggaaatgtaaattgcaggacttgaaggcgaggtgaggtgatagaggccttgagactcacgtcctatgccaatcgtcttcccgtactccaatcctacaaggtcacaaatttatcagaaaaagtaatagagcagttaagagtatgagtgattttcctaatggagataagattaaaggaacactcaggagtataaatgacagaagtgagaggtagagaagggagaggatgtgtcaaaccaatgcctttagccacagtttgagaaccattggataaggtaacagtaggtaaggcagatgtagtagtaatagaagagaaaagatccttattaccggatatgtgatcagaagcgccagaatgtagaatccaaggtccaagagaagatgtgtgggtaagacaagcagaagcattaccagtctaggcaactgcatagttctgaaaggcacgcctaggcttagggcggcgcgacgccaccctccggcgcctcgcctgaagaaaggcgacgccccatcacgaaggcgccgcttaagcgtgcaaggcgctcgcctccggcaaggcgcgaggtggtcggccgagtcgcctccgagggtccgaccaggtacacactcctccttctccttcttcttcttcttcttcttcttcttcttcttctccctcctaccgtcaagttgcagagaggaggcgggagccctaaatttttttttttatttgcttggcccaaaacgacgccgttttggaccctgttcatttaaaagaacagggaccaaaatgacgtcgttttggagcctgttttttttttaaaaaaaaaacaggccaaaacgacgccgttttggcctgttcctcccatccagcccccttttctggctttctcaacccgggaccattgccattctttgccctagcctcttctgtgttagagaagtgaagaagaagaagaaaaagaagaagaaaaatagggggaaaataggagaaaaataaaggggaaatagtcacgtaccttccagacctcggtatttttttttttctgcatttttttccattcttatctcataactctcattggtaattttaaaaaaaaatataaatattatattttgagtttttgacatgaaaattttacaaaataaaaagcactcatatgcatatttgttgttaatgtgatatttgataatgtgatatgcatttttttttcaattttttttctgaatttaattataattattttattgtagagtatagataatttgtttgcaagatggataatgagactgaaactcaagtggactcatattatataaaaatatatatgtaaattagggtgcgcctcacttcactaaagcccgcgccttagatgcgccttgcgcctcaggctccaagactactttgcgccttggtgcgccttgagccttttaaaactatgggcaacagaagcaacagaagttgacttagtggcctgatagcggagatagtcatcatactcactgtcagtgagggaaataccctgagatgtggaggaactgggaggctgaggtgactaaggatcagatgactgggccacgtgggcaatgcggggaggccacccatgtaactgataacaccgatcacgagtgtggccaaacttattgcaataggtgcaatgaggacgttgacctctacctcggttaccactgcgtcctcctcgagagttagtttgagaaactaacacagaagaatctgaaatgttatcagatggcaaagtctgagtggaagagatatggaggaggcgagcaaacacatcatccaaggatggaatggaggaactgccaagaatctgatcgcgaacagtctcaagatctggacggaggccaataagcgtaagaaccatgaagaacttgtcaatctgtattcgttgatccccaacatcagtagtaagaggcatcacggttaagaattcctccttaagagaggcaatctggcaaatataagtagataaatccatgtcttgtctgacattgacaatagaagaagtcactttataaagacgttggatatcattcgtgtatagccctttcgcctaattccaaaatttaaagcatgttttgtaggcccgaagatgaagcagaatcttaggatcaactgattaccataacacactacataattgtgcatctatcttcctccattgtactctgtcaacctcagggatatccacctcctacgtaacaaggtgatcctcataaccttgacccataaaccaaagctccacagaggcagaccaggacaaattattttcactgccaaccaatttctccaaagtaatcataggagatccagatataacagaggaaaaaatggaacttttagtagccatatctacttatctgaagaatgaaatatgtttggatcgaagagagccctaatacggcttcagatcgcggctaaaagaagaaaaaccgaggatccacggctatgagagaccaaatagtaaagaaaaacaaatgtggcactactggaagggtagaagaacacttcctaagacacgtgcagggctcaaggtggagaagaggtcatcggaggtcgccgaaaaggttgtttagagggccgacggagacaaaaaccccaaaaaatgcacttgcagggctcggatggcacaagcacagatggagggtggctagacggagtcaggcgaggctggaggtagaagcgcgtggccggaaagtgctccatgctccctcacgcaccggcgtgcaaggtttaggccgttggagaagacacgcgcgtggttggtgcgtgactgagaatctcccaccggtgcgttgacaaaacttgaagatcttctacttgctcacctgatggtatggttggtgtcgaaaaagggcttcgccggaaaaagtccccggaaaagtcgccggcggtgagggttttctgatgacgatgtggttgatcggaaagctttaggagatgggaaaggtgaccggaatgaaaatggtcactgaaaggtttcccagaattgattcatggataaatcgaaaataattaggtttttttctccctacgctctgataccatgtgaaaagagagaaaatggagaatccctaatttttgttattcaaaaaattgttaataatatacattggacttgagtatatatatatacatattagtgggacccacaatacaataagaaaagaaaaggaaaagtaaataactgaaataactgtacactatctaacacaagtaacataatctctcatatttagaaaataaaccaaatcttggattttatccttatttagagaataagaattatccaagattctttgcaattagtagtcttcctttggttgtattgtgatgccatctaatgcatgtatgcatgcgtccagatgcaagcaatgcattaatttgttacttaaattataagttggggtatgctagtcttactagcttttttaattatctgtggatgtgatcaatgctcattaaatgttgaaataaatgagtggcaaagagtaaaataaatacaagtgtttttccatacccattaaacattttccactaaccaagtgataaaaattgtagtgagaaatggtaataaaagtaggtatttccttgtaagattgttttgtaactataccttgaaaatcatgttgtgagctgggtaggagcatgatgggattcatgcataagttggttcaattagtttagtgaattctattgctttattatcaccctgtggtatttatgatctcatgatgttggttcataagtttagtgaattctattgctttactatattgaattgtattgctttattatcaccttgtggtattatgatcttggcggtttttgaattctaacctacatcctatgattttttggaactgaagttgtgtggattgcttttcttttgtttaacatttgaaatatgtagtctcttatattatgtgtgcacagataaggtcctagttttttgcaaggtcactgatctactaaccacttatgtttgctagctataatgttgacacgtttttaacatctttttgtggcttttggctgatgatcattggttttcattcatggtagatattgaattcaacatattatttagttcttgatgtcattgttttgagtgtgtgctatgaaagcttgtctcaatttgtatctcagacatgctacaaaccagaagcagctatttcaatgtggtgacccacttgctgaccagttgttgctatgcatgtccactgtagcttaacaaatatctttcatggattagcatctgccagtttttaccattacttgatgtttggctgtgacattttagttgggcattatgtacatggtggctgagacatcaatgcaagggttcattgtgtaaattgttgcattccgtttcattacttctggagttattttatatgatatctgatcgatttatttattggatatagctgagaaactttctttttccattatag

SEQ ID NO: 12215 - DNA, 19067 bp, Vitis vinifera
  Intron number 2 from transcript GSVIVT01016158001 (locus G SVIVG01016158001) derived from phytozome v7.0 (chr-ID chr9 ; pos 20108532 to 20127598 reverse strand)
gagggtaagatttgttgcgctttcatcattggttttgctgttgcatgcactgtatttcaatgcagtgccattaatgaatcatcaattcttttacttttttattttttgttattgagtgtgaatttgttggattttgttttgttttgttttgtttttgttaattggtgtaatggaaaatggggtgtcactgattttgatttgaactttgtttggttcctgagaaaggtaggggataataatgaggaaagtataacaattgggcaaaaccagaaaacacatgcagatatttaattgaatgctggatgagaaatggaaccgcaaaatcatttctgacacatgggacttttaattgttgaaatgggaggctggtcgtgattcaattttgaattcacctctgtttgatttctcagaaaggaggggaaaataatgggaaaagggtggcaattgggcatatctgaagatttgtgcagaaatttcattaaaggcttgatgggaaattgaagtgcaagatcatgcaggcagattggatgtgtgaattattgcaatggaggctgggtcgcaattcatctgtttgatttctgagaatggtaaggaagaacaatgggaaaaattcataaaaggagcaggccagaagatatgcctaggtattaattgcggcagaatgagaaaattggatggcaaatcaatctgaatagtcaggcaaaactggaacgattttgaagaagagttgactggatattgagaagctgaagaacaggatggccaatacggttatccaaatagtccatggaactttctacaaagtgagaattacaagacttccttactgatatttgacttagtccacgtaagactaagatttgaacatgtctttgatgcagaaataactgttagaagattcaaggacggtaattcttttattgtctctgctccctgggaaaaattgggtttcttctggatgctacacccagtcacaacatcaaagttcaaactggttcaatacatggtcaagagttggaatgcttgcaaattgaatgactctcgtccaattcgtgatgctaaattgttcagaagtttgtcttggacatgtttatcttagactggatggtgtgcttatcagaaaagagagggtgctggagttcttattttcaataagagaggttaaattcaatctgcacttcaaaatggtgaagcattggtgctaagagaatgactgaggttagtgcaagaagtgatttttgctggtttcctagtggacaagatgctaaaggggtgataaaattttgtggaggataaaatgagtgtttccttgttggttggttaaaggctgacctgataatgaatcatcccaacaccattgcagccatcttgaaaaaaaaataaaaataaacaaagatagggaaaaaggatggttgttacaggttcttgtaatgatattgcttctgtttcttcaataatttattttcgtcacttcggttgaattactcaaaacttttcaatcaatattaaaaagaaagggagaaaaaataaagaacgcccaacagattaatgatgtatacttaatacccaactacaaaaagtgatattcaattcccttaccacaaatcttgaaaagacaggcatttgtttgataaaaaaattagttgagagagatacccatagaaaatccttgaaaaaaagggtttgaataaaatttctgtttgagcttgaagaggacatggatggtggtcataatggttccaaattgttaattggaccccctttttatcaaaattctcatgggtttgtcttgaagcattgacaacaagaggttaagcttttagaggaagggcttgtttcacatggtatcaaggggctggtttcttgttaagagtggtaggttttttcttcgcattttcttttctcttgcttgccatgtggcctttttttattcttcgtgtgtactttgatgtgccattttgtaagtgcttttaatatattctccttatttgcctattaaaaaagatgtttctttgatgcatgagcctgcgtaaatgtgctgtgtttgtcatgattgttcaaacaagcggcatgtgggtgcactggaaaaagtatcccctttttgcccgaccctctcatagtcatcccttcttccagatttatttattttttaattatttttttatctcatctctatattatttatttatttttatatttattatttttttacttcatgtttaaaacttgtgattttaatttaaattaataaaaaattacaattttaaatcaatttctgatttaaaaataagttttttttatttaaaaatgaattttaaattaaaattatgattttaattttaattttaaatttgaaactaattttttgattttcaaataaaaaattaatttttaaataatgtataaattattatttttatttttataattattttaaattttaataatttataaattatatatttatgacgtcaccggttcgaccagtgaatcgtgaaccggtaacttttttggttcaatgattggttcggttctaaaaacattgattataactaaagacattgtgttgtaatgtttagagtgatagtggatccgctgactggggatgctcttaaatgtgtagattggaagttgtactatggggttgttataggcatagttggtaacttgtaaaacttattgtgtttcacttttctatttttctatatcatgtatcgtaattttgatatagtgaaaaagaaatagaaaatatatgcatatgtgtgcattctattgaaagtattaagtatagaataatatatgactaattttatgaaagatgataggatctaaagtgttaaaactatatcatatcatatgaaaacattgaatattagagttttgacaagttcagatttacaataatgactttaatatatagattcatcatatgtgtatatgccattatgtgtcatattcaaagttctaagttttcaggttcttatgattccttccccaccaaaatagaaataaaaaatgctaatatattaagtaaaattttttatttgccaatcaccatcatttttaatgtcaatattcaaacctttcaaatgaaaatttcctaatatttatcacaaaaataaacttagttcacttctaacataacatttgatagcaagaacgttgcttttcatataggattgttttacctatttctcctttttaggatcaatttttaatcttttagtatattttaaacaattaatacaataagttattttaataaaaaaattatggaaaatagttgaagatgtatatatcgttgtatcatcatataaagtatcatatcttgcattgtatatgtatcattagatacgctttatggtaaggtatgaattggattacatattgattttcgtaaaaaatgtgttgtattgttgtattgtaagttttgaacaattatggctataggttcttagagatggttttttttaaccattgtgtttttatttctttaacatgtctgtgtgtatattaaattttagctttgggggtttccaaatcaaaccctttaagttggaaattatgatagcgtgcgatcttttatttatttatttatttttgaaacttagttgatgctattggaaaatctttgtaaatattttttaatatacaattctactctcaagtcctagctcaagtggcaaggacttggggtgtggatatgggagattcatggtttgatttctaggaaataaaataaaatgttatttatatgttggagattttgggaagtgattcgaaggatccttcgggcaaggagttggtgattggagttgggtagccggaaccctctaaggaattgaagctttattgcgtttttggagggagatgttagccttcccagaaagtttgtaaattttagcaattatgtggggatgctagtagcagggttcgagaaagagatcaattcccttttgaagaatttggaggcaagaaaagggtgtggggtaaaggttttaggtggaaggaggaagcacctcctgacatcccattttgagagggaattacttaaacttgaatacttgattaactacgatagttcttcgtgtactttcaggtggaaggaggaagcacctcttggcaccttgttttgagatggaattacgtaaacttgagtgcttggttaactacgatagttctttgtgtactttcaggggaaaggggaggagcactagggacacaacactcgtgttgtgaggttgttgctttgttttgttttagagggtttgggtgggggttgggttcagggggctggtttcttgttaagagtggtaggttttttcttcacatttttttttctcttgcttgccatgtggcctttttttattcttcgtgtgtactttgatgtgccattttgtaagtgcttttaatatattctccttatttgcctattaaaaaagatgtttctttgatgcatgagcctgcgtaaatgtgctgtgtttgtcatgattgttcaaacaagtggcatgtgggtgcacccataaaagtttgccgaggacctgaggtaggaattaattggatgctggtgtgcttgtgtatactagattcaacgatagagggaattgccatttgggacacttgactattactacgtttgctcctaaatcgtccaaccaactgcacacctgctgtcatactattagttcaagatttttcatggctagttggttcttgtccatataactcttataaatgggttaagaggtcatcataaaagggattgaattttattttttgattgatctaaattctcttagttctgttctttgatttttctcctagaaatttctactaaagaaattgtttagggggctgctattattgcctccaacttccttttttttcctttgattctactatattcttcattcaaattcaaacaccttgctgtcaatgtggctgacctttgacaaataacccctgtttggacaatgcttttatgctggattattacctttaaaaaagttcttctggctagaatatgttgatagggctcaaaccaaagttgctgggtgaggaaggagaaaggggtctttagagaagattttatgggagttggtaattaaagtttagcttgcatttagtttggaaaatatttttttagtttatatttctaaaaacaattttcattttctattttttttttttaaaatgaaaatggtaaagtcttgattggtgttgaccgcctattcagatgaaaaacaatgaaaatattgaaatcgcatttgttcaatttccttttcattttctttgctctatgttttatttttaaaatcgtgtaatgagatcctaatatgcttgtaattacaataataaaatgcattattttctaatataaaaaatatgtatttgattcaacctaaaatcataatagtaatatgaatgggatcatcatttactacgtgattttagtcatatttatgctcctttaatatttttaatatttatattgtgggtccctctgttctttaagttattttgttaatttttctcccccaacattttttttttgagaatgttttacaaatttcttaagaaaattatataaacaccaaatttttgtgttttcactttttgcctttttgtaatttagtttttcccaaaaatgaaaatgggaaaaaaaatatctaaatatgtttttaaacttgatttctgttttgtttgaaaataaaaacaaaaaacaatctaaacaaacaggatcttaggttctttatttccaaatttctgagaagtcattaagttgatgaggtgtaactcacaaatcaggaagacacctttgtttgagtgtggaggttcattgtggaggcatcttaacttaagcaagaatgtttggctgcatgttatggaggtcaattgcggaactcatctttatagaatgagtgggtcactattgccgaaatttggagaggagcaataaaacctgacttaaatgttattttgattaattaaactcaaatttatctgagcacatcaccaggggataatagagtgcaagctaagagagaagcagggagaaaaattaaaagtcaaggttaggaaaccccttggcaatactttgtggttgaaaaagaggttatgaagctgtattctatttttgaagtccaaaaactaattaaaattaaaaatagctacttattagtgctgccctaaaataataaaacttaacccattaagatgttttaatcctggctgttcattgcttatttaagcttatcacatggtgcatgatggactcttgggctgtgcatcttatttttgagcagatttcaagaattttgggtggttttaaagaatcaaaaactgttagtcatcttagccactgcatcagtgccccctggttagaagaaactcgaccttgagttgctaatatcatcattcttgggccaccttgtatggaagtagctgctcatctgattataaatatgggttggcaacttcatttggtaggctttgtcattgatttagctaacaatcttgcatgggccaatgtttttgacacgaaatatgggatgaaaaataataagttttgtgtattagattgactatacacacagtttatatagaagattacaagagaagaaataggaaacaagagacataataagaaactaacttattcctaaaccaacttattcctaaatcatgaaactatctatttacagaaataggaaattaacataaaactatctatttatagaaatagaaaactaacataattgaaaaataattcttctattctatttacagctcaacactccctctcaagctaaggaatagatgtcttccattcccagcttgaatacaagatcgtgaaacattgaactgttcaacccttttgttaggatatgaactaattgatgttctgatggaacatagggcatacatactactccttcctccaatttttctttgatgaaatgcctatcaatctcaatatgttttgtcctatcgtgttgtatagggttatgagcaatattgatagttgacttattgtcacaatagagcttcataggaccatcccacttgattctcaaatcatctagaataatcttcagccaaagtagttcacacaacccttgagcaatgaccctaaagtctgattctgcagacgaccttgctaccacattctgctttttacttctccatgttaccagattacctccaagaaaagtacaatatcctgaagttgatcttcgatccactagggaacctgcatagttagtgtcggtgtatgcttctagagcaagagtattgttcttcttgaacaaaattcctttcccagggttgcctttcaagtaatgcagcaccctgtaagcagcttgaagatgaagttctcttggatcatgcatgaattgactaatcacgctcaccgagtaggcgatgtctggccgagtgtgagcaaggtatatgagcctaccaaccagcctctagtacattcttttatccaccactggttcttctttagcttttcccaacttgtggtttggatccattggggtagagactggtttacacccaatcttccctgtttttgccaataaatcagtcacatacttttgttgagagatgaagatcccttgtgtggaatatgccatctcaatactgaggaagtacttcagtttccctagttcctttatctcaaactttgttgctaatctctgcttcacttcatgtttttctctcttatcatttctaatcactatgatgtcatcaacatagactagaagaacaattactccccctgcaaccgagtgcttaatgaaaagagtatggtcacctaggctttgtttgtacccagactctttcgtgacttttgcaaatctccccaaccaagccctaggagattgttttagcccataaaaggcctttttcagcttgcacaccttgttacctgtgtttctctcaaatcccggtgggatgttcatgtaaatcttttcatctaaatcaccatgaagaaatgcattcttaacatcatactgtaggagttgccaattgtagtgggcagctagtgacaacgggattcttatagtattcatttttgcaactggagcaaaagtctcttgaaaatcaactccataagtttgagtgtaccctttggctaccaatcttgctttatgtctctcaagagatccatcagccttatatttcactgtgaaaatccacttgcaatcaacaatgtttttccctttcggtttttcaataatctcccatgtttttattcttttctaatgcactcatctcctctctcataacatccttctattccctttttgtcaatgcctcagaaacagtgttagggatgatagtggtgtttagactcatgataaaattcttatgggctagtgataagtgcttaagagacacatagtgtgatagtggatagagtggtcggttagtgcattctctggtgccttttctaacaacaatgggaaggtctaggtctaggttgtctattgagtcagtggaagtttcaccaggttgtgtatgtaaaggtgggtttgattttaccgtgatttcattcccagggtctgagttggattctttgacctgcttttgtcatggaatgaccttttcccttgaatataccttaggaaactgtggaaaattgcgagtgacactggttggaataggggatgacacgggttcagtggtaaaattgggtgacttaggtgtgattcactcggatgactcaggttcttcatcaccatgggttgagacatgaggaaggtcaagaggttcaaaggactcacaaggactatcttccatcattggaatctcctcttgaagaaaggacttggggaaaaaaggtttattttctgtgaaggtgacatctgtagagatgtaaaattttctggatgagggattgtaacacttgtatcctttttgagtggatgagtaaccaaggacgacacattttatggctcgggggtctagcttgtctctatgttggttgtggacatgaacaaatgcagtgcacccaaataccctaggagtgagcccatttgaagttctgaagtgtggatagaaactcttaagtatctctatgggacttttgttgtctaacactcgtgagggaattctatttatcatgtatgtggcagtaagaacagcttgcccccaataggacttaggaacattcccttgaaagagtaaggctcgggttgtgttgagtaaatgcccatttttcctctcaactaccccattttgttggggtgtgttaacatatgatgagtcatggagaatgccttgtgattgaaaatagggtgacaaaatctggttgaagtaatctctacattgtctgtcctaaagctttttattttaaccctaaattgtttttgaaccattgagtggaaattaggtataacaatgctaacatcagatttttgtttaagaagatccatgtaacccgaatgcagtcatcaattaaggatacaaaccaacgagtcccagaaacattaggtatagtcgaaggaccctatatgtcactatgaatcaaatgaaaaggatgagaacttcttttattgctaataggaaaagatatacgagtatgttttgccaattcacaagttttgcaatgaaactcagaaatatctaatccttggaacaaatgaggaaacatgacctttaaaaccctaaaagatggatgacctagacgtaggtgatacaaccaaatggtatctttatttgaggaactgagaaaagacaatgaaaaattattactagttttctgagatgattcaaggtggtaaagaccgctcctttccttagcaaatccaatcctcctcctcgagccttattcctgaaaaacaaaataagaagggaaaaaaatagcataacatttaagatcatgggcaagcttttgaatggaaacaagattggctgacaattttggtacatggaggacatttttaagaataagggtaggtgtgatgtatatgtctttgaaacttgcaatggtagctaaagagccattgtccactgcaattttcttattacttgggcttggggtataggtatggaaaagttgagatttggaggtcatatggtctgtggcactagagtctattatccaagagtcatcataaaccctctgtgagacatttatgcaaaaagagagtgaaggtgtatctgaatgagcaatcttcgacatcttccacgaaaaaacccgatctcttgggaattaaggcagatcgtgaaaaaaaaaaaaaacagtggcaatgaaggttggtaaaagaacacgtgaaacaaagaaatccagttatgaaggccagaaaaatggtgatgaaggccaaaatgatacccatgtcttaaaaacctacaactctaataccatgacacgaaatatgggatgaaaaataataagttctgtatattagattgactatacacacaatttatagaggtgattacaagagaagaaataggaaacaagagacataataggaaactaacttattcctaaatcataaaactatctatttatagaaataagaaactaacataaaactatctatttacagaaatagaaaactaacataataggaaaataattctcttattctatttatagcttaacagtttttatttctgatattgttgtccacacctgctggaatatgatttgtagtcaaaacagcccagacatagttcccctgcctcgagacaaccttgcatctatgagaataagctcaagctttgaatcttgcactgcttctttttgtttgctttcttacctatgtattgagtgataaatagtttctgggcgctctttagccttcacattatccttctttgagtttgacataggagtctatacgttttttgaagattcaggccatataccccttcaaatggagaaagtttgagttgtgtgactctttgaggaattgtaggcaaattcagcaagtgaacatatcaaatccaaacgcataggcttgtccttgaccaaggttctttgtagattaagtgatcttctacccgcaacctccttttattcatccatttgcaggtggaaagaagtgctaaaatctaattgtgtcttagtcgtcttccatagtgctcactaaagtgtaataaacttcaaattttgatcacaaacaatggaataaggaacatcatgcaactttgcaaactttaaagaaaaattttgttacagtactggcatctattattgtcaaacaagggatggagtgaatcatgtttgaaaaactgtccactatccaatacatcattgtgtcagaggaaggcctaagtaaaaaatttgtactcagtgctatccatggtttatttgatatgcaaaggctttgtatgaagtcttgcattcgtatttgttcccttaggccatttacatacatggcatcttttatctgtgtctaatgtcttgcctcaaactcggctaatcatattccaccaagtttatgctcttatcatatcaaaatgtcccaaaatctgttgtcgaatgacaattttctcccttggataacaatttgggatacaaaattgattactcttaaagagagtaccattctaaaggctatggtttgcttcttttcagccatacaacatttaaaatagggccaaaataaatgtctttttttgtacaaaactttaagctatcaaatgctaacatttggactggcattctagtcaatgaggaagcacgtcgacacatggcattgacaactttattgttaacaacaaccttgtatttcagtgtgaaaataaattgctgtaaataattcacccacatgctagggctcgagtttaggttttattgattgttaatgtattcaattgctttatggttagagttcaaaataaaatttttaattctccaaacaaggctacctatctcttaattaacacgcaatggtatagaattccaagcatgtgtagtgtatcaaagctaagctttacatcattgagctttatatcattgggctatgtgccatgtctcttgacgaaagacacttttatgctgactttagaaacgtcccagtctactctaaaaatcttctcaaggttaggtaagacaagaataggtggttcaattagtttcttctaggttgcaacgtgggtgggttgggcttcactaaacctgaaccaacttgagaaaagccttagcttaaggaatctcaatttgacctaaggttgggttggcttcaccaactaaagctcaacctaaagctagaccaacttgaaaaaacccttagctacctatctcttaattcacacacaatagtatagaattccaattatgaatagtgtctcaaagctttacatcattgagcttttcacaataaagggctatgtgccatatctcttgatgaaggacacttttatgctgactttagaaacatcctagtctactctaaaaatattctcaagattaggtaagacaagaataggtgcttcgattagtttcttctgggttaggttggacttaactaaacctgaaccaacttgaaaaaagccttgccttgaggaatctcaatttgacttaaggttgagcgggagctatgattgatgcttcaccagctaaagttcaaccgaaaactagacctataatacatacatttcatcatttgatttgtattttatgtccatttggctatattttaaaatgtcaaattttatttttttattaaaaataaaaaaatgaaattgtgattaattactaatagtattttgatactctcactgctagatgtcggtattacctttacttttagaatataaagtagataaagtaatgagagtggtcttttgtgcaagctagacatagagaaggtgtatgatcatgtggactggtcttttttctattggtcttgcaaaaaatgggttttgggggaaaatggattgggtggataaggtggtgtatttccacgaccaaattctctgttttagtgaatggcactccctttggttttttttcccaagttctataggtttgcattagggggatcctctttcgccttatttatttatgattgcaatggagtcgcttagttgttttttgaagagggcggtggctggtggttttttatctggatgtcaggtgaaaggtaggtttggagagggtgttcaggtttctcatttattatttgctgatgacactttggttttctacaaggcttctcaggatcagataacttatttatgttggttacttatatggtttgaggcaatttcaaggttgaggattaacttggagaagagtgagttaattccggtagaaagggtggagaatttaaatgttttacttgctgagcgggggtgcaaggtgtgaagtctaccttccacttatttgggccttccttttggtgctccgtttaagtctacaacagtttgggatggagtttgagagtggttttgcaagagtttgtctatgtggaagcaactatatttccaaaggagggagagtcgctttgattagaaacactatttttagtttgcccatttattttgtctttgttctgtgtgctaagggttgttagactgagacttgaacagattcagaggtactttctctaggatggtggggcattagagcacaaacctcatcttgttaagtggccggttgtttgtcgacataagaagagagagggcttgggggttaaaaatcttttagtttttaataagactttcctttgtaagtggagttgacgttttgtgactaagagaggtgccatttggaatcgggtaatttaaggcaagtatggggaattactagggggtgggcagtttagggggttaaagaggggtatggggttgggttgtggaaagtgatacagaaggagatcttgtgagattgtagtgctcctttgtggtaggcaatgggcgaaaggtgttgttttggaaggataggtggtgtggggataatctttttgtgtgttaagttgggggctggagtccttgtttctctagatcttttaatgattgaggtgtggattatgtggggagatttttggtgtgtttgcaggggcagagagttcgtagggatgttgaagatactttgttttggtcggtgacaaagagtggtaagtttattgttaagtccctttaccttagttggaactggacttgggtgggtcttatccagtgggggccatttggatttcttgggttcaacctaaattagattttttgcgtgggaggtagtgtgaagttttttacgtgggaggcaatgtggggtaagattttaacattggatcaaattcagagacaaggttggtctttaacaaattgatgttttttctacttggacgtgaagaatttgttgatcatttgttgttccattgtgaaatgactagggttttatgggagctgatttttgtgctttttgggtgctttcttcgttggtgagagagatactttgttggtttggtgtggttatattgtgggcaaaaagtgcaagaaggtttgacaagcaacccttttgtgcttcttttggatggtgtggagggcaaggaacaacattgcattcgataatgtggcttcttccatccaaaaattgaagagggattttgtaagctttttgtgggctgagcctaaagtttttggatgattgcccactatctttagtaggtttcttgaatggttgggtacttcttattctgtactcttttgcttgagcttgggtggtgaagggaggtttgtttttcttgtacactttgagctgcttattttggcagctcttttattttaatttaagtctacttataaaaaaaacatataaagtgaaaaagtggaccaactttactaattgtaagtatgatggaaagttttatttcatgttgttaaatattctattatatagaattattgttatgttagctttacatttattgcaagttctatgttattctacaatatattctaatttatatctacaagtgtggaaagtgttagatatcatcgctgcttttcattgatctttcttttgaattcccatttatcatctggttgactcacttcattgatcatcccaaacaatcggatccttttgatgaacctgactttgaaaaagtttttcaaagaaatcatccggttgagagatttcacttcaatgaactggaagttctgttacttggtaggtatccttatttgatcaatcttattgtggttgtcaaatattggattggtgtgggtattttctgtttggtatcctcttcttctaggaagcatgatagtgatctaaacaagacccaatcaacatggctctgttactgccggatgaccaaagttcaagtggagcaacaaaaacctgaccttaatgctgtctagattatttaaactatattctatccaaacacaaccaaaaaggcaaaataaatcaaacttagaaagaagcaaggataaaatgagaagctaggattaggaaatcctaggatgtcaatctttgtggttgaagggaggttgtgaagttatcttatttttgggtgacttgaattattttggctgctgtcaatgacttaaaaaccgttcagccatctcagctacagcatcaggcacttatagcatgctagcctctgtaaaccttttgaaagcaatctatatacaagtatcattgggttccacataacatgacagatttcctattcttgcccactgattatgaacggcctgattctgcatttattggaaaacagtctttagcccgttcttgcttctgaatagcctagctgattatactacagtatgggttgcataaggcttacttgcttagttagtgtaatgaagaagataatttatgattgcaagtcttttaggtaaggacgaagacaaataaatgtagtataagtctaaattaaaagttctgacaatggaagaaatagtaattactagccaagagattaggaagagttactattgttgttctcttggattgttcatttattaggagggattgaagtggatgacatccctagaactaaagttgaaatagtgaaatgcttcttggcagttcaaagcaaggttcaaaatattggccaagtccgatatgagttggcaagttgtatctgcgtcaaacctttccgagttgagtcggatatccaataccattttcaacctaaacttagtcaagaatcgattaaactcggtcgagattccaagttgacttggttgaatcattcgaattatcgaacatttctctagttaaacccaaaaatcatttccccctttcaaatcacaacaaaagaacatctaacaacaacaaaaaactaagaaatctaagaaaaaatagagattctcttcaaaagagaagtttttcaaagaactattgactctatacccacgatgaagaagaagaaaaagaaaacatcccaacaagatcatagatggactctagtgccttcttgtcggagatgtcattgtggtgaccacctgaccgatgaaaaaaacatcaaattcttccatcaacaatgatctttgcgtgtgggttttgcctgccttggttgagttacttcgtctttgtattctcattgatgtggcatggatgtgttttgcaaaggaggccaaactaggtacaccgagcctcggactaccctctttagtttctctctttattttgggatgtgaagaacgtgtggtggtagttggcgtttgggattagggatttgaagaaagggggtaatgtattatgttatataatagtgatttattatttaaatgcacattgcctcataagctaatggttttgaaatggtaaaagaaaaagtgaaaattcaataatttattgttactatataaattgcatcaatttacgtaatatattattctatatggtaattcatatcaatttaggtaatatattattttatatagtaatgttaccatatataatgtagtattttatatgttaatttattgttaataataaattaaatattattgtattaatatatttttaagtttattaatttttttgaagattatttaattctacctatttttttcaataatttttataatattttaaatatcttattttgcttatcatcttataccgagctgagatactagatcgatgtgcctcgggaccctccgaatcagtgtctgatactgcaactttgaatcatggttcgaagttgtatgacattttaattaaaatgagaattccatgagatagctgcaaggtcttgggtgcttgatgggacatgtatgctgggaaactaagttcataagatgattcttggtcaaattcaaatggggaacctgagatggataagattgacaatacaagatggataaaactagaatgggtccctttttgtgaagattgagttaacatctgagaataagatgacgaaaattgaatgagagggtttaatattgtactgtcaagcccaatgcatgcattagcttggagcactgtatatttctggttgacgacattgtggtgtaacaacactaaaaagagtgtaggccatcgagtataggagtcaggtcatggctgcttataccttaaatggaatactcggccttgatggagtagatgggtgaaaaaggaatcctgtaactgacatcttgtagtcggtataagactttattaaaagttgtgctgaggcatcttgtgaatgggggagtgcccatccaacaatttcctttacatccacatatgttaatacattttgttattttctacactggtgcgttgtttatgttatctttgcgaagtaattaatgtgatattttcttttctggttgcaagtgcatttttggatgggcacttttctataaaagtttgtatactgaaatatcttgtcctgtttatttcctttttaatctgtggtgaaatttgatcacctaaactctttaaacggatatgcagctgaaaaccccaaggttaaagttttcttgatacatcctgaatgttcagataagcaagtttgtttgtaaagatcctggtgtcatgcaggtaatcagacattaaggatgtagtatttatgagaattttgtgtgattcaactagagaaatgatgtcatccaggatatagcctgtatagtgtacttgattcaaagtcaatgtactgtttatatctaactgagctgtatgggatcttgtttatgtatcccagcaagggttatttggaactcttgggtgctgcccaaggtgagcttctttgcatgggaggctacttggaataaagttttaactttggttcgcattcagaggatagggtggtccatggaaaacagatttttcctttgtcgtatagaggaggaatcagttgatcacattcactgtgacaagacaagggttttatgacatcttttgtttttgctttagtgtgtcatgggtgctttcctcatcaatataggagatgcttttgagttgacatgggtccttagtgggtaaaaaaaaggaaaacaaagtgtggcaggctgctcctttgtgtcatttttggacaatttggaaggagaggaacagtagagcgttcaataatgaggagcattctgtacaagggattaaactttcatttctttataatcctgggcgttgtccaaattgtttatagctcttggcccttcttctacggtagattttgtggattggatgggatctgttgaggggtgcagttttttgttgtccctctttgttttttggtggcacttttaggtgctcatagcatactctctatgtactttgaggcgctttcttgtgcttctttcttttaatatacttttttctttatccataaaaaaaaatatccaactgagctgtagaactttgtcttttctgtctgtagaaacagtgtttggcaaattctttttgtagatggagatggagttattgtttaagttcataggaagcacttatttatattctttatgcttgatagctccctgcctttttgttagctaatatttcattatccatctcttaccttcagtgaaattatagttgttcttactttctgttgttggattactaactattatgcttaagatgcaaagagaacagttatatgttctggtttggactgaagtgttttgatctttacagcaagcagcactcgtgctca

SEQ ID NO: 12216 - DNA, 987 bp, Vitis vinifera
  Intron number 5 from transcript GSVIVT01028403001 (locus G SVIVG01028403001) derived from phytozome v7.0 (chr-ID chr7 ; pos 7218425 to 7219411 reverse strand)
tagaacagcgagatacagaccagagtcatcggaaggtaaatattaagtacccccaagtccttctatatgtctctgtgtttggatttggcttttgtctgtatgaaaaaaaaaaaaaaatcctgaaaggttgtgtttctattgtttgatggagcatatatgagtaagactttggtattagtatgatatgctactaaagtatacacatgatatgatatgaatgtggcatggagaaccaacttatttcatggaaaaaggcatcacattccttcatttggtgatctatcaactcttaaccaattttttttgtgcttcaaaccagaaatagtgggttcaagaaccatttctccagaatcttcaagaaccttttcttgttctttaacaataagttctgaagaaattatcatgtggttagatcatatatttatcttagttctctctttggtttgtttcttccttctttatagacttaaacttacactaatttttttcttctcaattatttgtttattttgtatttttttgttgataatgggtcttctgagtctaaattataactattaacttaagcataacttttttctcaccaagtcaggcaatgatatactccctggtggccttacttctattattttcttactgatccttctcagcatcttctgtgttacaatgttatagaactgtatattctgggaagcttcagacagtgtcctgaaaagcaaatcaatataatatttcgtcaaccttattattgttattattattattattattatttttgtgtcccttgaatttcttattcctaacttcaatattctttgtagttagtgctgatacattgactcaactttttcattgacagccatagaggagagcaagtaatatttaggaaatttagttgtgatattgggcttttctaaggaagttttattgggttgttttcttatgtttacaggatcctctgagaaaagattgacatccatcgaagaa

SEQ ID NO: 12217 - DNA, 3203 bp, Vitis vinifera
  Intron number 2 from transcript GSVIVT01011334001 (locus G SVIVG01011334001) derived from phytozome v7.0 (chr-ID chr1 5; pos 8691053 to 8694255 reverse strand)
caagaatcagtttgatagttgtgagaaaaataaaaagaagtattttttttctccctcaaatttcttcatttccaattatgttttcgatgtttttgtgtgtggaaatttcaaaataactgatatgggatcaatatctcttgcatcattgtcaatttagtatatagttttttcccttaagtgagccattagacatatggcagttctggaaattaaaaactgatgagaattttgacaagtctgggagctatcccttctatatgaccaagttgcaattttattgctttaatttttctattattgtaggagcaatgtcaagttatgatgtaggaaaatcctaggatggtcgtccataatcaaatttggtaggctagggtttcaataggatttaaggaaaggaacaatgaactaactatatggcaccaaggaaaagaaattaggatatagaaatggaaaatagataagtgagaaaagatagaaaatcttagagcctcgcattggaaattgcaagtcctgcacaaaaattcatattattcatcatcaatcccatcttactcatattagccttatttataggctaataagttactttagcattatatgtataataggagtatctatatcaatgtgggagttagaataatatcagtcccacatgaagttttaaatggtataaaagttctatgttttgcataaggtcaaatttgatcctgactctttcagttctgtgcccatgttcccaattgatttcttttttattgaatttgatattttagctagcatgatttgatggtactgatatgtgatccaactggaggctaaaaaaacatggattccacttgaagttacaagtacaaagggcattattttacattaggggctggaaactggtatccatgaaaattgatttagcaacgtaataccatgagcctcaattcataaacaatgcatgtagtggaacattaaggcacactcaaattcggtacaatggcattctatgaaagaagagcttcaatcttcctatttttggtgcatagcattacatggaaatgaaatttttttatagagatattgaaggttcttttatgtatcatcttttgtatcaaatttgattatacagacactagcactgcatcaaagaacctttgacctatctactttgactgtgccagatttgaaatgaaattgtgtccttgccaaaaagttaagatgtataacaaaggagaaagaagataaaatagaaagtaggtgatctcaaattttttcttttattgattcagaaatactattgtggatcataaatttttttcatttgttactaattatttgttttcttttttgtatctttaagatttaagtttcttttactatcttaagtagcttatttgtggtttataaaaaggtttgtgttcatgtattaattatgtttgatattgcatatggtttatctgtggtctataagggagagtgttttgatattgaattatgttttgggaagtattttctcttgatcttcaccctaggtttggtgctttacttttttggcctatctgtcatgtggtgttatttggtagatcccactatcatttaaggtttagtgttggttggttgatcatatcttttcactagtgatcacttagaagtaaattagtttgacatcaacctcgaggttggaaaattttaacagacaccagaagcaagatttgatttatcttattaaatttaaattcagaacttcattcagtgtttgaaatggttacagcattgtgagtgatagccatccaattatgaattggatatggaaagtggcagtcttgaacttattaaattggagaagaataattgcatgtaacacaactgttgataataattttttattattattaatacgattaaaaaataattgttgtaataacattttgtgctctgtttctctgatgaagtcttcgctatgatgtcttggaagactacaggtagagaagaaggaagtagtatatgacctgacaagtcacatttaggtattccctggaagaaccattaagctcaatgggagaggtagttcctaacaaaagtctttgatggagcagctcctcacttagccaagttatctcctacctacttgccatacctaggcttctactaaaacaagtatgctaaacctctggaagggttgactatcctgaaaattcatgggttgtatctccaaggtcctatccatcctaaggcacctagagagcaatagctgaatccccttccacctgaagattgctattgtccattgagggtttctattaattattacaataattctgggatctttgcctcagtggaaaccaaagccggttggcttaggaactaatggtgcttgaacataccactggtctgcatttgtgccagactgcttgaagaaaagtataaaaattgagcttaagattctcaacaggaagattgcccactcagacctcgtctaagcaatcttcatgtgggaaaaatgaaccttgttctacataatcaagtttatgaaatgcagagaactttttgttagatgccaagaaaattgtgagatagctagctttctctcacatgtaatcaatggatcttcaaggatggtcaaagatcttagtgttcccatcattccaaatcacatcaaaactagcataggccccttcctagtagccttcccaaaggatttctcttgaaacccctgaaatgccaacaaagaactctttgacccttggatttctgtccataatctttttctctatgtaccatcaaatgttatagtttgttggtgtcacagtaacctgtaccatgtctaggaaacttggtgctggcagtgtaatcctttcaaatgtcatatcctagtgttgcagatctgatctttaaactgttcacatagctactatatttttattttttttatgctagcttctgaattcaatcataaaattgttgtgatctgtctgaatttgtggtttttaatggagacatacatctggttagattggcatgcagcagctgcctctctcaacatcctagaggatgcacactattgattataagagtacaaatttcagagcattaccatggttagaccattaataagtatataacatatttttatgttcttactctttgaaaagaaagaattttgggagctgattctgctcaattaaatccaaatccaggttctgattgaacttgag

SEQ ID NO: 12218 - DNA, 20899 bp, Vitis vinifera
  Intron number 1 from transcript GSVIVT01031178001 (locus G SVIVG01031178001) derived from phytozome v7.0 (chr-ID chr1 4; pos 1451671 to 1472569)
ctgttcggctatcagtggaggagtgggatggagttgaatgtataacgattaggcagagagttgctgctagagaaatctagctttgggttgtggctgaacccatctctctctctctctctctctctctctctctctctctctctctctctctctttcttcttcttcttcttctatcaatcatgtatattagggtttaggcctagggtgttgtggatgataaccaatgagaaaaactaggctattgaatgattttctcttggtgcatgagaagaagaagctatatcaagatgtaacatttatgtatcattattttagtaatccaaaagaccatgaaaatttacaacacatcgtatttgatgattagtcaaatattttactcaggaatgaaatttacgacacatcgtgcttgatgattagtccattttacttgactccaacacattgttttaatagcgcacgtttaaccgttatttttcaatatatacatggagaggatgatgaaagctaatgcaatatctaaaattagattttaaagttgtcctttgaaattggttttgtgtctacaacacaaaacatctaacctacaaaatccatgataaacttttgataaattggttttttgagaatttattaccgaaacatgtttttgagaataaatttgaggtgatttcaattttcttttaaagcattttgagcaatgattcaaaatataaagaatactacatatatatatatatatatatatatatatatatatatatatatatatatatatatatatatatatatatatatatatatgtgcacataatacctttatggaggaaaaaaaaactaattttcatatttgggttttaaacaaaattttatcttttaaaataattgagaactattttaaaaaattactttttaaaaacatagcaaaccaaattcttgcaattcaatgaactagtctttcatgaggatgggccaagtgccaaattacttagctacaccaaatcatcaatgtccccattttccaagatttcactctcttagaatatgtttggttcctgaaaaatgttagggaaaggaaaaaaaaatgttgtgaaaaatcattttccttagtttggatgacatggaaaataccatggaaaaaaaacataaaggaaaatgctaatggaaatattataatatttttcctactacttttcttaaaaaataatgaggaaaataggaaagaaatggaagggaaaagttgggggaaattttatcgggctcactatatcatctttatcgagtctctttgtttgcataacctctttatcagtcactatggcttctcaccattattggtcctttcaacgaccaccaccatcactttgatcactttccagtacctctgacaacctaccatcttcgagcacacgagttcccatggatgaaatgtgttcttcaaatcgagttcccatggatgaaatgcatttttcaaatctagtgaatgtgtttgcatccatgtctttagatcaggtatgaattgtcaaaactttggtttcttcaaatttgtggcctctatttgactttatttttcatggagaattcaaggtttacagagaagttgggctctctctggtctttctccaatgttctttcttcgagaagtcaaactatggtttctgatactaacgagaaagccactcaattctttgtcaatcatagttccaaagtagagccaaccaaacccctaagccttattgttgagaataagaagaatcaaattgagaatactaaggttctagaccaactccaaagtgttgtaattgtggtgagtttgctgctgaaaccaaagcccagatagcaaaaacagaggtcttggaagtgctgctactgatgaaagaaaaaaggaggagaaggagcaagaaaatctttgagtcttgtttgaatcaaaggaagggttcttaggaagtttaatttacaaacgaaggggcttgatcatatgggtttttctatgaatgtggtttgtgggaatgaggtagttgaggaaacgtctaggtattgtagggaaccccctagacgcccacgtggcaacctcgcacgacatacccccaggcaacacgtggcataccagctccctatccgggtcctctcaagggggcacacaacaccctcaaatcctctacctggacgatgctctcccgtgtccggatgtgttgtccagacttatgaagccttggctgtaaaatgcgggcccagtcacttcagatagcctatcacagcccgcattccgtcgcttgtagagtgaaaggacaggcgtgacgacaagtcatatcccacaatttctgacagccgcctataaagcgatgatgactctgctaccgcctgagtgccattatgacgagccaaaaagtcttcctaccattaaagagaggcaaagcttctgacactataaaaaagggctccctcatgcgaagaaaagggggataagccttttgacttagaaaaaagagcagattgatcaccagagcaatgactgacaaaaccgtcggagggtgtgtccggacatcctgtttggacatcttttgcaggattgactaaggcaggaatcatccttggttgaaagcgagcgtccctttggcgactgcgaggatccctaggatgcgaggcatcaacattgacaccgtctgtgggaactcttttgctcagtcgactgtgaaagatgttcacaccttccaggagccgctcatcggctagaggagacgaaggatatttcgaatggcgtgaagctatggaaaggtgacaactggaggacgagcgacaaatgcaagctctcctccatgaaacaacgagactgagggaagaaaacgctgtgttacgcacccaggcttcatccttggggtctcttcgtgaccagcgctcaagaggttagggggtgaactcaaggcctgatccagaatcgatatatcccggaactacaggggccattcctaatgtgcgcaatgatcgatatcgggaacgactcatccctacgtaccaagctccccaagatgaaagctcagactccactcgtttctcatcaagttatcagacgcgatgcgcgcaaggttaggcccgtaggagcctggtaaggtgaggccgccggtggccgcaacttgggaagcgtaccccgaccccccagtcacgcccacagtttagaacaacctcccgcaccaagcggtacgacaagccggaaagaactcatcaaatgaaccaccctttggctttatcagcaaaaggctagatgacatgctctccacgcctttttgctcgcatatcatccattacgaccccccaaggggattccttgtgccaaaattttctgcgtataatgggtctagtgatccattcgaccatatcatgcattatcattaactcatgactctagacataggaaatgacgccttgctgtgcaaagtattccccgttagcctacaaggtcagactctctcatggtttcaccggctaccctcgaactttattgataatttctgggacctatcgaaagcttttgtggggcaatacctatactccgccctacataaacagaacatcagtaccctgcaaaacataaaaatgcaggagaatgagtctttaaaagaattcgtgaaacggtttggccaggctgtgctacaagtagaggcctacaacatggatgccgtcctccaaaacttcaagtgtagcatatgcctaggcaccctattctttgaatcgctcgctaagaagccttccacgacaatggatgacttgttttggcgcgcgaacaaatactcgatgctagaagatgacgtgcgtgcagccacacaacaaattttggttgctggacaaacatccagaagcgacacagaaagaagttccaaacttccggaccggccaaggtcgtctggtcgaaggcaggaggagcaaagtcggccaaaactgccaccactcacgtccctttctgtatcatatgagaagttcttccctatgatccaagactaatcagactttaagtggcccagacccatcagaatggacccatccaagagagaccatagcaagaagtgtgcttaccataaagagcatggtcacattacgaagcgatgtaggagcctccattatttggtagaaaggctcataaaagcaggacatttgaagcaatacctctgctcaaaagccagacttagagatactcccgaaactgcgactctggacctctaggaccctagtcgcccccaaagccgtcattaattacatcaacggaggaccactggatgaagagtacaactccaaacgaaagaggtagaggttgttgcgagcagcatcggtgcgtgagcgcgtcaattccatccggcctgggataactggcgggggaacccaacccatagatgagacaatcgttttctccccagtagatcccacatgaaaattacaaccacatcgtgacaccctcatcatatccctagggatgagagactttgatgtgagacggatcctagtcgacccaagcagctcgaccgatcttttacgggcgtcattaattaatcagataggacgtgaactattcggcttagaaaaccctgagcggatcttgtccggattcaatagagcgacaactacctccctgggagacattatgctgccagtccaagtaggtccagtcactctcaatgtgcaattttcggtggtacaagatttgtcccccttcaatgctatcttagggcgcacgtggctgcactatatgaaaaccatcccttccacgtaccatcaaatggtaatctttctcactgaagataggcaaatcgatctatacggcagctagttggctgctcgccaatgctatcagatagcgtgagaggttgggttcagcaaagagggcgagcccctccccgaaccctccaacgcatttgaccaatagcaattattgaatccagcggacaaagatccctcgacaacggaccccttgcggacaatccagatcttagaagaaagcactcatcttacacatatcagcttcctcttgacacccgaggaggcccagagcatccaagataccttctgacaaagccatgacgtctttgcataggcgcattctgacatgacgggaatccacccttcagtcgcctctcataggctcaacatcttcccttcatcaagacctgtccgacagaaggttaggcggttccactcggacaggcaaaagataattcgggacgaggttgacaagctgttggaaaccggatttattagagaagtggagtacccgaaatgactggaaaatgtagtggtggtccctaaaaaggagaggaaatggcgggtgtacgttgattatgccaatctcaacaatgcgtgcccaaaagatagtttccctctgctacggatagatcaaagcaatggacaatcagaagcaacaaacaaaaccctgacgactgccttagagaagaggctcgagcaagccaaagggaagtgggtagaagaactacccggcgtcctatgggcttatcgaaccacactcgggcggccgaccggaaacactcccttcgtcctcgcatatggtatggatgcagcctacctactatccgaactgaggcaggacgacagggtgatgcaagtatagaactcggaaggaatctggcctgggcggatgaggcgagagagagcgcatccattcagatggccgactaccaacaaagggtgaccgctcactataaccgcaagacgtgacccagggccttcaaaatcggaacgctagtcctcagaaaggttttcgaaaacaactctgaaaaaggagtcgggaaattccaagcgaattgggaagacccttacattgtgtccaagacaagtgaaagtggagcctatcatctacaaaagctagacggaaccccgttgctctgtccatggaatgtatctaaccttaggcaatattaccagtagaaagaaacgaggggtgaacaaaagcagagaagtgtaatgtattcataaatgattgaaaaattgtctttacagaatcaaccgccccatatacagcaaaacaaagaagaaaactataaagactgcacacaaagaagtctcagcaagagggacccccaggtgtcgcatcctcctcatcagaaggaagagaaggaatatcatgcataattccgtttttcttcatacaacagcggtagccaaagaaatacatctcatctgcctgccattggttttcagtctccatctccttcttctgagcggcgaacctgacctcaatctctttcttctgagcggtaaacccggcctccatctcctccttctgagccgttaagtttgcctgcaaagtcttcgtctccttcttctgagccgtgagactagcccggagttcatccatctcattcttcagctggagattctcctgccccacttcgttgacttgaccctccaaggcctcattttccttcttcagtgtgtccgccttagcccggacaacccccttctcctcttcagctcggctcaattgctccgcctcatctgccacaactttctgagcagcagccaattcggcctccaccttctccaatcgtgagcgcagctcctcaatacaacccggatggtgggagatgaatgtacgcatggcctccgccacttccagccgcttgaaaagctgctcgcgtgtgcgcatcatatagcggatgccggctacaacctgggcaaaacaacaacaaaacaaaagctaatgtcatgcaaagaagtaacaactcctaaggaagaagagaaaaatagcaaagaagtaattaccacttttgcagtctaagggatagtccagtcctggagatgttgaatgcaggacacggcagattaaggagtgccaaaaggaagccgcgccttgacaaaggcaggagggtcaccacccatgttcacggagacccgcttggtgagtgggaagaaattagacatccttgtggaaggagcctccgcatccgtgaagcatggcacccccttcaacatttccatcatttcctcccagcttggaggaaccccggcagtaggactactcttctcatccagagcctcctcgtcgatcgacgcattcggaaccccctctgacccacgggtttccactgcagttggggtattgccaaaagcgattgtgcttgattgagcagcagccgttgagctaggccccggagcgtcggtctgaaccgttgccgccgcaccagaccctgtagcctccgattgagccgcgacagttgtgttaggacttgctttgtctgggcgggttgtagctgacatcggaccctccccacctcgctccgcgcaactttcttagctgatggaggcttaagatcgatgagatcatataaccgtttgcggtgccttacaaaagtccgaacctgaggttgttcatgtctcttacttcttccggctcgtgcgcgaccctcagaccaaaaaagtccggttgaggctgggaagagctaggtcctgagcggaaaggctcaagctgcggggagccagaggtctcctcgggctttgaagcagggttatacgactggctgggcccagacctgcaagacgaggacgagagatcaggagttggagacaccacccggagagcctgcacaatggtcttcttcgtcttcttcttcttcttctcctttgtcgctggaggacggaccaccggggaagagtcgcgccccttctcaccaggtgctttcctcaatgtcccctcttgcctcttctcttttcgctggtcaaggtgcttatggcgcgccttcgcatcaacctcacgagccctctcgtagaaagacaagtcctttagcataaaatgttccccggacactacaaatttgggcagtcgcctggggagaatgttgataacgcacgacagaagctctcggacaactaccaacagatttcaggcagatagcaatgtctgatagtgcctctcaatagcagtgatttcgaacaacctgttcaagcgatcgaaagaggccttctccacccactcgactaggcgacccctcttagatgtacctgcgttgcccacaacataagaggttagtcatttgataacactgagtcaaaattcaaaaaaccaacaccggacaaactcgaaaagctaccctacccgggagcgtcaatgagcgattgggggaaaactccctttccggatgctccaacagaccagcccaaagacccttgaccagtacatgtcctttggctccccccttgttcgaatctggaaggttggtcaccaactggaggaacgggatatgggcaaaaaggctgaagaggtcggtcttccccttcttgatggtgtaaacaaaaaggacctccaataaggaaagatccaaattgaacaacatattcagaatgctacaccccattaatacccgaactatgttgggatggacgtaagccggaggaatctgagtgaagtgaagaaactctttgaagagggacggaagaggaaaccagagccctgcattgaattgctccttagtaaaataaatagcattgtcggcagctttctcagcgtacacagcttccccgtccacaaactgaacgaaaacactgttcggaatgcagaaacgctcacaaaactgcctcacgtttagtttgtcaataggcttctccgtgtaggtctgctcggatgtattattttcgctaagcctagccacactggacgaagccacatcatttttcgtaggcatgttaaagcgtggggccgagacgaaacctgcatggcgaaatgccaacagtaaaaaagagagatccagccccacagccccaagagcaaaaagcccaaaaggcctaaaatagccaaaaccctaagcctaacccatgactctaccccacatggggttcagtgacccgcaaacgcaataggggggcaatagaagccccaacgggctgaaagccaaagcaaaccccccctcccccgccccccgaaaaaaccctaaacgccaccgctgaccctcaattgcaaacaaggtacccaacaagtaaggaaacatcgaagaaacaggaaacccaagaacaagggataaaaatacacaatgtacctggagcgaacttgcaaacgagaactaaggttgcggtacaggcacccttacgacaggaacgccgctagcaattgtcctagaaaaagaccctcagtcacagacgtgaacaagcaaagaggcgaaaccaaagtgcgagcaagaagaatacagaggcaaaaatgcgaacgcagaggttggagtccttatttaagggatacaactcctcggtattccaaacgcccacccgcgccactatcgaaacgacataccgcctgggaattcccaagaatggtggctcgccataaatgccctcccttcttttcacctccgcagcactacgtggcacatcaaatccaaaaagcaacgaaaggttcaaaagtatcatttttaacccgcccattttgtccggacaaaatcgtcaggttaaaagggaggcattgtagggaaccccccagacggccacgtggcaaccccgcacgacatacccccaggcaacacgtggcataccagctccctatccgggtcctctcaagggggcacacgacactctcaaatcctttacctggacgatgctctcccatgtctagatgtgttgtctggacctatgaagccttggtcgtaaaatgcgggcccagtcacttcagacagcctgtctgtagaccctcaattttgtccttcgacactggcatttatcctttgggtgtcacatccacccattgttcgcatatggcaccactatggccccttttgggcttagtcggtgttcgagcctcgtgtgggtttgtctgtggtccattgtggtgcatatgtggttcattttggagggtcaccatggccattttcctagttgttcacatcacactgtaggaaggaagtggggtcatcccgatgttttagcttagttggagtttataggggcatgttgaggttcggagcactcgggcttgttttgatcgtatctccctcatctaaactcggaatcaagaaccgtttctttttatggattccttattcttccaggaatattctgtaaaattttcaaaattttttgcaaccggtcggctggttggcagccgattcagccggttcaacgagtcagccagtgtagaacactgatttttggtaattgttttgatcatatctccctctttcgaacttggaatcacacaccattttttttatggattccttactcttctaggaacattctgtcaaattttcaaaattttttgccatcggttcgactggttggcatccggttcggccggttcagccggttcattgagtcagttgaggtaaaacactaattctagtaattttggggcctaaatcctacatgctcaggcataagctccagatcagttttgggcaatgttgtgggtccattttgggccttgtcttgggtttcttgcagcccaccacgaatccatatggattcttggtggtgaagcaagcttaaaactgaagggagtgagctggcctcgtaagtttaagagaagtaatgaggggtgtggttcccatgctgatgaaggggatttcggtgctgaaggggaaggaacccaggaggctcaaatgctaagaggggtatgagtataaaaggtgagaggataggagagcaaaggacgggaggggacattttggagaggggaaattttgctggtgagaaaaacaaaaagttagtagcatcttctaagttgagagcgtgggggaaagcttcagcactgtggtttttttgaagaggagagtgacaacatctcagttttggaagtcatcatcggcatacacggatcatatttggtggagattctgaggtaagcatgcggaatttttttttacctacagtttatcttcctcgtcttcatatgctttttctcattcctcatcattttttcttccctttgatataaagattgtattgcttgagtgtggataataaagaccacacatgattgttgttgattggttatgaatggtttaaaaattttttgatcgaatttgggattttttatcaaccggctgaaccggttggaaaccggttcaaccggttcagcaccatagctggctgtctctgtcagctatgaggaacacttgcctttctttgtctggttctcactcattcgggctcagaattgagaaccgtttcttttgtttgcttccttaatcacttaggaactttgtgactgaatttgggattttttatcaaccggttcaaccggttcagcaccatagctggctgcctttgtcagtcatgaggaacacctgcctttctttatccggttttcactcatctgagctcggaattgagaaccatttcttttgtttactcccttaatcacttaggaactttccgaccgaatttgggattttttatcaaccggatgaaccagttgggaaccggtttagcgccatagctggctgcctctgtcagcaatgaggaacacctgcctttctttgtctggttttcacttatccgggctcggaattgagaaccgtttcttttgtttgcttccttaatcacttaagaactttctgaccgaatttgggattttttatcaatcggatgaaccggttaggaaccggttcaaccggttcagcaccataactggttgcctctaccagccatgaggaacacctgcctttctttgtccggttctcactcatccaggctcggaattgaggacctgtttcttttttttgcttccttaatcacttaggaactttttgaccgaatttgggattttttatcaaccagttgaaccggttggaaaccggttcaaccggttcagcaccataactggctgcctctgtcagtcatgaggaacacctgcctttctttgtttggttctcactcatccgggctcggaattgagaaccgtttcttttgtttgcttccttaatcatttaggaacttttaggccaaatctgagattttttatcaaccgaatgaaccagttgggaaccggtacaaccggttcagcactatggctggctgactctgtcagtcatgaggaatacctgatctttctttgtttagttctcactcgtctgggctcagaattgagtgccgttgcttttgtttgattccttactcatttaggagtcttctaaaaaaatttgggaatttttctcaacaggttgtactagttgagaactggttcaacctgttctgcaagaggactttgggtagccctcgattttaacatttttcgagcccgtatccatttgcgatggggcacttgtgagccatcttgaaggtttaagtccgggtttaatttcagttagtgtgggccaattttgaagttatggatggtgtggtctagatgagtctagtttgatttgtatgacaattggggagtcccttacctcatttcaaccagctttcttcctttttggcacaaactttgatgcttgattctgaatacatgttgcgtggctgactcaccctctgctgtagcacatggctagggactacaggtacgcatcgttggttttgattgttgaatcatatgcatgcgtggtgcttaatcttgaatgtttgttaggtgtttatcgaccttttatgtagcgcttggctaaggaccacaggtacgcactcattattttggttggttgaattcatatgcatgccaaataccaactaggattgtgtttaaggtttcatttgatctttgacccatatgctctcacatacccaattcattagtagagatcgagttccgggcctagaggggtgctacctcacatgaggtaccttcccaatgggtaacctgatccccggacccagaatatagttttcgcagaccgttttttccatactggggtcattaggggtttttgttcttacttaattttccccattttaaaaataaaaataaaaagtaagtggcgactccatacaacaccgttcctcaccggggacgggtttttcaaaactggaaaacaccaactttttcatttcttttttttttcttttaaaagcgagtcgcgtcggtccggtggatcgggtgagggtccacactgtcacaacccgcattccgccgcgtgcagagcgaaagaaaatgcgtgatggcaagtcatctcccacgatttctgacagccgcctgcagagcgatgatgactctgccaccgcctgagtgccatcatgacgagccaaaaagtcttcctaccattaaagagaggcagagcttctgacactatagaaaagggctccctcatgcgaagaaagggggataagctttttgacttagaaaaaagagcagattgatcactagagcaatgactgacaaaaccgtcggagggtgtgtccggacatcctgtctggacatcttttgcaggattgactgaggcaggaatcatccttggttgaaagcgagcgtccttttggcgactgcgaggatccctgggacacaagacatcaataggtattagttgtttggcaatccgtatcatgttaagatgcctcctcttagtgatggtatgaccatgaaataacatttcaattcttaggcttacacaattgcctacactatcagatgacatattctcatgggagttgcattttgcctttgtcacaactttgtatgtgattaagttctttctgggtatagttgttgcagctctttctttctctattttatttttgttttttttgagaccaaacaaggtgttagaaagacgcgaattataattttgaatttttttttattgattttgttttctttccatttttccttgacttttccatgattaaccaaacaaaggaaaataaattctttgtttttttttcctttaaattttccatgagtaaccaaataagagaaaaattttatattcatttccttatctttttctttctttccattttaccttccaattttttttttccctaacatttttcaagaactaaacataaccttaactaacctctaattttgataacttctaactagatctcactagaactagaatcaaagctattgttattttttctgataataagttcactttagtcatattaattgatatcaaaaagttatttttagctaaataaaaaaaaccaaaataacaaacaacacctaagcctttcttaaggggaaaaaaataaccccataattgaaattgtctcttataaagatgatttcgtatgttacattgtttaaaagggaaaatagagaaaaaaaaagataatatacaatagaaaagacatttacctaagaaattgtctattcaaaatacgaatttccatgtggcccaaactatgtacctaccgtatttttggacatattttctaaacaaccccattttgaaaatgttttatttgatgtaatttgtggtacaatattgtcaaagatcccataaagcttggatggaacttgctatgttaaatgcaaatagtaccagaaccagaacaatgaacccaccgatgtcaagatgcaccaaacttgtatagctctggcatgtgtactattaggttagggtgccatatctagatgacatttttttgaagaattatggaagagaagtgacctttagagcatctagactacggaataatctgttggggtaaggagaaggagaagctatggagatacgatatatatgtatcatcattttagtgaccatcaaactatgaagatttacaacacatggtgatgatcagtccattttatttgactaccttgtctggttgagatatcaacaacttctaataatatttttactcccaaatctccatggaattatgtgtatagatatatcacggaaatattttctaggaattgcaatggatacaaacacacatttgagaagagccaaacatatccttatgtcaatgaactaagaaaatgtttgattgtgtttttctttaaagtatttttgatgaatgcattttctttagaaatgtttacgggaaaatcaccttcgaagtgtttttttaaaagcactataagtgattttttaactttttaaaaatattttctaaattttaatgaatgtcttattttttgttttaaaaacatttttttagactaaaaatgctttttaaaaacattgttaaatagactccaagtacttttggatccatatggttaaatcatcgtcaaatcctcataaattttccacgagattaatttcgggttttaaacaaatggagtctaattttaaccagctatctcctaattctcagaaaacctaatcagatctcaccaacagtaaaatcagaagctggtgatattttttccaagaacaaaatcatattaaatacactaatcccattacattcatatccccagttctgtaaaagacaaaacatccagtttgggattcatacaaattgcagtgatacaacgttccctctttattcacatcataaatgggaatatccttctgggcatcactaaaaatcaactataagcaacagtaattcatcaaaacaaccacaacccacatcaattgatccaacaacaaacacaaagaaattcaagtataccaaaagggtttgttctaagcttccttaattactcgctcaaactgcactggaagccacacccacattgaggagactcctcaaagttgtcaataggaaatggggctgattcaacccccgcagagatcacaaggttgtcgccgttccggatgatccctactatgtttaatgtaagcaagaaaaactttacactgatgccatccaagccagatagggtgtcctttgatatgtaaccagtgacggtggacgagaacttcaattcgtatgagccttggacagagaagctgcaggtttcattgaagtaggctgagaattcacctgtgctggagttaagatcatagcctttcatccctttgggaagaaggcccattgggaagttgtactcccgaagaacctcgtacgcatttggggagttgttgtatgagttggctggagttgaatgtatgaggattaggcagagagttgctgctagagaaatcaatgatctttgggttgtggctgaatccatctctcttcttcttcttcttcttcttcttctgtctctgctttctcttctccttctgtgtgtgatttttgggttctcttatagcttcttgattcaggctgaagcagaagccaaaagaatgatttcaaaaagcaatctaaaagtgctaaaagtttagttgaatatacggaaaaactttttgcatgaagataaaatggggttttgacaggaagcaacgttattttgtctttcatgtttggcttctttaattttgttttatctttcttttttaaactagctactcaaacaaacattgggatgataaccaacggccgattggggatgagttgccccgatcccaatccgtccctttgaagatgagacggagtaagtaggaaaatttcatatctattttgtcccgtttcatttaatatttttcttttcatttttaaatataataaaaataaataaattttacaaataatataatttttattaatttaattttttaaaagtatatatttttttaaaaatgcactcatctttaacacgttgatcttcatccccaaatttgacttatttggtatgaggtgaacgagtacttgaaaacccccctttgtcgcctccattagaacatgagctatgaaatgggttaaggtttgtctcatggaagacttcaatcacttattttataggtatatggttattaattacctacgcttccaacatgcctacgttatagcctttgatatacaaaacgatttaatcaataaaagaggtatggtggatgcatcctatatatgattccatgtgtttttctaggttttgaaaagtgtagatttttattattatgaattacatgatacttggggaatctcttatgatgatcacctatttatgtttgaagcacacctttatgcttgcccatatatttttttcctcgtttcttttgatgtttctattattgtaaatttacctttggataaaatttttaaatgatgggttttagactaaggctataataaacttaaacatatagaacacgttttaaacaaaggtctctctaatactaatgagttgtttgtttttcattagtagcgaaataatttctcaattttagtgctacttttaatgataatggttgaattttaatatacttgaaatgataatttgtttaataatgatgagaatcataaataaaggtatcattactcagtgactaagctcaatcatcaataaaaattattaaagtaaatattttttatcatcttttaaggatgatatattcttttaatatctttcaaattaagttttagacctttagtaaaattttaatcattatagctattttttccccctctctcgcatatattttcttccatgtttttccttcatctcctatatgtgtattttttttcttttaagtattctaaattttatatgtatcttgggcttctctcaaccatgatagattatacaataatcctataatgcaaatcaggctatgatttaatttggtatttttattgcaacctttcattttttgaggagttgaattgatcttttgcttacatatctaatggaaacaatagagttggagagcttcaatccatctatgattaaggttatgattaactcaaagccttttgcttatttcttcaactaacaattatggatattgatatcaattcaccaaatatctccaatttacccaatagatccaatgtatctgaccggtaacaaatggcttgtaccgtttgcatccatgttccttgtgaactaggtcttgtttgttttctaatataaacattttcctttttatttttatgctaatttgatatgacatagggaatcatgtgctctatatattcaaaattgagaggggttccaattgtatcttatgccaaagttattgttaaaaaatatgatatatattgttgacccaaatcaaaattgattgtttaatatgatatcaaagtctcgtttaatacgagtcttgagttggaaccttacaacatatttatttatccaatttcttgagcccatatgtaagcctaaaggcctaaagaaatcttgtgtttgaacttcataacatatttatttccttaatttattgagctcacagtaagcccgaagaaatcatgtcttcgaatcttataacatatttattttcctatttttttttttaaataaacacatgctactagttttataaatcaaggatgaaagaaatttgtggaattttgatatgaaattttaaacatcataggaccttaatagtaaaccaagtaaaaagctaggaatgaccgatttttatttctatttttatttttttatttttttatttttttatttttatgaaaaatcgttaaaaaatcagtattgggaataattggacaatctagacaatttcttatggacattttagtgattttgtgcagaatatccacaatttcgtcaaataatcatttgaatgctctttctttgatccaaaggctagatttgaatttgaatttgaatatgattcaatagtccatggtaacggttaattggcttcccaatagcttatttggcccaaattttggttatttaatacctcatcctgatcatatcccctccatatctagcttgaaatgcaccttaatctagatatcacaatgtttgctaactttgtgatctatgtgcaacaaggcatattcgtcactctttatttcaaaaccttacaaacaatagacattacttttagtatgccatcattcaattcctaattaacagattaagtcaggaattgactttaaaaatatagctattttttgggcatagaagttgggcattttgatgggggtcttttctcattcaagctcagtgtactaaagatcttttttgagctaagatattggaatcctcaaaattttctttaccaccattgctgttaaaacaagaaccctatatggtggtgaacaacttgttgatgcaactgagtatagaagccttgtaatatctccacttccactcatccaggtatacaatatgccataagtaaagtgtgccaacattttcaaaatctaatgcaggccaacttaagggaagtgtaacacattcttcactacttaaaggccacaatcaaatatggaatttgatttatatcttgaattccatattcaaggctaaatgaagtttaaaatccattgttatgtttgataattaatatgatcaactgcataactcttacattcgttttttatgttctacttatttccttcttttaagattgtatatatttagaattatggactatattcttcgaataaaaagagagtaaaatcttacttgcactgttcacttcttgtattatgaacttctttaggcccaagatccttggataggcatgtgtaaacatttttaatataaaggttgagtttagattgagttttttttcagcccaaactatattcaagttgggctcggtccaatatttgggtaacctaaacttaactagaatttgatttactattttcataatatttataattttattttcatgtatgataatacttaatttttttttaatttttaaagaaaaatgtcaaaattgtatttagatcatatactatttcaatttaggtaattttacccatcttctatcaggatttgactctcattgatttgaaatttcatcaaataccttccttattttgagtgagaagggagatgagctaaaataataaatgaaaggattaagaaatgtatttgataaaatttcaaaccaatggagactagatgtacttagccaaaatcttaagggaggtgaatgaaattaaccatttcaactttttaaaaaaatagataaacttattttaacttcttattattatcttgaaatattgttttatttactatttaaaaatttgatataaatatatagaaaaggttcttaaaaacattatgggcaagttcaattcaacttaacccaaccttaatatgattttgatgcatataacctaattaacttgatgaacatgagtttagaaaaataaatttaagtacgagctaagttgagtaccttggatccaagatagactcaagttgaatgtttattgatttgaattgagtgtaggtctgccacaaccttacccaataagtcatgagttggagacctaattattttctaatgcttttaaatttgaaatgcaagataagacttactgatattcaagtattaataacaataatcacatggtttaaatttaattattaggttctattaagatttaagctaaattatcgtatcatactatctcaaactaaaaaagtgaataaatttcaccctaatcaactttaccgtggactaaaagtattaacaatcaaacaaaatcgaatcaccaaacttataaataacttattaatttatgcgaataaaaaaaatcattttgtttacatcttgctccccacttttcttccatcaatgttaaacgtatacatagtcttcataaggagaaacgaaagggtttgttctaagtttccttacttgcctggcctccaccgcatttgaggacacactgacattgaggtctctcctcaaagtagtcgatgggaaatacataggacgaaatcctcatggagaaaacaagatcatcttctctccggacgatctcttctatctccctccacaccaagaacaccctcacataaacacccttcaagctagatagcttgccatttgatatgtaaccattgaaagtgggcttgtacttcaaatggtaggagttttgaagggagaagcggcaggtacgattgaaatggactgagaattgacccgtggtgatgttgaggtcatagcttgagatcccatcgggaagaaggccagctgggaagttgttgtcatcaagaacctcatatgaagttggggaggcgagggaggag

SEQ ID NO: 12219 - DNA, 9191 bp, Vitis vinifera
  Intron number 3 from transcript GSVIVT01009177001 (locus G SVIVG01009177001) derived from phytozome v7.0 (chr-ID chr1 8; pos 5784983 to 5794173 reverse strand)
ctttggtatgttttctctttgtatcttgaactgctggtatatgtataaattttatactattccaaatattgttctcgaaattccttatcatcatgtattcagcactttatatatatatatatatgcgtgtgtgtgtgtgtgtgtgtgttctacatccagatgttttgtcaggttcaggtttccagtctattgttattttctggagattagtgagttagacaaagtatagcagtttggtggcatttgcaccaattgtgtacaagtttgacttatgtgaggacacttttttccttacatttcaatcttgatgcaaactttccagagccaaagttggttcttggagatttctgctattttattgaatagcatcttgggagttggatgactcatggtatttgttctttttaaaggcaataaaagagtatattaatagtgccttgaaaagagtacaacaaagtacacacaatgtatacgatatgcaccaaaaggtagaacaacgaaatagagaacaaaaaacaacctccttctttccacttcaagcacaaccaatctacaaaacctatcatggacattgattgatggtctatgtacaacttaatccatttcaagaaattggccataaaagaatatttaatcacttcatttgactgcttagtaaatgacctcctatttgtctacttttagagagttcaaaacaaacataagagggcgaccttccaagctttcttctacttctttcccacaaaagaactgtgcaacttaaaaggttatctctaatggtggagcgcatcactcgtgtcacaccaaattgagagaaaactagtttccataagaaacttgctttagcatagtgaataattaaatgattaattgattcttcttccatttacacaagtagcatcttttggcatcatccatcctccccttttaagttggttaattgtcagaatatttccccatatagcttcccaagcaaagaaaccttcttttgtaggtacccaaggattccaaactatctttgtcggaaagaggccttcttcttccccaaccaaggatgcataaggagatttagttgaaaagtgccactcttgatttccttctaacatatcctatcctccgcattgcttctaatttggatagaatgtaagctccttaaaaaccattttgctcccttaaggctcccaattattgagttatcttgaaaaaacggggactttaccaatctccctcccctttttcctcccatacctttgccacccatgtgtttttggcaacaactaaagaaaataacattagaaaagcttctttcagagtcatatgtctacactaattgtttttccagaatctcacatttctgctattctcgacaatgaagcgaaaagtttctttcaaactcgtataccaataccaattatctttccaaaatctcacctttttgccattcttgacatcgaagtgagacctgtttttcaattcataacaaccttttctaatttccttccacaccttcaccccatatggaaccatctcgcacatcccttgtatgccatcctccttcattttccccaaatttgccttttgtgacgtttttttttttttttttgatatgtaagtgcaaattgtattaaaacgccaaaatgggctatgacttgtttcttccttaatgaatggcttttagttaggaacctccaaatccatttaccaagcaaagccttatttaaagtggagagatttcaaatcccaaggccctatgtttttttgtctgaacaagcaatgacttaatttaccaaatgaggccttttctcaccagccccatcaacccaaagaaagtctctcttgatcttttttagtcttaagcttatcctttttggcatggtgaacaaagacaagaagtagatagggagacttgacgacgtacttttaattagagttgccttcctcccttttgagaggtattgcctcttccataaaattagttcttttgaaatctttcctccattgcatcccaaactaatgctgatttatgggagcttataagggttgacccaagtgggtagtagcaagttttcccaccctataacgtaacatagaagccaatccttctacatatacaatattttcaattggagttagctctcgtttctccatatttattttgaggctagatatcacttcaaaccacatagaagcccaacttaagctcttgatttgtgtcacaaaaggctaggatgtcatcaaccattaaaagacgagacatagacatctctttcctccattctctaacccaccttaaaacttgaaataaaactcccttctctagccctactcaagatcttattgagggccttcatggccaaaatgaataagtagggagagaaagaggatctcctttgcctcaaacctatggagctttgaaaactagaattgaaaattttgctatggttatgcaccatgaaatccatctaatctaccttttgccaaagtccattttatgcaaaatcgagatcaagaaattccaatttacatggttctaagccttcccaatgtttatcttgcacaagaccccactcatagagcactttagccttgaatcaatggctttgttgtaataagaacttcattcaaaatttgtttgcctttcacataagcatattgataatttaaaactacttttcccatcacgttttttaatctattagccaaaactttagttgagagtttgtacaaacccttaaccgagttgatgggtttgaagtctttcaactcttttgcattagttttttttcagaattaggaccaaaaaagttgtatttagaaatctctagaaagtaacataattaaagaactctttgaaaaccattgcatcatcattgatgatattctaacaagcctgccaaaaagccattgcaaaaccatttggtttcgaggccttttccttagataaattaaatagggtgtcttttcctccaaaaaaggcatttccatgcttttgcctcatcattccctaaagctttgaaattcataccactattgctaggcctctatttttttgatatggaaagaagattatgaaaggccttacaccccattttttaactcaacctccttagtcatccaaacaccctttacaattactttttgtgcaacgcgcattggccattttgtggaagcacatagtgtttttgtccccatttcttaactagatttctcttgatttctacccccacatagtttcttccattgaagcccatgtgctaaactcttctaatgctttctttttagccttgatctcatcaacaagaagaactgcttttctcttcttagaatcccaaaaaaccaatttggtttaaggcttttagctttttagcatggttttaaaaaccggaccggatcggaccgaattggccggtcacggtttcggtttggtccagtgggttaagccgtccaagggttggaccggcatcgaaccggatgaatcggtggttggatcggcgaaccggtcggttccgtttgaactgaatggttcaactcatttttatttttttccccttccatcaaaacgacgttgttttgatgcttttggcatcgaaatgacaccgttttaataactataaaatcttcatttttcttccttccaccccccaactgctgcaaaccctactcgccgcccttccccatagcccaggctaccactgtcagctccctagctagtcgccgctagtgctagtttcctcggacccgcttgtggtcgccgatgaggatccccaccagctgttgcaaaccttttcttccccctcacccccagctgttgccccactgccctttcccgcaactcaagttgccactaccagttcctcagccagtcgcagtcggtgttggttccgttagactcgcttgccgccatcgatgaggaccttttggtggctgtgaccgtaactttttagtttttacatttatagtgctgctgacgaggcactgtagatttttcctaagtttgaacagtttaagtttttattttttttactttaatatttaatattttacattttatgtttaatatttaatatttatgtttaacattttatgattaaaatgataaaatctattactctcatttatttattgcatattgaaatttcaatttattgaaatttttgttgatttatttattgtaattgaaatttgaatcatttccatattttattatttttaattttaataatatataaaatatatatttatgacgttaccgatttaactatggtttgaccagtgaactatgaaccagtaactttttcggttcaatgaccggtccagttttgaaaccattgctttttagaacagacattcccgaaaacctctttgttccacaactttaggtcttactttagagcctttaatttttctaccaaaatgtggctacaagaaccacttagggaataccctgaccaccacctcttaatgagatctttaaacccttccattttaagccacatatcttcaaatctaaaaggagtcttcgctttactcaacctatctccatcaagaataataagagaatgattggaagtaggttttggtatggcactttgatttaggtttgaaaaatgatcttgccactcttctaaaactaaaaaatgatcaagcctcgaagttgaaatcaatccttagccaccacaccatgtgaattagcctttactcaattgaagctccttgaagttcaagtcttctatgatctcagaaaaacgcctcatagcaaaggataaccttgagcaattcctcatttcccttggaaatataatcatattaaaatccccgcctaaacaccaaggatccttccacattctctttatagagcctaatccgacccaaacattctttcttccttcgtaagaattgcccatacacccttgaaaagatccaaaggaagccatcttcacaatttttgaaacgacatgaaatagggaatccttctacttccatgtcaataaacttcaacaccttattaccctagaataccaggatcttttccactagacctttaacttccattgcttcccattctaagcatctacccactcctaagttctagactagatgccttaacattttgtaaaggttcttagaggacattgaatccacaatttgtgatctgatcaataactgaataattttttgtttctccttgttattggcacctctaacattccaagaaagaatccttaacttcatcagtcaacaaacactaattactaattgctctttctacacctcttcttaggcccacgagaacttttgttattagctaagcattctaatttacgaatctccatctcaaaacaagaaactgaggctggcttcttaacaaccccttatttagacctctatccctttttttatagccttcattttttctcaaaagggccaaaatctccaattcaaagccctcaagaggcatttcctcaaatttgttgaacaaagttagcttgttgatgcatcttttagttaaaagctctcactatcccaaccattactagatctctcaattgccaaacccacctccccctttctcaactcacagtctcaccactgtaaatctttcataaaattctttgataaatccaccaaagacccttcttggatcatcattctcaagggctctttaacaaagctcacaagaattttggtagaatcccctcttggctccaaggggtcaatttattgaccacttgctggtcagattggttagccatcgagagagatgaagatgaagaagagattgtgcccctaaaaaaagaaacataaaggtgggatgtacctttaaatcttgcggcttcggatagtagtgcttctatgattgacttttgctcttgaagaggttgcgggagtgatgataaacattggttagagggcatagacccatcaagccccccttccttagaggaagaaaaggaataaggcactaaacgagtttgcctctttttaaaaatgagaagagtattaggcttacctaatttaactgaggcttggcccacaccagaagactttagaaagggggcttgagacttagaagggtctaattgcctatgattggccatttctaaagaagctagaaggaaaatccaaatgagatgggctaacgctaatccaattactagaagaaggcaagggtcccaaaaccacctcaaaacacctacctaaaactttaggcaacatcaaaggagaacaacttagagccttgttggatccaccaaacttcttctgcacaataagcaaagaaaaaccttaggacacctctactttgtcacgttcttttttaccctaaaaacaacacatggccaacatacttctcgatgggcactacatcaagccctactcctttgcgagcgtgtgaaggctctttttccccatttgtgttcttaggctctctgctccacgtcttaggctctaagctccatgccttaggctttaccaaggtcatctgtggcggtagctcccaccaaggctggatggcaaaacaagaacgccccaccaccacttgcaacgagcttggcaccttcctcttatcatatttaactaggattctagcccactacaaattgcgacaaccaattgtgtccttacccagaaccaaaaaacccttgtaggcatccccaaatttttaaataatgccttaccccatagatgcagggaaagacccacaatttctcacccacaattcaagagaacaaacaccacttctatagtagtaagctacaggaacccaccaatctagatttagaggtttgcccttaaaaacaagagtcccctttcgaagcacctttttggaacctcctagcaaggccaaatggaggatacctttcaagcgctagttgaacacgacccaagactccaaggaaatgacgcctaacaccttttctacaaaattaccccatctacccacaaaacaacacttaaggggttgcaaatttttgttaatctccttcatactaagcttaatccatactaccttgtctatttctatcctcacattggaaacatcaatatctcccgatactttcgttgaaggatgaaaatatcagtttttacggatatgttgttagttggattttatggatatataaggatatttgtgacattcattaataatatatagaacttgaaaacacattcgatacaaatttatttaattaaaatgtattcaaagatacaaaataaatgatgatatatgtatgatttttaaaatgtttataattttatttttaaatgtatgtcttttatatttaattaatatacaaaagatataaagaaaaactcattaaaaaaaattatgataatggtttttacatttttaatactcagttaaatcgaatttgaatataagatagttaaaattaaattatttatttattttgaggagaaacaacaatgtaatatattgaattaagaattaaaaagtacaatagaaggatgaagaatcttcccacaaacaagagctaaacaaaaggaataccataaaccatatggtaaatacaaaaaaacctcttcttactaacccacgcctttggaactacacattgctaaccaatcaagttgaaccacattaaggggtgcaagaggcctaaaaataagcaaggaaatgaattgtatcccaaagaacctttatagtccttgccttgtcctaaaaaatgctgacatttctttcctactacacaacccaaattaaagcaatacaagcgatttgccacaatactgggcctctcctagagcttcctaatcccttatatgaaatggttaccatgtcacaaatactcctcagagagcacaatccatcttgaccaatctaaataaaattaaattatttgttaaagttttattttaatattttgtgtttgatatgaatgtattaaaaatataatctccaaaattctcattttcattaaatatgagatgaaattttaatatatataagttttatcatttatgtcatgaatagtatgttggactaagtggttattgcccttttttttttcatgaaggaggataggggtttgagtcccatacattgttttatcacatttttgggctttgattgtgttgagcattgctttgactgcatgttgaccaccgaaaatggggtatttacaaaaaaaaacccaaaaaatcgggaaatatcctgaaatatcaaccaaaaatcctgaaatattgggaaaaatcaagaaaaatcagcccactcgacttattcacttaattatcctatcgatggccattgatatccaatatttcctgaagttttaatccatgtctccatctggccatttacagtgctaactgcctccttaatcttaggcaatgggacagcccccaagctcctgagcttgtcggccaaaactttccacccaccaagaagtcctctaccttctaggaacaccaaagagaacttcttctcctctacaggcctaacagaacacagcagaaatctgcctaccttgttgctatgcagatccagcttgtaaactctacctcccttgacatgaaacatcttgaaaggagatctatcactacctgcatcacagacctccgctccttccagcaacagataaagatccttctcaccaaatatgatctaagaggaaaggcaccagcccctctccacaacctttccaaccatcttacctttgaccatcccaattgatatctcaaagattctgattcgatgccgaagtagcaacagtcacctcccatcttcctctcagtccaatcatggtaagtgggtctttggctattggctttgaatttggttatggggctatatgccctatgaagggttcaacctgcaatttgggaattgatggataactcatggtatgaggtgttgactattgactttgaatttggttaagggtatgcaaccctcttcaacaatcaattagtgaactgatgtcctagtggcccatcagtataatttaatgatttaattatcttttatggaagttaccctttaggactataaatgcttgctgaagataacaattgatccctttttttttttggcacagttttttcatgcacatatgtatgatttggtgcatgtgtatgcaagaaatagaagtttaacaaatttaatgttctttaaagtgtgaagcctagagaaattctgctgattacatgattatctcttcagagacagg

SEQ ID NO: 12220 - DNA, 4374 bp, Vitis vinifera
  Intron number 12 from transcript GSVIVT01020566001 (locus GSVIVG01020566001) derived from phytozome v7.0 (chr-ID chr 12; pos 4259961 to 4264334)
cttcaggcatcaaggtcttgtaccttttgtcattgtttatttatttatctatttattattttctgtcatttgcttctgttagctgccctaacccactctaaaaacaaaggggaaatccatttagcctaggtcctggattctgactaatgatagggtttcaagtccctagaattaaagaataggagtctatgatgctaaaatactgagtacctgcatcttatcaaaaaagaaaaagagaaaaaaaaagaaaaatgaaattagttacttgctttgatttttcaaatattggaccaattaaaaaaaggcaataaacaaaatgcaaaatagaagaacaaagtaaaatatttggagcacaactttactccatatagaagggcgaggttcaactttttacaatttaccacatactaaaattaaatgtttataattagtttagattatgacattaaaaagttgtctcatagcataaatattttaccaataaaataatgtcatatgttgcatcggttctaataagaagatgacaagttgtcttccatttaaataaagaaaatttatattatgataattgaaatataagtgttaggatatacaaaaaaatggtgaatttgataattgaaagaagtattgtcaattcttagtaaaaaataaattgaagactaccaaatataatcttccaaatcagaaaactatctaaatatggtgtgcttccaatccttataaataaggttcattgttaaacttttcaaagtataatttagaagctaggagttgggaagaagctcttcaatgaaaattcaaagcttcaaatctttcaaagagacttcaaatcatcttctcagatcttcaaatctccttcaaagaatcttcaatgcttcaaagcatctttgaattgtcaagattttcaaacctttcaaattttaagatccaaatttgcaaaacacctctttgatttgagatcaagctattcaagcccttgatcgatgttgttcaagctaagacttaagtgaaagcttaattcatgtcatgacctaagttaagtcaaggcctaagtcagctaagacctaaacctaagtcaagccataataacccaagttatgctaagaccatagttgcaccaaggccttagttgattgaatgctcaactcatgccaaagtctaagtaacgtcaaaactaaaaccatataaagttaatgtccaagttacacttttgtaacatcaaattttcatcaaactcttcatttaagattaagcttcttcaagctcttgattaacaaatagaaaagaaagaatcagagcacaaaataaagatcataccccattcttcaaattaataggatttcaatttaattgtataatttttctttaagagaattttttgcgtacaaatttatggcacactcaaaatttttttttaaggcatattttaggtattctatacatgtattagtttgtcttaattttcacagtatataaaggattattagagtgatggtaataagagtgaaaacagaggaaaggcaatcattaggaggcgtgagatcaccttgtcatgttttttatcttagtggaaattttgtagcgacaaagtagatgtagctctcacatttagagcaaaccaatgtaaatcttatatgcgctctatctattttttgtatctcatgtgttattgcttgcataaatagagatttactcctaacaacttggtggtgacttgagtgttgcaaattgtgggttagtatgcaggtgtgtagacacaagacaccatgtgggtggcttagttttgcggaaattcaagtttaggttttcattaggttttccttaaagggccatgagaaggggtttccaagtggaagaacatttatttttagaaaatccattatgtttctagtaacacttatggtgtttcctcctcacacaatggagaatgcttaaaatactctttagggagggggtgactctcaaagagtgatgatggaacatgtgtggcaacgactatgtcatacagagcgtatgacatgaggtcttggatataaaggtgtgatggtgagctttgctagcatgcacgggcgctatgccatgattgtggtgcaacacatgagcgcaatgccatgagattcaattgtggcacacaacatgagctatgcatgccttggataaaaggaattagcaaagttggcatgcatgagccaacaatgcaatgcatgtaggtcatgggctaagaagaggctcaatgcacaagtacaacattgcatcaaatatgttcgtgagagggggcttggcacacatgggccacttacatgcatagcggtaggccaagtagcatgagagctcaacatgatgcaatactttgcattggtgagagaccaagggttgtgggatactcgggtagggatgacaatggggtgagttttttctagtacccactctgtcctaaccctaataggacaagtttgggaagtattactattattatttttacaagggttggattggggtatgactttgtccctccccactctaattatatataatattaaataagaaatgattttaattaatttttttcaattttcacctttttttaacatatacaaggtaaaaaattttacttttcataaaaagaaattgtaaaaatttataatattcatttatttatagatttttaaatataatttaaatttaaaaaaataaaataagcatgacaaatatcagaattttctatacttgtcccatccccatttaattttttttttggcgggaatgagaaaaaatataaaggattgggccaggatggaggtgacctaacccgttgcattccctattctaaggcatgacactttgaggcacaagggtgtggcaccttgatattcaaagaagcctaagcagagggttgcaagcacaacaagagcatgacacctagcatgagaagttgtaaggtatctgacattaaacacttgctaggttgaaatgcttgctaggtgcatggcacgagccaaataaatctctgcaaggggtgggtggcatgctgcatgcaatagtgcaacaagccctatgaaggtggcatgacaagggagtgggttgttgagcttgatacaggtggcatgagcaaagacaagcaatgcaactactatgacaagtggcatgagtagaggtaagcaatgcatgctcatggataggtggcaatggttgaaaacttgagaagatccactacccaaatatgagtagggttagcgggctggttcctataatgtgggtaatgcttgattcctatacataatgtgccttgctgggcattctctgcatggactcaccaagaagtattgtgggaatcttgtttttgagaaagccttggctgtttcttgtaaagagttaatacaagttgggggggttttccttgtaagtgtgtgtcttgtgtgcctctactgtgcatctcgtgggggttggaaaagtctggcttggagggcccctaagtgccacatgacgcgaaaaatttgggttaaacttcatgcttgttatactttccactattgcatgcatggttttacaggtgcaattgctaccagggagctaatattgcttataagaattagtattatcacctgtcactcacacaagttggatggagacatgatttaatcctaagtctctagttcaactcctacagattgctaggttagcttccaaggactagtatcatcatgggtttccttgggcatatagaattgagcaacatttagcagaaacactctatcccaaccccacccccaaccatgcctcacccccccccttctgtttatgcttattaaaaaagggtgattttttttttcttcaatttgttgggccaaaaacagagtctctgtgaattaaggaaagaatgcctgataccaagatgtgatcttcaaagacagcgcacaaatatgcaaacacaagaacatgatttaagtggaaaaccctccaatcacgagggaaaaactattggcaaatttgatctgcaacacagtatattaaaaataatgaatcacaaattctttcaatatgatattacaatttttggagaaaatacaaatggtaccttatcacacttcaaatgaataaataaattttgaacaacaagaaacttccatactgccaagttagagaaatcaaattctgcagaaacacttctacagcctctagcaacaattcaaaccacgtagaccctgagaaactacatttctctctttctctcatatgtgtatgtacatatataaaatatttacttctttatttaaaataataagaggaagcttatggggcttgatctgtaacataatgcacatatttttttccatttcaggtttacatatattctagtggcagccgggaggccca

SEQ ID NO: 12221 - DNA, 10340 bp, Vitis vinifera
  Intron number 1 from transcript GSVIVT01008792001 (locus G SVIVG01008792001) derived from phytozome v7.0 (chr-ID chr1 8; pos 2113396 to 2123735)
ctcctttcaaacccaagggagacaagattgctgaggtacttgcaaatcattttttcctaatcgtcctaataattgcgtcagtttcttttcatcttctactacttcttctgttttctcggaaaacaaacggaatttattaatcaatttggatttttgttttatgcattgtgtttttttggatggtacgggggaaattagggtttttaattgggtgctcttagggtttgttcgtgatttcttgcaattcaatctgatactttgattaatcactcgttcaggattaagtgtacatgtggtagtttagcagacaatgttcagtttctctaggcttacatcttgagacctgaattttactttagaccatctccatgaaaagctattatcagctctcaccatcgacttcaagcacgcggaaaggatatttgatagctgagtaattctggtggaggcgaggttacgctcccatcgttgtccatgagaaatgcaatctcttaagaaattcattgacctctttagaatgcccgtagcttccctttcacttcatttgatcaattctttctcaaattttcacaatccttcaaattagatgttaatgtttgaactcgtcctgtgtttctcccccaagtaaattcactctggaactttttccagccaaatgcccccagttggggaatattgaacataatatgggtgggttaaagagacaggttacttcaagttggtttagcccatcacgctgcaagttcctcacaaatacatgtagaagcacttagttgtcttgcttaaagccccttaaaagtataaataccccaagcaagcttcttttatttcccttcatgaaagtgttaggaagcagaatttttcccatgttctttgatgcactcctttggacaccctcttaatacagtccttatttgcctataaaaaaattgacgtttacatcatattgtcttaacgatttttctcagcatcatacaaaaataaaagacctacaatagacatgttttccatgtaaaattagtagtgatgtcaaagtaaaataacacctaacattttatcaaaattgaaaagatataataaataaattctccaattataattaataatatattattataaatgattcatcttaccgtctttatatttcatctattttttttttttaatgtcaaatccaagtacttgcactcataattgaaatccttttcaactgaatcccatgttttcagacgttgggatacaaaggatccgacacctagatacgtacttgtacccgatacctctacctaagcccatgtaaaataggtcacatctatttaagttctaattccattatttgaaaggtcatagtcctaggaaatgtgttcacctgtaaattaagcatgttattacatattacatgtcttcatttgcatcatttctatgtttgcctttgtctctcgtttttatattttgttctttttgtaatctttaattatcgtgtttttttacgtttttgtcataggttccgatacttgattattttcaggcaggttgctattcctgatcttgttctgacgtataaatgaggcatgatgtaatagatagtgagtctaatatttctgttgctattgattcttattaattagatttggaatgacattaatattaatattattaatattaatatacgctcatattattcattagggtcggcctaaagaataaaaattgaaaaaatatcatcaatcaataccatttgtacatatttaagtattattatttatattatagtcctatttcttttgtatttttgtttaataacttgttcgaaagttaaagcttcgggagtacatcctataaaaatatagataaaatcatttttgaagtaattggatcccaagtcaaaattgttgactattttttaaatatatatttttttttattgttttatgtagcccactcacctggaaatttgaaactaatatttaattgtctcaatttttaataaaataaataagtactcttaacagtctcaatcattctttaattattgggtttgtcttgtttatttggaccaaattaaataaacaacgccccctttacacagattttgttgtaactatattataatactaactgtcggagtaaaataaaaaaagttcacgtcaagtttagaatttttttttttttttgggtacttatcattttatttatttaacaaaaaaggcaaattacaagaaaaaaaaattaaaccgcagacctcagcctcctttttgacatgtcttctttttgtttttaattgtgacttatcattttatttttttaaccaaaaaaaagaagagaaaatacaaaaataaataaataattaaataattatggacaagtgcaagtggacggacatccatctttctagaatgaatgacttgtctattttggattgaatttagactccacacttaatccatgctacaataagtctttcttctcggatgattcattgcgtctagaaattaataaaatgctgtgatgtaatatcatgaacaatttttgaccaaacaaccttgaagttgatgttaaaacaaattttagataattaatttgataaaaaaaaaccagagtcatgaatatttttcagcggtcaacaaaaacaaatgaatactataaaagggtgattctatttatccttatatatatatatatataatttttgaatttttacaaaatataaaatcaaaaagaggaagtaggaagacaagacgagtgttttctttatataataagtacaaatatttacgccaagtcattgtaaaaataaaaaattaaaaacgtgtaatggactacatgacactgacagttcagaagttatcaacccaattgcacacgtgaatccgtgatcactggaggtcgacgagccggttccggcatatgaccggctaccacggcaacgtcaactttcccgcaacttctttttaatgaatccgctgatcgatatccactcctaaatcagtgctaggtatgtcggtgaagtttccggcgaagcaccgctctacggttacttccggcgacatttttctttttcagtgaatcagcaaacatttggctgtcggaaaaatgaaaaatgaaagatgagagatgataaaagaggagcggaaataccaaattaaagtccgaacagaactcatccaacaagcccatttattatacactttatatatcctcgaaatataagcatatatatgacatttgtaggttagactaagtgatggtttggttttgggtgggggaaggtggggtgctatgagattgagaaggcttcttcagcagggaagcaatgaaattgagaacagaatcaaacaccatccgcttcaccagcctcttctttgctggaatcacgctcccatttcccttattcttgggtttcagcctccgccctccgccacctgggcgctgcctctccgccaccattgctagctatcacttcctctctctcttgtttacgtacgcaggttatcgagaaaagcaagagtcacaaatatatagagggagaaagcgccgatccgcttggttgcttcctggaaggtagctccttgggcttggatttcgacggcaagttggattgggccgaccttcccctcagtagcttcctggtacatgggagtctccaatttcaaacatttgttttcaaaagggcacctaatctgaattttttggattaattgaatctgtacttcctttccttttctttcctttctttcattttcatgtattaatgtaagaatccttttttttttttgacttcgaaacaccatgcccacgagatttgacaaaaaatagcccaccttataaaaattatacaccaatcaaaacatgatttcaaaataatgtcctaactcagtgcatctatgctatataggcacccacatcataaaaactatttataaaaaaaaaaaatcaaaatcatagttactaactacgattctatgcttaaagttaaaactgtgattagtgactacagttttaaacttaattttaaacccacaattagttgtgacttaatatatattgttttatttaaaatatttaactttattttttaaaataaatttatcatattatttttattttatatttattaaaatatgtaagtgattaataaacttatataattatttaaaaataataacatatgaaacaaataattggtattttaaatttgataaaaaaataatttttgttttgttgtaaaataaaagaataagaagaacaaaagacgagcataaactaagatgttaaaaaaaagtagaataaaatataggaagagaacaaaatgaattttaattagaggtatcttctttttatagaaagttacaaagagatatacatcaatatggatgatcatccacaagttcctctaatccgataaatttctcatattttataatacttccccttgattgttctccatgatattgtcgtaccatcatagataaatacatacctcatttgagattgaactttgtgggggtttgaaagataatcaatgttcaaacaattcataatatgttctcttgaaactttgatttatgaattaatttttgcacattgatttagatcataattataatttgaataaaattattgatttatcactacaattagtttgattattgaattacttcctagttatttcatgtataaattgttccacacttacaaaatcaaatgtgtgagatatttaagaaatatatcattttaaattatttttttcatatttgttttgttgtgttatatatgctttcattacttttacacaacttattaaggcaagtcatcatcgatgactagtattttttcatttgttttaactctttatctatgataatatgtctttaactctataaaggcgaggtctttatgacatgttttataatttgttattttgatgaaattcttgtctcattaattgcacaacattgatgaaaaataatgttaatagtatatcaggtgatagaaagttgattaaaggctccagaagaacttatactatgttactagtagtatttaattccatgtgaatgactctttatactatgctagatccagaagaatcttgtaagaccaacttcccccgaggtaaacgatgatacattaactcattgtaaagtcatatggatgtacattataaaaccaaaagtttttatctagtaactagtctacctatacacttgaaaggtagaatgacatattgtgtagattatcattttaatgagacaattttcctgccattaggaagagaaaagccagattcaaaagaacgacgtaaaattatttggaatgtattgactttgactcattttgatcatcgtactaatcaatgtgaactggaagttaaaaaagattattcattttcaaagacttgcaaatcaactaccaaatgttttcattgatgtaaagaaagtgacaaaatcattttcactgacctagaatattccagtacaaattgatgtccctaaaaaacgaataaataatgagttgatatccctgaagaatgattaaataatgcattgatatccctgaaggacaattaaataataagttaaaaggacaattaaataatgagtcgatgtccttgaaggataattaaataatgagtttatgtccctgaagaataattaaataatgataaggtatgcttgaagtgtggtagaccttgaagaggcaaacacattcattataagaggaaaatacaaggaaagatatatataaaatgtgacattcttgaagaagttgcatataaagtgaattattaaaatgattgattagtctcaagcaacccctaaagaggcacagtttaaacaagtagccttaggagaggcatatgttttataattagctcttgaaaaggtataggtgcctaataatgatgagatctcaattatctacttatatatgaagaaaaatggggttgaagtactcttgtcattgacaatatattttatttccaagtgactattgacatcataagaaatgatgagtatttcaaagtagaaaccatggatgaatgtcaatatagaaaaaactggcaaaaaatggaaaaaatagatctcgacaaaattagattcattagaaaaatgagaagtatttggacttgtagtctagaagcctaaagttgtcaaacttgtgtgatataaatgagtatttataagatagtgtaataagaaaaatgaaattacgagatataaagcgtgactcatagctcaaggtttctcacagagacctagtattgaccatgaggaaacatattctcctatgatggacgcaattatatttggatatctaatttgtttaacagtctcaacaggactgaatttgcgtctcatggatgtcattactgcatatttacatggatatttaaatagtgacatatatatgaaaatccttaaaggatttcaaatgcctgaattttgtaattatagcatatactcaattaaactacaaagatccttgtatcaattaaacaatccaaaagcatgtggtacaatcacttcaatagatatttgaaatgagatgtatatattactttatttgtctatgcatattcattatgttgaatatttgtaattgttatagtatatgtggaacattgaattttgttggaactcctaaagagcttacaagaatagttgactatttgaaatgaaatatcttggaaaacaaaatttttgtcttgacctgcagatcgagtacttttcaaataaaatgttagtttattagtcaacatatatataaaaaaaaaaaagtcttgaaacactttcatatggataaattacatccattaaattctctaattataattcattcacttgaaatgaaaaatgactccttctatcttaaagaaataatgaagaactacttggtacagaagtaccatatattagtgttattggtgcagtgatatatcttgcaaattatacataaccagatattgcattccttgttaacttacttgcaagatagttctacaccaactcagagagattgaaataaagtcaatcatgtactacgataacataagtctatgttattccaaatgatcaaaatcttaattatttgaacatgtagatactgactatcttttatacccccacaaaactcgatcttaaatgaggtatgtatttatttatggtggtacaataatatcatggagatcaatcaagaaaataatggaaacatgtggactaccctccattagaggtaatgctaccaagttaataatgttgcatgcattgcacatattaaagaatgatacattatgggtaatagaatcaagcatatattgcccaagtcttttacttttattaactctagaagagtgatgaaattactatttgatgagtaagatcaagtgacaatttagtagttctatttacaaaggcattgttaactacagtactcaagaagctcattgaaatatgtcaactcaaagatcttcatattgtgctactagagaaaatataataatgtcaacatgaggaggaactaattgataagaatatcactatgctatacttttttttttcttttgtttaggttttgtcacattgggtttcactagtaaggtttttaacgagacaattataataatctaaaagaatattgtactttttttttctttactaaggtttttcccataggatttttcctagtaaggttttaatgagacatattcttatgatcatcaagggagactattatgaaatatgagaatttatcaaattatgtgaacttgtggatgatcatccatattgatgtatatttatttgtaactccctataaaaagggagatacctttaataaaaaatcattatgttctcttcctacattttattctactttcttttgtacctcaagcattttttttctcaatgtactcggagcgtcgtgctgataacgtgttgtaaaataaaataataagaagaagaaaatatgagagaataaacaaagatattaaaaaaaaaaaaagtagaatggaatgtaggaatagaacatgatgaattttcattagatgtatctctcttttatagggaattacaaagagatatacattaatatggatgatcatccacaagttcccataatctgataaattctcatattttataacatgtttaattttattaaaacaattgacattctatttaatataaattacagttagttaattatatttaaaaataataatatagattattatataaattaattatttttatatattataatgtaagtggtatataatatgagatgtatagactttttggatttcactttttattttatggtaacttatgttattgaaaattattatagattcatttagtgttattacttgactcactacgaaacttctcttgggtgagcctatttacttaacttgattgattgcagagctacttcactcattttgttggctactcttgtatgaacatcgtttctcttcttagattatctagcccgcatgccctctatttaattaagtggttccatttcctttcaagtggcttgacgctagaacacttgattaagaaagatcagagtactaaagagaaacttcttctcctgcctacttggaagattaagacttcggattatataaattcaatttaagtttataatttattgtattttcatttcaatatataataatttgttcataataagaaaataaacaacagaatacgaatgaataattaaaaaaaaaatatcaactacgttttaattttaaacttaaaactacaataggtgattatgattttgacaattttgaaaaaaaaatattcaaaaccgtagtcatcaattgtggttttataatgtggatgcctatatggtagagatgcactaaatcaaatattatttgggaatccaagtttagcttgtagattttttcttttaaaataagttatttttgcttaaaactcaccgcatatctcgatccaatttcttttttattcatgtcatggaatgtctttgtcccattctccatccgtctatgttttatatcaaacataatcaatagaataatttaataaatttatttaatgtcaaataaatttaatataacatattaacaaatatcactttataatatattattctcaaaaatagttctatataataaaataatctcgatatttaagataataagtaataaattttgattggggtgcattctcatgtccccctagagggagttagccagttgacgcggcagcctctaggaagaccgcttgtcatcttcagttaatgaagaaagacacggcattgattcgtctgaccatccattcaacagaaagcaataattagtggcaaaaaggacagaccaatttgttttgactttgaaattttctagttttgtgcctttccctttttatcacttaacctccaatttctatgcccacacgtaacgtgagcatgtaaaatcgtactcttaccatttatgtttattagttttgtaccaaagaaggtaaaaaaaatgtgataagaaaataaataaaagccaaaatgatgctaatttgggcacccaaaaatctgtttggattttaggaccggaatctttgagtcacaagatctagaaaaatgaaccagtgcggttgactgttgactcttgacagttgcaggcattagcactatattatattatatagcagtaaacaacccaaagtccgtaattagtcactaatcattaattaacattaattgtaaccaattaatttaataattaacaacttgtccaacaagcccatatattatacacttcatatattcttgtggtcttccagacttgcttctgaatggagcttgctccacacagggtctccatctccatctcactctcactttatcttaattggttgagccttgaaataatgaggagagccaatcagattataacttgggcattaagccattccacgtgggtggaacccatctcatttcacgcgccctgtacaatctctaagaattcagcgccagattctgaggccctaggatgatgacacgtagccgatgtgtctaaatgttacgtggggatgacgttgctccacggtggtgagcaaccgggcaaactctccttctagaaatctttgcgatgattatcgtgtgtagtcgcggactatacagcagcggattattgtattgacaagtgataagatattaagatgtaagtgggggacatgaggacatgatttgggttcagcatatttgttgggcccaattaatgtgaagaggggctggacgttgggcctccagtccagttaagctgagggtcagcccatatatgaactacaaagcctaggagg

SEQ ID NO: 12222 - DNA, 3574 bp, Vitis vinifera
  Intron number 8 from transcript GSVIVT01024532001 (locus G SVIVG01024532001) derived from phytozome v7.0 (chr-ID chr6 ; pos 9115115 to 9118688)
aaacacatattttgtgaagactgtgtatcagagtaacctctttctgccttcagtatctctaatcctataaggattatgatttctaacctcttttttctctttcatgaataattttctgttccatgcattgaggtgttaaatctactcttcatgacctttaatcaagaaagacccccatctttcctcaaggttatggatgaactgtatcagtattaccttggaagaggtcgcttggtgtgttttcttcattaacaatttaattttagttgatgtggacatactgaagagaaaaataagaactatggatggatggaataagaacatttgaaggtaagcaagcctaagacaagatttaggaaatttggtttcagtaaattaggagtgaagatatgcttacctgcaacagttgattgtgttcaaggtcctctacctttaattgcagatttgatatatgtctactggaatttgtgcatttgtgttgataaacaaaagcaatcatggttgtaaacatagatgcattagttgactgccaaagtcttcagcattaatggagatcagctgaaacatgtctagaggcagagtttggtttgggattgatccgaaattctttgagatttcggtggattttgtcaaaaggaaagttgtctcgggtgactactgagaggggaagaagcttttcgatgtggatttcatttggagaaaaaggcttggcttcattattggaaggagtggaagcttgctgtcagaaaacgaatttgaaagtcttcagcaactcttggctagagggcggaagaagctataaactccaattgcgtcctaatgaggcgggaaggtttctttgtgtgtagtcttttcagtggaaagaaaaaggtttgttttgatcttccctgaaggtaagggattgctgggagggtggtcagttctagctcagaaattgagaacttgtggggtgaagtctcagtttaaagcagttgtgttaaatgctagggctctccctgttcagagggaacggattgtggggactaggactgatgcctctctggctaaggaggggggagtgcctcgggagagtgagtttgatttggtgtggttacaacttggggatgctaacgccttcaacaagttgcatcaccttatcagtgcttggtggggagatggggagaatccgcggatgagaccctgtctttaacccttttaaaggattgggctaggaagttttggagattaaaagggaatctatctttgtccttgttgggaggtttgttgattctgtttgattttgaccacatagggttctgcaagaaggtgaacaggtttgtaaacaaaaatctcttttgcttgatagatggaacctagaggttggctgttttagaaagagtgtttgagcaaaaagtgattgggtaaggctggttaggactattgctgttcctttggggcagagttttcttcaattaggtgggtgatgcttgtgggagattcctaagggtagatgaggagactgcccccggggggcgggggatggggggagaaggggaagaatctacagtcagctaggttttggccaagacaaatgggaggaaggtgtcgggcagtttataggtagctgtagggcagtcctgtttctcagttcagctatggtgggaactcccaccttgggtggatcaggtggttccctgtaatgaaagctgaaagaaagggagaagatgatggttacttcatgtgtgcgatggagcatgggatctgtgggtcctcaacaatggaaaaaagtgtctttgcatagggccttttttgggattaggttaaattgtatattggggacggttctttgtcgatgttaggatttgtggattggttaggctctttatagggcgggtttgttagtttttgtgtctttgcatttccttttgggttctatggttactttgtatatattgtgtatacccttttttatttatattacattttctttatctaccaaaaaaaataaaaaaaaataaaaattaggagtgaagatatcgaggggtgagaattatccaagcataatcaatttcattctcttggttcaatcatccatgaagagtggagattaggttgtagtattggcacctatgtaaaagcctaaaaggaaaattatataagacactaaggccatcaattttgttgaaccgcatgaacaagtacctgttcatatatgttcagggatcatatttggcaaattataaatatcaaggatatgacaatacatacacttagtttatggatttcaatgctttagttaaaacaatttcatttgtgatgacttgtgtgatacgtgtaagagcaaaggcttgggatgtgtttaggcattccctttgggtttgaatggattttacataacattgaaagaaaactcataatctaaaatggttcgaagaaaatgggagatatcaccataacagatgatggtgtcgggtcaatttcaagttttgtgaaagtatacaatttaaaaaggtttttaccatcttggaaacttttattaagcacttggtctcctttgttggagactttttttccctataagtgcttaaagcttttatagtgtgtacattactttttctgcctacagtctatgcagatagttttagtttttgtgaagtgtatgtgcagctttctaatcagaaattgtacatcttggaaagattgctcatcattctttgtatttactgttaaatgactatctttgtttctgatttaaaaaaggaaattcatcaagatgtttatgatgttttgggtaattctcctgttcacactactaattttctaccttccaataatagtccgagggatggaaatattgaagaaagctatgtgctaatcaactctatgacaatagtggcttaaaaaaaccaatttaaataatattttgtcaatgagtgagcacggattgaataaaaggggaaaagcaatttgatagagaagccaatgtattttttaatgcctagcaaaaaaaatattacaccagtaagcaaagtatccttagtagatgttgaaaaattagcacgaagagctgaagatccatcaaaagttggagtgaccacacaataacaattcataagaacaagacaacttagagttcattttaaaattctctctagaaaacctctcaccttttgatcaatttcatggggcagtatcctctttagtgtaattgtcaattttattagatttaaatttctataatcctaaggtgtggatgactaggaagggtagaaataatgtagtaatgagagagaccatcagtcattttgaatggaggctcaccttggtttcagagcatgtatatgctctctgcaatttttatgtcttatcttgtgccatttctcgttccatcttcataggatgtgtatttcaccataaggtgtgtgtatctttcataaaccttcactccattaacatatgcacatgtgtattagtttaccctctatatttgggtttcaaattttgtatataatgcttttatatattgccttttctcttctgttcctaagcgttctggatggggatcatgttttttcaggtttgagcgagagaggac

SEQ ID NO: 12223 - DNA, 4608 bp, Vitis vinifera
  Intron number 5 from transcript GSVIVT01022282001 (locus G SVIVG01022282001) derived from phytozome v7.0 (chr-ID chr7 ; pos 18177931 to 18182538 reverse strand)
tggatcaaaattctcaaggacgcaaaggtgaccaggttggttactacagtttcattcagattggtgctaggttaaactcattgagtcattgcaacaattttcaatatatgttgccaaaatcaaactactttctagttatgaatgtacctttaatatatgtacctctgaccattcacatgttctgttagatggaggaggggtggaactccctcgagatttgagagtttgtggctcaaggttgaggggctcagggacttgataaaaactggtgtatgggatatgctttcagagggtctgtcagccactttctcacctatagactgaaagctctggaggcgggctcaaaggaatagaaaaaaggtaaatttggagatgtgtcaactcagaaggaaaggaccttagatctgacaatttttggcattcaaaggagagggaagttcctctttctttagaggagaatggggctaagggaaaggcagttacagactatcttcatcgagctctcttggaagaaacatcatggaggcagaaaccaagagattgatggttgaaggagggagatgaaaaataccaaaatatttcacaaaatgactaatgtacatatgagaaggaatcacatttgaagaataagggcagatcaggtttggttatgaaataaaggaaaaagttttcaattcctttagtgctcttctttatgaattggggaagtggaaacccaacatcagtggattgctgtttaagccatttggttgggaggtgtcagggagtctagaggtgcctttcacagaagaaatttatgcagttttttctgggttgtggggataaaggccccggtcttgattgatttaatacaactttttggtagctttgttgggacattgtaaagggaagtgagaggtcttttctacctcaactttaggggctgcaagtatacatctcacaatggaagctagtgaaatgtccacttcctcgtcatccagtaggatcatagactccatagtcaaatgaattttcattttgctcatccttttgtggttctggtttctcttcatgttccaacccaatatgcaagtttttctttggacaattatatgtcatatgaccatgttgttgacacttgaaacatttgatacctttatccttaggatcaaccatttgagaagaagatggcttagaccttataggtggattaaatggatgagatgacctagccttgtactacgaagcttcttatgtgtagattccatagttgtaactctcaagttcctggtgaatgaatatcccacatattactccatgtttaatgcaacttgaaaagcatgttccaagttgtataatggctaatgcaagaactcccacttgatttcaggttttagtctgactttgaatcttgcaagtgtttgttaagggtcttctattatttgactccttgtttttaactcatcaagcttctacatatatgttgttctacctcaaattaatgagttcgtcacatagcttctcgtagtaattggtaaacatgtatttctcccaaaacttacccttcatctcttgccacgtgttgattggtcctagccccatcctcctaatgtgtccttcatcacctgtccaccaaacttttactaagcccacaagtttcattttagcaaatctcactgtcataccaatcgaagtactcttcaattgcagctagccaatcaacaaattgagtagcatctgcctttgcttcgaaatcaggaacctccattctccctttctttttgacatctctagcagtgtcacaagttttatgtcttctctcaagcaatcctctagcccattcagacatagggtattgtggttcctgaattacctcttgcttctttgcattttcttggttgttagcttgatatgtttccccttggtcaacatgtgatgactcatgagtgggttgagatcttcgtgtctcaacattgctcagccgaatgtggaggctctcaagttgatccactatctgaattagtatctcatcacgttggctatcagttaatcttcctctaaaactctttccagattgtgtagccatgatctcacccgtgctctgatagtaaaatcgatgcaggacaggaaagtaaaatggaaggagagtagtggtgtaattgaaagaaatctagggtcacttctagaaacatttggacttcacactcaagtgctctttgtatcacacaaaagaaaatagtggttgttggaaattttatcatccattcattgactattttcaaaagatagatcaattattgtatgaaacttttctagggacttataactccttggaactagtcacatggtagtaatggaacttgaaaaaaagaaaaacttagactgactattaatccacagtaaagactcttgaaaaatgaaaatagtgatgactgaaaataataatttatgaccgtagactaggtccatgatttgattttgtgaaagtactttataggttgaactcgcattaaattatacaaggtcctaaccaagcccattatcatccaaagagtgctaaattaaagtttaggccttggagcccactcttttgcaccttcaataaactttttaaaggtgactgccacttatctccagaaatccatgtgaaaatgaggttctttgcatagaaggcagcacagaaggaggattttaactctggattgcttaaagaggggggagtggactttggcaaattatttgctttctatgcaaacatggaagaagaaacatgagatcacattctatttcattgtgttaaaacaaaggtcttgtggcatttgctattctcgccttttggggtggaataggttttgacattcttggtaaaagaaaccccttgtaactggctagagaggtttgtggggaacaaatggagggaggtgtggggggctgctccgttgtacttactttgaactatatagaaagggagaaatgataggtcatttgagaatttggaatggttggatcaggcccttaaaatgtctttctgtacactcttctattgtggaataaaatgtccatggacatggtgaatacaatttatattctagttctagttgactggctgggatctaggtgatgggaggggattttttttgtttctttaccctttttttctgttgtttgatgcccttgtgtacatccaatgtattttggtgagttatgttttttttttttttttttttttgggcattggtaatatatattttttgtttgactatcaggaaaaaaaaaaagaaagaaaaaagaaaaacatttatatatgttactagatcttctagtgtgcctcatagcccaatactgtcagcaaacttatatttttttgataggtaaaagggtaatgaattaaaaaaaggtatacatgatgtatacatatacaaaaaccaataggggtgaaaacacacaaaaacaaccgcatcctactgtaggcaaacatattaatggggaggaacacatttttgctatgctgctaatactgttatttttttagtattctgccaaagcctagcaatggaaaagttacagtgtagctttaggtccactatctcaatcatgatgttcttagcttcagatggaaaggttcttcccttttgacccgcttgtgggcaagtagggattcaaaccatcaacattgtggttagtagctatgtgctccaatcctttgggctaaagggcccctccatctccactggccactaggtatgctgttcttcccaaatattgttgatgtagggagtttaatgatctcaaaagttcagtttgaggtagaacattatccatgaaacgtaagctttacatgctaataacagtttctcttcaccataatggctatcaaggaaggaaaacttttactttaccagaatttcgatgtagaagagtatatatttaaatctgcttaagaaggtagaaactcttgcaacactgaaagtttgaatgcactaaaaccttactaagtaggaaaatttcagcaagaagattttttaaattccgaatgagactccctaatcctcaataagtagcaaactgatacccaactattacttgcttggatagcgaaaaatctaatattttgacttaccaaaatactcccataaggattataaggattctagtacaaaggaaacccctacctttcttgtccatgtgctttgcatcaccacatcttaaaatgaaatggtcaattaaacttcgttaacagtttggcgggtacaaatcaggttcattccttggagtataaattattttcttggttgtagagaaataaaatttgtttgagggtccttttatatatatgtatatatataatttaatttgtttatttattttgtgagaattgaacctggaaactcccaggcccccacctcaaccccttgctacttgagcaaggcctcaattggaccccaattgaacccagtgacaccattaattgttttctggtcatgaatgctaaattacttgtttagcattttatgaaagttaattgaacgtttctttttccattatgttctcttccttttcttactttctttttccctctgttttgtactgttattgtgtctctgttggtatgctgccaacacttgcagg

SEQ ID NO: 12224 - DNA, 7811 bp, Vitis vinifera
  Intron number 1 from transcript GSVIVT01012914001 (locus G SVIVG01012914001) derived from phytozome v7.0 (chr-ID chr1 7; pos 13376320 to 13384130 reverse strand)
agcggcgctgggttttggagtttcctatcattcaggtctgtgttctttagctctcttttgatgcttttcccccctcttctgttaccgagaaaattaagggtatgtttatgtactatggaagtatttctggaattcctttttcctgaggaactacatttaggaatcaacagagtgtgacgaaaatggaaatgacactaaaatggcgttatttcttgctttgcatctatggttttaaattccctttatgcctaatattgaatttagcttcaggattcttggatcctgatagaagaagtatttctggaaaaaaaaaaaggtagttctatgaaacaaagtttttgtgtgagtgtgtctttgatctccctggttcctaagaaagcttctaccattgctattgcccacttcagacccctcagattggtaagcagtctttataatgtagttgcaaaagctcattttaagtgttttcagacagtaacatgagatggtttcattcctttatgaagctcttgtgggagataggcagattttgaatgtattccttattgcaaatgggatttatggatgaaaaacttgcttgagcgaggggacaatgtgttcaaagttgattttaaaaaggattaagggagttttaattgagattttctggatcattctttagatagataaggatttcatctaattggaggccatggctttggggtggtcggcctaggttacctttgcaattttagacaattgttgtgctaaaggttagtaaaggccaaaaagttggcttatataggttgacccattctcttattttggcagatgtgttgtgtattaatgatcattgttgatgatagaggtctattgggaggatttcttgtgggaagaaattgtgtcaaggtgtcctattgcaatttgtagatgataagattgttttttagatctagagttgagtaacattatcaactatcaatccttaggaaaaacaccatttctggcatttgtgtcaactctaacactcttcattggttagtagctagctgcatgcctaggttgtaggatggaatatccctttagtgggaactccaaaatccttattttcaaggacttgtgttagagggatttctaaaagattggatgagtggaagaaaggctacttattattgtgcagaagaataaccttttttacaatcttgatgggcttgtattcccatacatacatatacatatacatatacatatacatatatatatatatatatatatatatatatatatatatatatatagatatatatatgcattcaagatttcaattaaagattcattcatagttgggggatttcaataagattgtttttggtttgagcgtagggtttgggtaagggaaaaaaaccacttgataggtttgtgttagtcgataagctaaaaggtgaaggtggatctagtctagatagaatttctttgggaaataaaaccctcttcgataagtggctatcgaggttttttaggaaaaaggatgctctttagcatagggttatgctctttagcataaggttattgaagcatttatgggatacactttaatggctataatgctgacatttgagttaggtggatgcattttttacctttaggaagcaatgacctaatgttccccctccccccccttttttttgttgtttgttgtcatttaaatctaggtttgagagggtgcaaagactctttccttggaagacttatggtggagtaataatcttttcacttttttcctaatctccatttgccaaatatggagattcatccctccctttcattctagatcactcctatccctttatttcctagaaatttaactttttccaaataattattgtcagtttatttgtctcattttctcatattaaagttaggtttttgtccctctaaggtttattgtctgcttgtttcttttttgctttgaccttatttgagaaacaattttcctttttgttggtcaacttgattttgagatgtaaagattcacctaaggcttgtttttctgctttgctttttggctaataggaaggtttattcactataattgagaagaccttatagtgccctctgccgaaactcttttgtaatgtgcttgggtagtggatagtgagtggatcatctctttcttcattgtttgaaagtgatggatttatggtatagattccacatatttgttgggttagcttggatccagatgaggaagaatgttagaaacattctttggagaaagagaaaggcttagtttcatgcctaagtcttgatttgggacaccaataatgatttaggttcctctttgggacttactatactataaatatgtatttaaggcttaatagtgttaaaaatgttttagtattgtttgttttttaagttaagccttattttggaaaaaagtaaaattttttaactttttgttaaaaatatgaaatttgaatgagacttttgtatcaatttctatttagattccagatagagacctattgaacaaaaaattaatcaaactcctcctttgtttaggttaaattgagattttttgttaagtttctctttttaatttgttgagtttctattttagtaagtggtttactattgagaattttctattttttttaatcttcttgttatattaggaaggtttatacttttttaggttttagataatgtttccttcttatatctttccctatttttataaggaaagaaaaggaattaaaaagttgtctccttagggaagactaaagagacttataagagtttatatatatatatatatacacacacacagacacacacctatgtagtctttcaaagtaaagaattggaattgtaataaaagttttcagcatctattatgcttcctttgagggtgtgattgacttctccttaagtttggttgcttaacaaactttatgtattgattatgatccttaaagtgattgccaatgatttcttttctttcttttcttttatcttctttgatcttttatgttagaaatctaaggctcgatttgggaagtgtttttgaaaaaggttttgaaaaataattgttgagaacaatttttaagaactattctttgacattttatagaatgaaagtttgtttgagaaccggaaatgttcttaacttgttttctatatttttaaatatgttttaaataacttttatttatagtgctttatttttaatcattctccatgcttgtataattattttttaaaataacccccaaagggcaaatgaaaacaattaaaagatgttatttgaaaagcccttaaggcctgattcaagtggtaaagggatgggggggggtttgcaggaggttccaggttcaagttccaatggggacaaaaatttacctataaaaaaaaaaaaaaaagatatttgaaaacactatgctttttgtttttaagcataacaaactattttttgttttctagttgtcatacgtgttttcctatttttttgttttggagagcaaaaaattgtattaaaaaacagttgccaagcagggtctaaagatactggaatagcactatgacaactagaagtgattgaattttaggagaaagttcatagattgattacttgatgattttctttatatgattatggagaaggttcataatttggaagtctatagtcaaagaactacaagctgttgatccttgcaatacttagtatttggctacatttccaaactagcaattggtggcactaaggataagggtcatttgtttgggagggatgaggataaatggttaggttcaaatatgcctcctatattcttgaatttttcttatttgtttgatagacatttctttcttgaattaaacacaaccaaagtcttttgatagaaagtgaggatgagtgaagctttaagaggtggaaggagttggtttgttgtagagtccaagtcttttgagttgcaggttgaggaggtgggtggaaagttgagggggtgcatctgggagagatgtagaggaatcacttcatggattaggtttggggaagttagtttaagtcggttgttagatggagttgaggctttttatagggataatggaaatagaaggtgggttcttgattgggaggaggagggagggaaatatagattggagcgacattcaaatgaggtgggaaggttccttctctattcagtttgtgatcttgagtctaagaggtactgcattatattcctagaagggaggggtttgtttggtggctagaacattctagcagagaagttgtgagaccttggagtcgtctcctggtaagatttctagactcgggtggttcaacggctcctttaggggagaagggtttgttgtcaaaaacttatgcggagattgcaatgttgatgagttgttccaattggctttgaaaggagaaataatctaacataacccttaaaaggaatgttttcttcctaagttatggtgataactacaagaaaatataatgaaaattaaagagcaacaagaacaatcataatgcatattggttttagagctaataatgaaatgattgagggataggcaacaaatactgaaacaaactttgtagtctgtatatgataaaactacctagagagagaaggaaatagaaaaaagaaggggggggggggttgggtttgtgaattggtagtccctaaattaatcccaatttcaacctttattcccaacttctggttgtccctttagtttaattatttattgagagtacatcaatcccatgcatatatcagtaaattcaatcatgcaaatgaacatatgatataatgtggaaacaaccacctagcaaccaactaggtgtaaaaaaaccatagggtggtttattgatcatagataatccattaaatatgagaagatggtacacagatttgcttgatcgaatgcgcctattccctagggtcttagattgatagtacccacacctatcttccatgtccttggtgcaacacttccttgcgctccttagtggagccctcaaagcccttattaaagttgaagtagtttgagtccagacctttattgaagccatgggtgctttctagattgcttggaaagtgttaagagatggaggttcaagctttggagatgacaattgctcacatagggttctcttcctttttcttcaaaacaagtctatttatacttggaaaaaactaactcatcataatggagagtttcctacttttaaaacttcccaaaataagagaatttgagttaaaaaaattaggcaacaacaggaacaagtcaaacatttgaaccccaaggggggatgtttgaacactttccccttttctctctccaatttgcaacgttccaaactattttcaattaccttttcaacacatttttataaacttatcatttcagaagctttaccaaaccaaacatgcatacatacctcaaaattaatgaatttaattatcccaagatcaattttgttgaagcccaaagttgtcttagtcaataagacccaaggaagcaaatgcatcatagttagtcagaaatggaacaaatttacgaacctaaaaataatacacttttttttttcgataagtaaacatcagtatattagcaaaggcaaacgccgcgaagcatacagggagtatacgaggtgacaaaggccacacaacaaaagaacaaaaacaacaaaaaaacccaccagccctcaactggaggctatccactccaggaaacctataagggaccgggactccacaccattatacaattttgcccacccccacatattacagacaaaagaatacttgattttctgtatagctagctccccccccctaaatgctaatctattcctctccttccacaccgtccaaaaaataaacaacggtatggatttccatattctcttcctctttttgcccacaaaggaacccttccagctggtaatcacctcctttacagtttctggaaagacccactgggctccaaacagactaagagtcatcccccacagcacactagccactgtacaatgtacaagaagatgactaacattttcctcatcactaccacataggtaacaccggttagggatttgccatcctctcttttgaagcctatcaatagtaaggatcctcccccaagtagcttcccacgcaaagaacgctaacttggaaggcacattctccacccaaatgccctttttgggaaacagcaaagtactatggctggtcaacagcccatacgcatccttgacaccaaactgcccattttttccccccttccacaaagccaaatcctcctccaaattaattctttgattccttaggatttgtaacagttcttcaaccaagggcagctcccaatcattgaagcttctcaagaaccttaggttccactcaccttggccagcattctggtcccataagtcccccacagtggcacctttttgggcagccacattgaagagttgagggaagctccgggccagctccacatccccacaccaagtgtccttccaaaacctaattttggtgccttttcccaccttaaaagtcatattattccaacaccaatctgcttctttcataatctccttccaaagccccaccccaaatgccccatttgcttttttagttctccacccaaaatcctcttgcccgtattttgctacaagaacacgtttccacatttcatccttggcacgagcaaatctccaaacccatacacaaacaaatactattgttataaatggagagaaaggggacatattgcatgaaaatgtcctaaaagaaatttgcacatcaattctaggacaaaatatgacaataatgaataatgatgaaagtgatgattcatccaatgaaattaggtccctagatgttgatgatcttgaagaagcagatgaagacttttcttttctttcgttgaagcaggaaatagaatattggaaacatgctatatttcaaattgtagtacattatggaatggaacacaaactaatcattgaaggaggtaaggacctgaatgtagtatgtgaagagctgggatgcttatgctgaatcttctctgttaaccgcttagtgagatgcttcgctgttagaggagttcatggatttatgcctcattaagaggttctttgttcttcttggttttatttatttatttattttatggtggttctatcctctggcttattgtgttcactttcaaggatatcccatccttcttttacttcgatttttaatgcaataaaattgttctttcaggaaaaaagagtttgaatgatttgatttatgcacccatcattataattgagcaattcaatagaattaaaaaatggttctgagcatacaaattgatagcataattgagtttaattattgaattctccctcctaggaaatttatagtttggaactagacgttaattatcctattacttggatgtgacacatgttgtgtgtctcatttattaaggtctatccaatcttgaacctgctgcttgtgtcggatactatcaattttgtatcatgatgctgtcattgaaactctcatactgtatgattatgaaaccaaaatttatggttctactttgtattgtgtttctgagcttatggtgtgtagcttgatctgaccacattcatttttacatgttgaatatatcattattgtacatgtatctgctggagtttctcattcagaattgtaatttcatgtgttataatatgctcattgtgctgaccctttttactcgttatcactgattttacttgcttatctttacagcgtccccttttctttagcttcaaa

SEQ ID NO: 12225 - DNA, 11922 bp, Vitis vinifera
  Intron number 3 from transcript GSVIVT01036083001 (locus G SVIVG01036083001) derived from phytozome v7.0 (chr-ID chr6 ; pos 20881009 to 20892930)
aatcggcgcaacacaggttggcacttcatttattgatcaataattcgttcttttatttttatttttatttttaattttttggctgtgataataattcatttctgcagtttcattatgtttgctgcatagtcaaaatttctcttgcatgctgactaggagaacatagtttttttggaatgattctgagagactagacaagtgtagaaacaaaaatgtggtgggattgagctaagagggtcatacctagtcaaattagaggtttgggtgtttgattggatatggaatgtgtacttccctttgtatttgatgatgggaactggactggaagacctgtctgagggcccttgcttagcaaatttgtgcttttccctgaattgctttaatttttgtttaggatttaaaaattatatttactcattttaatgatgtaatttcttccacagaattagacctcctgcttgtggatatattggtggcaagtttacttgatacatatttcaatatgttctccagctctgttacctaacatgatccctgacaaagggaaaaaaaagcaaccccaccacaaccctttggctctctctctccagctccattacttaacttgaatcacatgatcctcttttagtaatgataattctccccggtttctcattttaaaataggcccacctatgtagcatggaccctcctaaatgggagccataattgtgttggaatttaaggatcaggacaaagattcagaacaaataggatggctggttaagttcaattctgtgtttgtagagaggagtattatgattattattaatttttcaagtaaggtattccctcatgctgaactctataaataaaaattgtacctccttaggtgcaccctttgcttaggcattgttaatatatatctgatttttgcctatcaaaataaacgaataaaaaaaaatttgagcaaactgaattttgataaaaagaaatccatattttttgtggacaaaagtgtgcatataaatttttttcttgaagaacaaaatgaattatgatattcatgagtaataggtcattttttccttttttctttaattccaaaatagtaaatattagataaaaaaaatcataatatggtctcccactttgattctattttttttttttgataggtaaaagagtattgtattaaaaaaggtatacacgatgtatacatatacaaaaaccaataggggcgagaactcacaaaaaacgatcgcaccctacggggagcctaaccaatctacaaaatctatctaagaagtaacactatccccatgtacactttaacccaatcccaaaagagagaaaaaaaaacttttaattgtttgatctaatctttccctatccttaaaggttctcctattcctttccctccaaatggaccaaaaaatgcatagtgggccaactttccaagcttttttcctctttttgccaactgagaagctattccaacttaagagcacccctctgacaaaagaatgcatcacccattgtacatgaaatagagcaaagaccaattgccacaatatgcttgcttttggacagtgcaacaaaatatgatcttctgcttcctctctagccttgcacatgtagcatctgtttgacatcctccatcccctccttctaagttggtcctttattaatatcttaggccaagttgccttccaagcaaaaaagctagttcttacagtgacctaagaattctacactatactgtgcaggaaaggctccactctcctacttgctagagggaagtaaaaagactgaattgaaaaatcttcattcttagtccccaaccaaaccatgtcattctgtagcgatggagtagttatgcaacctcccaaataaggcatcgatgttctccaactcccaataattgaattgtctaataaacctcagattcaaactacccccatcccaaacatctaccacccaagcatccttagaggaagcgatagcataaaggcatgggaacacatctctcaaagaggcttccccacaccacctatctttctagaatttcactcgattccctgaaccaacttgaagacttgttttatctttgaagacctcccaaccatttctaattgctttccaaacccctacaccaaacctccttctcacctcctttgtgcaccacgccccttcatataacccatacttgccaacaattacccgtttccaaagagggtacctttccttcacaaatctccaataccatttccccaacagggccttattgaaaaaagaaaggcttttaaaacccaaaccccccctttttgtttctccatacaaacaatcaaccaattaaccaaatgaggcttttgcaccaaatcctctcttcccaataggaagtctctttgaatcttttccaatttggccaccactcttttggggataacaaagaggaacatagagtaaatgggtaaactagataaagtgcttttaatcaatgtttgccttccatctttcgaaatatatcgtctcttccacaaagcaagccttttctggaaccgttccttcactcctttcgaaaccctactggacttgtaaggagcacccaagtggacgcctaagtggttggaagggtgctcacttcgcaacctaaaacctcggcaaactgcaccaaattttggacatcccaacaggaatcaactcacttttctccaaattaatcttgagacccaagcatgcctcaaaccacataaaaacacaactcaagtactctagattttccttcttgcatgacaaaaaatgagagtatcatctataaagaacaaatgggagacctctacatccacatcatgcctttctttaacttggaacccctaaaaaaagccaccatcctttgccctggaaatcaaacaagaaaggatcttcatcactaaaataaacaaggagacaaagggtttccttgtctcaaccctctagaattgctgaagaaaccaaaaggagtgtcatggaccaaaacagagaaatggaccgtagagatacatcatctaatccaagccaaccacttggagccaaaacccattttatccataattgcaattacatagttccaatttacatggtcataagcttttcctatatcaaacttgcatagtaatcttctcaaattatctttaagtctagaatcaatggcctcattagctatcaaaattgcatcgaaaatttgtctcccccacaaaagcattctgaaaatccaagaccaaagtgtccaccacctttttgagtctattagctagaactttggccaacaatttgtacaaacccccaaccaagcaaataggcctaaaaacctttaactcttcaacctccccttcttaggcaccaagactacacaagtagcatttagacttctctcaaagcatcctgtctcatagaaatcaccaaagaagcccatgacctcacttttaacaacatcccaacagtcttggtaaaaggccaaagtaaaaccatctagacctggggctttatcaccacacaaactagacaaggctgaaaaaacctcatcttcagaaaaaggaagctcgaaggctgctgaatttgtagacgacataaaattaaacactagtccctctatactcgacctccactcccccatcttagaaaacatcaattgaaaagctcttgccatcccctctttaatattgttctcccctactagtaaatcaccatttatccttaacttttctagaaaattcctcgttctatgagtgttagccattttgtgaaagaatatagtatttttatccttttcctttagccacaactctcttgatttctgcctccaggaaatctcctccaacattgcccatattttaaactcatctaccagcctccttttaacctctaattcttctgcagtgagggctttatctctttccattgcatccgattgtcctaactgcactagagccttaagttttttggtagacacattccaataaacctctttgttccacactttaagatcctgcttcaaacttttgacttaaccgctaaaatatggccatgagacccctggaccctatatccctcccactaattccttatgaggtctttgaaccctttcacctttaaccacatattttcaaaactgaatggaacctttccatttcttatccctccaccttccaacattattggtgtatgatcaaagattggatttgccatgattttctgaaccaatccattgaattggccttcccaatcatcaaagactagaaaataattcagcttaaaggctaaactgttgtttgaatcaccactccacgtatacttgccatcgaataggggaaggtctttaaggtgcaactcatcaataacctctgaaaaacgtctcatggtagccgaaagtctcatacaactcatccttttctctagatatctcaccacattgaaatcccccccaatacaccaaggatccctttagagacctcttatagcactcagctcagcccaaaaatcttcatggaatgaaaatagtttaacatgactctttttgaatacttgtagacatttgttcaatgctcactaggacatgtctagaactttactgtgtatatattttataggatatacagatgacctatataagtcaaacacttaatggatatgttataatgtggattttggcttgaataaagtaaaatactttgtcttaaggatcaaactatagtgaaggaggaatgacataggttattataaaataagaaagataagtaatattggtaatatataaaacataatgctatgaaactctatatgtatgtgtgtgcgtgcacgaattttgataggcaagaacataaaatatatattaaaagcaactaagaaaatggtgcaagaaagtacacatgacatatacatttgtctccaaaataggcaaacaagaggaagagagaagtacaaaaaataaacttgctctccttactctgagctaagccaatttacaaagcctatcatggtcaaagaatgatcatctatgtatagtctagcccattccaaagaagtattcataaaagagagtttaattatttctttgaattgttccaagtcttcaaaggctattttgtttctttccttctacaatgtccaaaacaaacacaacagaactacctttcaaactttttgtctatttctttcccaggaaagctccaagccaactcaacaacgtttctcttgctgtaaagtgcataatctatactataccaaacaaagagagcaatagtacccataagatatttgctttagggcaatgtaggagaaaatgataagttgattcttcctctattttgtacatttaacatttattggacatcatcctttccctccttttaagctgtttgattgtcaaaattcttccctatgttgctttccacgcaaaaattccactctttcataggaaccaagaattccaaactatgtttgtgggaaaaaaggctctctttttcaatagactaaggatttgttggaggatttgacagagaacttgccacatttgggcttcttccaccccattatatcatcctcatctctcttgattgaacttgtttgcagtttctgaagacgagtcgtcactccttcaagctcccagtcatgaaattgtattgaaaagcgggggcttcatcaacaaccttccccaacttgctcccagaccgccttacccttgaatctttggtggtggctatagaaaataatggtgaaaaggtctttttcaaagataagtctccacactatccatctttccaaaagttgactcatgttccattgccaattatgaaatgagatctgctcttgatagattcccacccatttctaattgcctctcacacacccaccttatctcataaccattcctcacactccttgagcaccatcccccttctttgtcgaactaacccccatactttttgtccaagcaaaccgtggacaaatttttgatatgagtgttttttttttttttttttttttttgtagacttggctctatccaaaagaaagtttctttagatccactctaatcttaatctcactttttttaaggacaatgggtaaagacatgacataaattagaagactagacaatatacttctgatcaaggtgatctccctcctttggatagatattgccttttccacatactgagcctactaagatgcttcttccaatttgtgttattgttggtgtaggaatttagattatataattgtcttataaaaaggactatgatcatcacataatataattttatataagactcaaggagggtctataatgggttgtgctttctttatggtgcttcctaagtttatatgcaaaatggtgggcttgtatatgaataacaattaaggatgttgtacttgtatgagttgtaatggttaataagttcaaattcaataattttttgtatgatttataagcttgattttcacaaaatatccaaaatcttactatacattgaaacataagtaatgttgtttcggtaatggggtgtagagttgggaagcttcccacttcttatttggggtttcctttgggtgcctctttcaaattttcaagggtgtgggatatagtggaagagagattaaaaaaattgcctttgtagtcccaaaatatccaaaatcttactatacattgaaatataagtaatgttgtttcggtaatgggatgtagagtagggaagcttcccacttcttatttggggcttccttcaaatcttcaagagtgtgggatgtagtggaagaaagattaaaaaaaaattgtctttatggaaaaggcaatatctctttaagggagggaggctcaccttgatcaaaagcaccttataaagtctttcaatttatttcatgtctctctatcattttgcgaaaggtgtgtgcaagactcaaaaagattcaaagggattttttgtggggaggtgatgtcttagagaaaaaacctcatttggcgaattggagttttgtttgtgatgataagaaggagggaggcttaggaatttgtagtcttgtagccttaaacaaagctttacttgggaagtggagttacagatttgttgaaaaaagggagtcctttggaaacaagtcatcatcgacaaatttgggttagaggaaggagggtggttttcgagaggagtgagaggaggttatggtttgggggtgtggaaaaccatgagaaaagaatgagagtgtattcgctgtaaatcccgcttaattgtagggaatgggagaaaggttaagttttggaaggacttgtggtgtgaggaccaaatgttgagggaagttttcccttatttattcttggtggcgattaataaagatgagtgggtcaaacgcttgggaggagggcagagagttgggtagttggaatcctcacttttcaagatgttttaatgattgagagatggataaggtggaggccttgttccggaaacttcaacctttggtcatgagaagagttgtggaggatgttttgagctggaaagaaagtaggaatgacattttttctattagatccctttaccgctccctcacaagggcttctagtaatcctttgccttggagtattatttggaggtcttgggctctgatgagggtgagtttttttgcttagaaagtgtcttggaacagaattttgaccgttgacctccttgaaaggaggggatggaatatgctaaataggtgctacttgtgtaaagaaaaagaggaagccagtgattatctaattttgttttgtaggaaggctagaatgttatggaatttgatcttctcatttttggtgtgtagtgggttttgcactcctcggttaaaaggaatttgcttggttggcatgacgcttttgtaggcaagagaagggagaaggcatggagtgctgcccttttatgcttactatggactttatggaaggaaagaaatgaaagagtgttcaatgatgttgaacggtccaaccaagctatcaaatattcttttttgtatacttttgtgatttgggttagggtgtatttagaggatcatactttgtctatgtttgattttatagagtggctgtttgtctagtaaagggaaaggttttttgtcctttatgtttagtttcttggtcatttgtttgtatactttgtgtgtattgttttcgccacttctaggcttttctaatacaagctcttatttacctatcattttttttttttaaccatgattgtagaggtgatgaatgggaaggctaggtctagaatgttctgatgaggttttgggtggggaggattgagtgactgaagtaatgtaaagtatggaaaatcagttttgttgaaaatgacatgacaagatatccagactcaaccggaggaagtagggcaaagatagcctttttgagataagctgtggtaaagaaaaagacattcaagagaatgaaatcaaatttatgctgattgagtgggcaagtaaatgggtaacaagcacacccaaagatatgatgaaactagtaattaggtttgcggtgaaacaatttttttaaaggagatttattttgaaggataggtgagggaagtttgtataatggtgtaaacagaaaaggcaaaggcaaactcccagaacttttaaggacaaggaagcataggcaaggttagggaaatttctagaatgtggtggtgctttcatttggcttgtccattttgttgatgtgtatttaagctagaaaattgatggtgaatgctgttggattcaagaaaattgttgaaaggtaaggaagaactttcacccttttcatttttttttctaggtaaaaagagtgattaaaggaagaacattcactcttttcatctatttgaagaatttttttttttgtctcaagttgattttcttgaagtgtttttaattttatgaaagtatttaaggcttttgatttagcttgtagtgggtaaatccaagtatattgagtgaaattgtctatgaagtgaatataatagtggaatccttatgttgaaattgtccatctgttttttcattgtctcactgctttggtaattggcacaattttttcaacattgtcaatcttgactaggttcctcctagaggcataacagagatgttaggaatttcctttgagggatttggaagtctttcaaaagggaaggcaggtggctgttttatatttgatttggtttatttggttggagaggaatgcaaggatttttgaagatagatggggatcagtggatgccatttgggacttgatttcctttttctcttctctatggcctcaatcaccaagcctttttcggatattccattatatctattaatgctagattggaagagtgctttctacttaaatagtttgaagaagaaggtaatgattgatcagttaccccctccaataggtttggtaaagttaaactttcatgaatgttcaatgggtaaccctaaacaaacatgtaatgaaggtgtgattagcgattattctggtacagtattgagagctttctctaagcatgctgaaatgaggttagccatcaaggtggagttgttggcattattggagggcttgatgcaagctatagttttatctctatccaatctaattttagagggagattttgctgctgtaatatcttgggtgaataataagaaaaggggtttagggaagtttgacaactagatgtgcaaaatcatagatattgcaaatgagttgggttgttctttctcttgaagttctcattcagctaaccaagttgcaaattagtttgccaaacaagaagcaaagcatatgacctcctttgttggatatttccttccttgtcaagtgtccaatgttttttctcctatatatatatgtgtccgtgtgtgtgtgggtctttattaagaggggctggcttttgtggttcaatttcttggttactttctaccttcttttgtacatctttaaagaattgcttattcttcttgtacttatcaattgattgatgaatatgttggtttctaattaaaaaaatatatatatatctagttgttactaagagtctataaataagtcttcttaaataaaataaagcatcaggaaggttccctagaagtaaccactattttttttattaatttatcagaataggccatgaaaggctcctggccatgagacatgcaaaagaatccgccaaaggttttgtattttgccaaacaacaagaaagccaacacaagaggactcctagatcatgtgtgaaggattacaaaagatctgaccaattatgggagagaaaaagtgattttaagaaagttttcaattttttcttttcattttggaatctaggttgcaggcagcatgtttgatcatcttagtttttacttttaggagactacttgtgtgacatattggagaagcggcgaacccttacaatgcaattgtgatggcttatgattttctcacaccaaagaaagaggattgtcaaagaagcattcatctctaaccttcttgcctcaggtatgagctctttgccaaccaggattagaggtgattttgaagcttggttcaaaggaagcactagtattcagtacacaggcatggcataaaaaaagagccttagatgaaagtaccttggttagacccaaactgcacctatctttcctcacaccaaagagatgggtatttagaaggagaaagaagacgaaatcatataaagtagaagattcttaatattttctttcattaaatttcatatattatgatacggtcataggattgatttttgagaataggatttcttaacttctagtatttttgggtttttaagagaagtgagtgtggcagatttttggaatcatagatttaaaaggagcctttttagacagggagttggcagcagagaaatcctctttgcagattttaaactctttccatgtctctagtgactccggggataagctagtttgtaagatcgatggaaggaatcattttccatcagatcatactacttgtctctagcctcaaattagatttccacattgcccactaaggtgatttggaattctagagtgccttccaaggtttagttctttggtatcagtaggaacttggaggaaaattctgactttggagaaactcatgaagaggacagattttggttaacaggtgcctttgcaatgaagactttgaatttgcagctcccatcctcattcatggcagatagacttttgggttgtggtctatggtattctcattattcagtgtgtcttaggtgcttcctcgtttgcttatagatgtcctttgctggcatagtacttttgttggagccaagtgcaaggttatttggatgctgattccactatacatttattgaattgtttggactgagtatatcaggaaaacattgaaggagtggaggaatcttgcatggagttgaaaaaagtgtttcttcatagtttatatttgtggttaagaggggaaatgagctctccttttttgtcctttatggaatttgtagataatatgggaattggccagtgtaggagtggtgtagtatgattttttatgcactgcttatgtactttctttgtacatgggttgcaacgcttttttgtcagatgcctttttgaaatgttttgcttattttcctatataaaccaccatcaccaaccactcacccacccccaacacacacacaaaaaccaacaaactaagagaattttctcttgattacaccgtctgtttgatttactattgtaggttgatggtaatcatgtggtatcatttataagttatctcttactgaatttgttcttagtactttatttatattgagagggtgtcatttcatctttttcccaaaacataaaacaaatgttaagatgtgccatgttattaaaatgagcagataatttggtggagaatctcttaggggattttgag

SEQ ID NO: 12226 - DNA, 2751 bp, Vitis vinifera
  Intron number 1 from transcript GSVIVT01022690001 (locus G SVIVG01022690001) derived from phytozome v7.0 (chr-ID chr2 ; pos 15084516 to 15087266 reverse strand)
aaaaaataaaaaagccaagcaccaaaaatttacaagtcacctatgtatctcagcataaaaaacactacaataaataagaactatttccattatgggatagatttacaaaaaatattaatagcacccaaaattgattttgtaaactgaaggttaacagaaaacgagaatccctctcctcatacgaataaggattaaacaaaatataggattaagcaaatctaaggcgagatttagagaacctactaacctcaaatatccaactacagtttgcacagagggcaacgcctctggggatcaacaagggaacaatagacaaaaaactaaaatcaagagagagattagggcaatgttggagaacctactaacctcaaatatccaactatggtcggcacggagggcaacactagtgggggttgacgagggaataatagatgacgaacttaaattgggagagagattacgacaatgtatttgggctaaaatcaaatggttgggagagatgaaattgagagaaaagaaaagaggcacaaagatgaaatagaagtgaggaaggaaatcaggagggagaaaggaaaacaaccactgtctaagactaaaatgttgaagagtgagcaaaattagggcaagatatcctatctgaatttttttattttttttatttcatagtcaacaaaggctatttctagaaatattaaaaattcatatcattcttctcaattttgacacttagtcttgggcttaaatggttcacttatgtggatcaaagcttaatttttggacccaactaggcccaaaacacaatttttccaattatgaaagatgttaaagatatttacaaagatttcatatctatgtttgcaatcctcaaaattaatctaaacctctcataaaccccaaattgaaaataaatttcataatttttttccaacaaggagagatgatgcaaaattcctcaatttttatatttgttcacttcttgccattcacacttcaaaaataatttatgaaatttataaagttatgtatatttttctttatatattaatataataactatttacaaagatcataatgaatctaaataaattaagttctaagtggacatgcatttaaataagcttgactttattggcataagtaggaaaatgttcaacacggagttacgtatgtaagtgtgacatgattgaattcaatgtttgaattttattcaaatgtgtaaaatttaaatgattacataccttttttcgattttgctcattccattaagatttttcatccataagaaacaacttatattgcaaaaaataaaagtaaaaagttgttgtcttgtattagaatattaagaaatttagggtactgagagcactcaccacaaactgttgcttgtgttcaagtaattcaaaaggataaccctcagaggtaggtatcaatgtatcagaccttcaaactaaaccacaacatcaaaagattataaagctaagaatatacgtagctccaggctaaggagctatagatgttggaggtttgttcttcaaaagagcttccaaagagctcaaggggccatttctgtatccaattcgttgatcccactctcaaccaacagtaaaagcatcaacctaatcaggaaaaattaaagctaaccataaaagaatcaaactcacctcagtatatatgagttgaaatttttttcaagagagaatgaaagagagatgcttttgagaagcgagagtgaggaattaggaaagaatcatttactttccaaagagatatacaggcttctccacgaggaggatataagtcaaatgggaatggatttaaacagctccatggtactaaaaattaaaaataacgtgtccaacaatttattgacactgtaaagtggacgtaattatggaaaatggcatatatgtagaagagagtccttttgagggcattaaagtttaagcactctgatcttataatctttataaataacaaagaaatttttacaagcctaattcataagaagaccttttatcgagaaaggaagttatttctgaacagatagcaggtacggatcaactttattgaaaatggtgtggcttcttaaaagagatgaagtaggccagctacgttgaaagtttgaatagacaagaatttgagttgatttgatgagaggtggagcagtttatcgcgacttgaagagaaatatttttctattcgacaccatccttcaatttatatgattttttttctgcttattctaacgaaaatatttcttttgttaggagaaaatgatttgttggatagataatggacaaagtgtttatacggtgtttatgttaataattcagttggaaagtctttcaacaaagtgtacttttaaaactatttttagttaaatcacttattaaacctaaaaaaagtctttcaatgtttctcatatcccactaccactcgaagtttatgtgtttaaaatcaaaataatttaaacaaacattcatatgaggaaaattacttattactaaattcttttttaaaagtaaataagagtatattatattcataaaaaaataacttataaaaattaataaatttattatattttattccttaacttatagggtggtttgtatattgctgattcagtaatgtaccctccaatatttaaaattacatggttacaatttttcaacgggaatgatatatgatctctccatgttacattttttgagagaagataaggctgagaggtttttgaaagaagcagct

SEQ ID NO: 12227 - DNA, 5390 bp, Vitis vinifera
  Intron number 2 from transcript GSVIVT01029901001 (locus G SVIVG01029901001) derived from phytozome v7.0 (chr-ID chr8 ; pos 1209341 to 1214730)
agaagaagttcttttggatttcgattaacaatcttgtaagctcatccctcatcttctctccaattttcttttcttttttttttttctttttttatacatatattctttgttataataattctttattagggttataggacaaatttatatatatatatatatattctttgctttttattaaaaaaaatcccaaacttttcaggattcaaatacattctaattttataaaaagagaaaacttgaaaaaaaaaaaacttttcttgaactattttttattatttttattttaagataaaatatatgatattcgtctacaatcggttgagaaaagaaaaagaaaaaagaaaagaaaagaaaaagggaagaaatttaactcttacaagctctatggaaactgacatgataggagtggaattcttaaaattgtatctttgaaaaaaaaaatatagaaaaaagagctattcaatttttaaggtaataaacaaatattttaatatttatctttaactgtaaaatgtgttaaagtggttaattttcctttttatttatttttgaataattcagtttattcttgagttccatgaagggattcaaattttggggttttatttttattttttcccaactatttttcaaaaaattatatcactttaaaactagttttatggtattttcaaaggattgaatagggtattattcaatgatgttatatttatagattagcttctttaatttttttaaataaatatggaaaataaatattgataattttataaaaagatatattaatgtagatgaatcattctaataatcttaagtgaaaatgggattccttgtcgatatttcatgaccaatgatgagtactatttgtagtagtagttcttatatatatatatatatatatatcgtattaacagtctaaatatgataaaaaaaaggaaaaaaaaaatatttatttgattggcttcttcctatgcctatttattccttctaaccttgaaatggtacatgggaaagaggaacaaaatttataaacaaattcattatttacatatttcactagttctcttttctaatagttagaaagcttttatttatttattattattctcatgattatttttaaatttaatatattaaatttataaggttattttaataaaaaaaaattatattatagaataattatttgtcaaagttgtgaaaaaaaaaatatgatttatatattgactatcaaacaaaaagtataaaaacttttttctttttttctatcatatcatgaaaatagcacaactaattttgtttgcatcacataatgcaaaaataataaggttagttatctattttctctcttcttcccttttttttctttaatttttaattttattttttcaattctaatattttcaaattttaaagaaaaaaattgtaaaaaaagaaaaaccccaagaacctatttagtaggaaaaatagaagtaaaaaactaaaaataaaaatattatatggtacgttgattaattaaaagctctagttgtattcttctatgtttaaatatattattttagtcactggaataacattattatcattatttattaaaaataaaaaatatttcccaaaatattattttcattttattgtgaaaaattaaggaaaataaatatttctttccatttttaatttttttttctactagataaagaataaaaaagtaagccttacacatctttccatgtatatttattccaaatagtttgtccaaaattaagccataattatgatcagggctatgttttggtctttgtttggtaactaagaaagtgaggaaaaaagaaaaaaaaaatgtggagacagtggatgtggacctttaatagatgtggcatatatattttttttttccaagaaaacattgggaatgttaaagccaacagtgctttttcattttcattttattattattattatttacatatatgtcatgccttagtgttgaaacccattgtttagaaattacaatttaaagaaaagtgattatcatatcatcacttatagtttatttgattatgattttaaattgcgtttttagcacttttaatattaaaatttttttttcaagtgttaaaaaagttaaaagtgcttcctaaaattactatcaaacagatatttattttgataaataagtgaaaaagtgatttttcaaatgttacaataaatttttttaaatatacaaattatttttaataatatttttaataataaattatataaaaaattgttttcacaagaattacctctcaaatattagtttaagatttagaagttgcttgatagattgcatataaaatgtaagaattcttatatatataatatggatttatcttatattcttaaaaaatatttttaaattttttaaaatttgagaacttcaagcttttagaattatttttaaaaaatattatcttttcaagataagtctctagagttctcacattttatattagagttattattattttttgttttttttaaaaaaaggaaataaagtggatcaaaatgatgtttaataacttaatttaaaatattaaatatgtttggtacaataagctatatgttaagttcggagtattaagtcaaaataattaccaacatctttttgagagtttcttttatatttatggttcaatattcatgattcatttttataataaatatattataattattttatgtgtttataaattgattatttaagattaataagggtaaatattctctaaataaatctttaaaatttaaaagtaatttattaaatacttatattttttttattattttcttttttaggaaaaacactttgtaatgaaaagatcagcatcattcccaaattggatggaaacattttttaccttggaatcaaaattaatttggcttccccaacaaggttgttggcttatcaaaatcccttatatatatatatatatatatatattggttcttttgggagttggtttctttgtggtccaatgaaattggtcattttcttggctatttaataaaattaaagaaattgtgtgatagttcaatattagggtatatttgaaaatagttttctaaaaagaaaagagtttttcaactaaggaaagatatttactaaactaaaaaaaaaagttttaaaaaaatttgttctaaagtactatttttttacaacaaatttgagatgtcttaagatatttttagagtattttgaaggataactaaaattagaacaaatttgagatgttgtcaggcatttttaaagtattttgagtgacaatttaaaatatgaaaaaaaaaattaatatgtttttagaacaaatttgagatgtttaaagacatttttttaagtattttgagtgataagaaaaaatatgaaaaaaaaaggtttttaaaaatgtgttctaaaaaaaatattattttttagaacaaatttgtgatattttaagatatttttagaatattatgagtaacatgaaaaatattttaagaatttttacattacaagaataaacctagaaaattgtttgttatatgaattttcaaataaaattatattcctaaaaagaattgaaatttgtttttaagcaaaagttattttttgagaacaattttaaaaaatattgtcaattaaagccttatattttttagatcaaattttgcttgtttcttctaatataacatcaagtgaataacaaagtcaatatttatgagttgaaaaaagagtcacatttgttttatatcttaaatctgaattcgtaaaatagaaatcaatataaaaacatcatttaaaattttaaagttttttttttatttggagaaaatatattaaaataatacttaacttaaaaaataaatcgtactaaaaaaaaaaaaaagaatcttgagctttttttagaaagatactttgattgcgttttttttcttttgttataaaaggaaaaaaaaaatgaaataacttattgtataagtcaaaatagagcttacacaataagtaatttttcttattaattccatattaaaatatttttttgagtcagaagttctttaaataaaatataaaattattgatacaaaactcttattgaacttgaaaaaaactttttggtttttcaaaataaatccaaatagaatgttaatcgtgaactataaatttgtgttccgcttgggagtgattctatagctctcaaaatcatcttttctatcataattttaattagtttatttgataatgataaagagcataatatctatatcgaattcaaattttttacatttaaatttttaaagaaattggtagttcaatataatattagaacttagtttaacaggaggccttcaatattgcatttcttttatatatttattagatataaatccaaattctatttaaatttatttgtttaatatgtgcaattagagggttgtatatatatatatatatatattatcatgagactgctttttaaagcaaaaacactttattatttatcaaggctttcccaacacggtttgtcaacttttctttgtagtccaatattggatgtgactatagctttatgtatagtattttcaaaagaaattgaccattttctttcccatttaacccatatattgtataataaaattaaagaaattgtgttgtgagaaatagtttttaaaacattttatgaaaaaaaaaaaaaaaaggaaatcctaatttagaaaataagtttacaaatatttttttttaaaaaaggaattggatctaaaatatgttttttagatcaaatttgagatattttcatttagaatgtttttaaataataactaaaaatatgaaaaatattttaggagttttacattacataaatgacaatagtttcgtaaagaataagacaattttttttaatcatatttaaattcccaaataaaattttatttataaaaacagttcatatatgatcatcttttttcgttctaaaaaggaaaaaaagtaaaataaaaaataaaaaaaataattcacatagatttatttcgtgcattttttttaaaactatatatatgtatatattaacggagaaaacgatgatatcaggatgtaaaaccctagtcctgcaaaatgacagccgaacacatggtggacatggatttttcctggaaaacaaacatatttgtaaggaaaagaaaaagaaagtaatacttgtcctagactcttcacatcacagtcagtttctgtcccaactttaatattcaacaggacaaaaatattgacttttaatcacccttttcaatcattatctttatttatttttctatttatattgtattatccatctctagggtttcttgtgatccaaacacccacagagagaaag

SEQ ID NO: 12228 - DNA, 3720 bp, Vitis vinifera
  Intron number 1 from transcript GSVIVT01022123001 (locus G SVIVG01022123001) derived from phytozome v7.0 (chr-ID chr7 ; pos 16762741 to 16766460)
aaacttatttaaatatttactacatctcattaaatgtttgaaaatattcaataaataaaacatgaaataaaaaaatatggaaaaataaaaataaacgtacactgtttatccaaccacaacttaaagcgctttaagttggagaaatctgaagagaaactgtgtgagacttgaagaaatgcactgaaaagagagaaacggaataacaggagaaaatgaaaaaaatgagaaagtggaagaaataataaaaaggaggtgaatggagggaaataaaattagaatgggagggaaaaaggagttgatgtagctgaggggtatttttgtccagatcggaccattttagaggctattaaaagtggagggttagttttacaatattgagggatttttgtcccttctgatcagttttcccaaaaatttatactttttgattagaaagacaattataagtaaatatttcctattttatgttttttaatggaaaaaaaaattttatcttaaaattaaagttataatttggatgagttagtcggattgatgactaacctaaggttaactcaaattaaaaaacaatcaactcaattcaacttctaacccaaaacattcaacccaaatccaacttaaccccatttttctaagttaaggttgaatcgaggttattcaagttagacttttgatcaagttgtataattcaaaattcatctataatattttttttaaaatatttttctatctatttatatataaatttaaatagtaaataagacaaaattttaaaataacaataaatagacaaacataaatgtatatatttttatttaaaaataaaaaatatatgatataatatgatttgatattttttcttaaaaatatacaagaaaattaatattcttatataggacaatatatatcataaatattataaaaatattcaattgagtttgggttgagcttagattatttgaattttagcccaagctaaacccaaattgagtgcgggttgaaaaaacctaatccaatttcaaatcgagtattgaaaatgattgtccaaatcccgaattgagttggatcaacctgtccaacttgcacccttactagcttacaataaagaaaaattacaagattgagatagctttgaaaaatcgtacaagacgagaaggtgtatgataaatccgtaagacaccttgtggaaacgtggaaatatagctttgaaaatttttttgctttgacgaaaagaggtgtcggtctctctttttctttctctttctgttttgtctctgtttttttctggttttgttttgaccatgaatttagtgtgctgcaatgaagaaatacattaaaaagtggcatgtgtacctctggacctccggtcaaagttgatttttaattcagcaatattcaatgaaataaaatatcaaagtgtaaattaatatttttatcatttaattcttgtagatttgccatttatcaaggaagcaattagtcatattccttaaaaataaattggtataggattcggacagcgagggtgtttagtttttttaactttttgttgaaagtaatttatttttaaattttaaatcattttttttatataatttattataaattttcatgaaataaaaaattaaaatatttgactttttttaaataaaaaaatataatatattgatttttctccactttttaatacttaataaaaataaaatattaaaaaaataaataaactaatatttaacattattaaacactatttaattttaaattctatttaaaattaaataataaataaataaacacggttatatatcaatttttaaattaaaaaaaaaacaaatatttttaagcttccaaaaaataaagctactatgaatgatggatttgtttagcaacatttttcaaaataattttaaattttctttttgagaatgactttttaaagtaatttttggttattttaagagaaaaattgtttgaaaagttgaatatggaaaagagttttcttgatttattttcttcataagtgtattataatgatttatatgatgaaaaagtttctaaatattctccaaatttttaatttttttcttaaaatattcagaaaaaaaaatcatcatatttctctttaaaaaaaaaaaccacctattttaaaacaaattctcaaaaaattattttcaataaaaatttagcatactgttttataagtaaaaaattattttttttacaaattctcaataatagaaaactatttctaacaacaattcctaacatatcctaagtttgactaattttttttttaaaaaaataaataaaaattaatacaagagtgtcaaactttaaaaaaaaaattgaataaaaatatacatatacatataaataattatgaaagttaaattcaaaaacaaaaaactttatataaaaataaaaaattgggttagtcgttattattgggcagcaacgagataacgtcaggtggccatggatattaggtgcaacatccttatcattcatatttttattacggcaaggcagttaggtataccatatacccaaagaattcaaacatgttaaatttaaatcaagattatcattaaaaaaaaaggatcaaattgctatgtctttaaacattataataacaatgttaattatattatacccgtgctacacatgaaaaaacagatcaatcgtggctctcatcatcaccgaccgctgccctgctccaggacatatgagtccatgacggtggacctaccttaaaggacaagacaaatatgacatgtgattggaaggacagcttcctatagaagcccatgtaggggaattgcggacaatggtgccttacagattggcgctggccccatttgtcaccactcaagaaatgggccagtctaccgaaactgcaaaaacaagtagagattcatttctttacccaaaaggacgagaaaaaagggaaaaggaaaaaagagttagtttctaaccgatcaatcaaaccttagtttctgatcttgaccggggtggttaggggggaacccaattgtcaaaacccttctttatttattccctgggagtatgggacatttccaagtcttttatttaataactaattaattaattaaaggttttacttttgtttgtggggcatcttgtatttttcaatggataaatgatgaagcagaagcatgtgggttggagatttttggcacagaaagatacattaattaagttccatccaagttggaggcaggaatgctttgcgaattcattcatcttgctgacaaactttgaagcagcttctcaccaagcaagccaattgtgaatttgctacattttacccaaatttctgaagaccaccctgatgaaaatacatttcaaaagtaaaaataataataaataaaaaagttcaaagcgcgcaaaatcaaagaaagagctcttagagggctttttctgactgagaagccaagtcaaaaagatagagtcacagttacaaatagtgcatgattagagtatggcaagtggatctgccttaagatgtggatatacgcgtgaaatctatttaataaatcaaagataagataatcacgaagccgccaacgtttcgttacaattttattttattttattttagttttttaagtgaatgtagccaggcccatgttttataaatatggcttccaaaggttgggttgagccgttgaggcaagaaacaaattctctcattatccc

SEQ ID NO: 12229 - DNA, 7197 bp, Vitis vinifera
  Intron number 2 from transcript GSVIVT01034678001 (locus G SVIVG01034678001) derived from phytozome v7.0 (chr-ID chr1 3; pos 7531292 to 7538488 reverse strand)
tccacactgaaagctgggccattgacttgtcctgggtatgaccccttttttactcatctttctaaaccatagacggggcaatgataattatcttgtgtgtaatttcttaagctctgacacaatcttcaaatccactggcgtttaaagcttaaattcatggaagaaggaagcgacgacggatgttatttgattacagcatgactcaacaatgctgtaatattctaaagattctgggttggccatggtttttgtttgttggtttatttttcagttaccatgtcttctcacccccttgatatgagtgctttgtagctttcttgttgtccttgctccacatttcacttaaaaatcaagcaaatcactgccttgcttagtgtatcggtcttgctctttgcatttgactgaacattctaaaatgactttcttttatcatgattttttctttaggtgataattagtcaaaggaattgtggctgaaggagagattctcattgttggactaagggtgaatggcgtatggttgatgaaggatgttcttaagaagtggcgagttacttccacttcttaccaactgatctggggtaaattgaagaactagtattgatgatttgtccttcaagcttgaaggagcccttttctgaggagcaagttcatgctgtgttgttcaggttggaaaggagaaggataaagtccttgggccaaatggttttctttggtgttttgacaacattactgggactttgttgagggaagggcataattggggctattgaagaagttctaagaattcaaaaccacttttcttaccactttcttagaatgcttttgtaaggggtacgtaaattctggatgtggctctaatcgaaaattatatcattgacttgaggttgaagagttccaaaggtgatgttattagtaagacactgaaaaaaattgtgctcatgttaattgaagtgctaggtaaggtggtcttagggtataaatggattgatttgatttggttttgcatctcaacaaggaggttctatgtgatgttgagttgtataccttctgattttttccaaagctcaatgggctttaggtcgaccccctttttccattcctactgctctcggtgaggaaggctgttcatttgaggaaggcaaggggggtagttttatattgtgttttttgggtggggattgaagagggagatgagacccttcccttttgtgagccttgtctgaaacaaatgacttaaatgagttggatccttttctagttttgaggcttttttagatctaaaagttcaaatggagaaaagtgattaatttctaggggagaggtccctaatgtgtagtagctagtgtctttgctaggctgagcggttggaaagttgcctgccatgtgcttaggtttacttttggaagccccatttaagtctttagtggtttagtttgggatatgatagaagaggaaatttatagaaggtattccttgtggaaatgttgttacctctcaaagggtgggaggctcattctgctcagaagtaccatttccagcttacctagttactttatgtttctctcagtcatccctaggttctgagtttgagactgcagaaaatccatctagattttctttagggaggtggagcctttgagaagaaaccttacctcgtaatatggttgtccatttgtatggatgaaaagaaaagggctatagcccgtagagccatatctttcccaaacaaagttttgtttggaaaatggagttagagatttactttggaaagagactttctttggaggttggttattgtaagaaaataaaaaaagagccaagaggttggtgtttttgtgaagggaggtgtatggtgtgggtttgtggaaagcaatacgaagatggtggaggatgtttcacactagaaccagattacaggtgagcaatcagattaagttgggtgagggatgtttcaggttaaaaccaaattagaggtgagcaatggtaatagtgtagactggatgtttttgagagatttttcccctccttttattctagcagtttcaaaggatgatgcttgggaggtttcaggtgattaggggccttggaatcctagtttctcataacaattccatgattgggaattgtgtagtgttggaggtttacttaggaggcttcaggaaaagggaggactcagagaagacaaggattggtttggcagggtgctaagactgggaaattctctattaaatctctctattctgctttggaggttggagttagagatgttttctcctaagggaagtttgtgttcttgggcccatccgaggtgtgcttctttgcatgggattggcataggattttggctttatataattgcaagactggaggatgatcttttccaaaaactattgttgcttgtgtaagaaagcagctaaaggtatcaccatccattatgggcaaggggactgtggcacctgttgtactttctatttggtctcccctgggtgctcccttatgtagcgagagaagcgcttctggactgtcatgacagtttttggggaataggaggaaagtttggatgattgctcctttgtgcttgtttttgactgtatgccaggaatataatctttgatttttgatggagtggagtgattgcatcaatctctcaaagattccttcattggttcctcttccattggtcttgtcggtaactacaggattgtcctttgaccttgttatacttcattgattggttagactgtagatagcggagtgtggttgtttttgcttcctttttgccacttggcgacctttgtatcacccccttgtacttggagcataccccctttttctattaggcactaataataatattaaacactgaatttttttccaaaaaagacgacgttggttctgtaggtcaaatttctgttggcatccctaaacttgttgtggaggagattcagcctgcttatccataccagatgatcgagagttttaacccaattatgtctaaacccattttgcctaataaggtctccaaccttgttacagttaaccagggtgtgattgcaggctccctttcgggtgagttccaaatagaaggcctgtcccctgtgaaaatggctaaagtgcatgaggtcttaagttttctggatattaaggtatattccaggaggaagagcagatgctccacaggtatgtgagacctgttggaactggattggaggattagggtctgtgaggtttttccataaagttaattagttggaataccagaggtttgggtttaaggaaaaagtgaacggtggttaaatattttctgaggtcagaaaatccggatgttgtgatgattcaggaaacaaaaaaggtagagtgtgatagaaggtttgtgggtagtgtttggacagtcataaataaggaatgggcaactctttcggcgtgcggggcttcgggtgggattttgattatttgggactccaaaaaactgcgcagtgaggaggtggtaataggatccttttcggtctcagtcaagtttgctttggatggatgcagatcgttatggttgtccgcagtttatggcccaaacaacccagaacttaggaaggatttttgggtggagctttcagacatttttggactttctttctcgtgttggtgcgtgggagcgattttaatgtcataaggagaagttcagaaaaattgggaggttctagtttaaccccaagcatgagggactttgatgattttataagagaatgtgaattgctaaatccaccgttacggagcgcaccattcacttggtcaaacatgcaagagtctcccgtgtgcaagagattggattgatttctttactcaaatgagtgggaacaattatttcctcaaagccttcaagaagctcttcctagatggacatcggatcattggctgatagtcttggaaaccaatcctttcaagtggggcccaacaccttttaggtttgagaatatgtggttgcaacatcctaattttaaggagaggtttagaagttggtggagatattttcaaggaaatgggtgggaaggtcacaagttcatgaggaaattacaatttgttaaggacaaattgaaagagtggaataaggcttcttttggagagctaaacgaaaggaaaaaacgcatctggttcgaattagctaactttgattccattgagcaagaagggggtctcacctctgaacttttaattcagagagctttaagaaaaggggagttagaggaattgattttgagggaagaaattcattggagacaaaaagttggggtgaaatgggttaaggaaggggattgtaactcaaagttttttcataaagtggctaatggtaggcgaaataggaaatatatcaaggtgttggagaatgaaagaggcctagtgttgaataattcagagagcatcaaagaggagatcttgtattttgaaaagctttactcgagcccttttagagagtcttggagagttgaaggcttagattggtcctctatatctggagagagtgcgtttaggttggactccccttttactgaagaagagatttttaaggttatttttcagttggatagggataaggcaccagggcctgatggctttaccattgcagtgtttcaagattgttaggatgtgatcaaggaggatctagtgagagtgtttgcagagtttcacagaagcgagattatcaatcaaagcactaatgcctccttcatagttctggtacccaaaaaaagcatgtcaaagaaaatctcagactttagacctattagcttgatcactagtctttacaagataatagccaaagtgctatcagggcgtctaagaagggtactaaatgaaactatccattctactcaagacgcttttgttcaagggagacaaatttttgatgcagttctcatagccaatgagatagtggatgagaaaagacgatcagggggggaaggagttgtcttcaaaattgattttgaaaaggcttacaaccatgtgagttgggattttttggatcatgtgttggagaagaaggggtttagtcctagacggaggaaatggataagaggttgtttgtccacaatattttttgcagtcctagtgaatggaaatgctaaagggtgggtcaaggcatctagagtttaagacaaggagaccctttatcccattttttgttcactttagtcacagatgtactgagcaggatgttattgagcagaagaaagaaatgccttggagggtttcagggtgggtaggaacagaacaagggtgtcccatttgcaatttgtagatgataccattttcttttctagcactcgagaggaggatctatagacccttaagagtgtattgctagtgtttgggctgaaggttaaccttgacaaaagcaatatttatggcattaatcttgaacagaatcatctttctaggttggccgagctgctagattgcaaggcttttggttggcctatactctacttgggttttcctctgggagggaatcccaaggcttgtggcttttgggatccagtgtttgagaggatctcgagaagattagatgggtggcaaaaggtgtatttatcttttggaggcaagataactctcattcaatcttgcctcacccatatgtcttgctacttcctctccttgtttaagattcccgccttagtggcagcaaaaattgagagattgcaaagagattttttatggtcaggggttggggaaggcaaaagagatcatcttgttagctgggatatagtgtataatccgaaggcaaaagggggagtgggatttgggaagatttctataaggaatttagctctcttagggaaatggttgtggaggtatcctaggaagggttcaactctgtggcatcaggttattttaagcatttatggatcacactctaatgtttgggatgccaacactatagtcagatggtcacattgttgtccttggaaggctattgcacaagtctcccaggagttttccaagtttactcggtttgtggtaggagatggagaaagaattcggttctaggaagacttgtggtggggggaccaacctttgggagtccaacatccaagactatttagagtagtcacggataagaatattcttatttcttcaattcttggctctactcgtcccttctcttggaactttaactttcaccgtaacctttccgattctgagataggagatttagagggcctcatgtggtctcttgatcgtctgcatttatcaccttcggtttcagatatgagatcctggtctttatcttctttaggactttttacagttaaatatttctttcttgccttatcccaattttctggttttcctccagttttcccttctaagttcgtttggaattctcaagtccctttcaaagtcaagtcctttgtttggttagtggcacacaagaaggtaaatactaatgacttgctacagttgagaagaccctacaaagcccttagtcctgatatttgtaagctgtgcatgaagtatggagaatcaatagatcatctttttctacattgttctttgacgatggggttgtggcacagattatttcagttagccaagacggattgggtccccccgaggagcatctccgacatgctgtccaccaattttaacggttttggtttttctaagagagggattgttttatggcaagctgcgtgcatcgctttaatttgagttgtgtggcgggaaagaaatgcaaggattttttaggataaagcaaggaattcagagaatctttggggttctattcatttccttgcttctctttgggctttttgttccaaggtttttaaggggactccccttaacgtgttacaacttgattggttagtggtgtgtaattccattgggttggtctaacctaaagagtttgcttgtttttactttgtatttgcttccttgtagttttgtttttctttggtgggagaattcctcatccttttcttgtacttctttttatcaatatatccctttgtcgtttcctataaaaaaataatattcctatttgtctattcaaaaaataaataagcaaataattaaataaataaaaacacttttctgttgctgatatttttgactgctcatgaattaattcatgtttttcatttcatttcttgattttttataggatataattgctcgttttggtgaacaagaggccat

SEQ ID NO: 12230 - DNA, 9255 bp, Vitis vinifera
  Intron number 1 from transcript GSVIVT01036407001 (locus G SVIVG01036407001) derived from phytozome v7.0 (chr-ID chr1 8_random; pos 4711271 to 4720525)
ggaagcactttgtcaagtttattttttatccacgtatagaaggatcctctatcatgtgtaattatatctttttttttttttttttttgatgatttcaaaacaaagttttaaaacataaaataaaataaactatgtagaataaatgagatgaaacaaatatgacaaattttcaaatttttcttatttgacattttttttttctaggaatgggatgatatgtttgaataattaaacagggtagagatatagttgactcatcttagacccacccaattacatatctatcaaggagtaacataataataataataataataataataataataataataataataatagataatgataatatgttggtgaaattaataataataaaaatactaataggataataatattaatatcaatattataaaattaataatattcatactattagtatagatgataatagtaataattttggtattttttttgtataatcaatgagtcaaatgtcattcactttaattatataaaaagttaaaagtggatttttaccttatatagaaagttgaaggctttttttaattaattctcttttttcttaagactttggcatgaaaaataaaaagtatgaatgattgaaggggccttttatctttataacttcatccttttttttccctttcaatgtaagtccacccaccatgtacttttttcctctccattttgcatgattctcccaaaatgatataggacactctccaccatccaccctccttcatggattccatagccccaaaacatcattttttgtttatgaacacaccattcataaacaaatgcttaatcctaaatccatcatacaagtttgggaaaagtagacccacaagccaatagcccaataaagcgtttcttttttacttttacgtgtaatgcatggaggcttcatattttcttctattactcaacatgctttcctcctcctgcttcaattacatctgcagcatcacattgtggtttagttgttactattgttcattttcttgttcatatctcacaactgtattctcaaatttagttttatcattcaattgtggtggatgtaaatgagtttttggaattatataaatgaattggggaacttagtctttcttgtaggataattgcctactggttcatatctctctattgcttggtttgaagaagagaaaaagccaaaaaaaaattaatttcattcaaagaacttaagattcaaatagattttcaaatatcagagtctataaaatattgctttttgtataaaattggcaagttcaattagtctcatatgacattgcaagacaataatgtggggaaaagcaaacccacaaagccgaccaataggtcaacaaagcacttcttttctacttgaattgtaacacatcacacatgacttcatcattttcttctatcgttcaatgcgctttccacctcgcgacaagcagattcaggattttcttagttgcctaaaatatttgaagttttgttgtgagacatctgcagcatcagattgtgcttaattattattattgctcattttcttattcaaatctcacaattatattctcaaatttgtaattaattaagcaaatttagctttattattcaattgtggtggttcatatatacctttgtttttgggattatataaatgaatttttgaatttttcctttcctataggataatttagaattcaaactttccaataaccaaatatagactaatgaggttttagatgacttcttttttatatgatatttattgagatatggagtcttaaggggttaggttaatctaatgtttaatatatatatataaataaaaatatcgatgctcagattttatataaatatcaatgaaagtattaatattgctaaaatttttataacaatgaaaaaaacaagggaaaatgataaaaaataatcccttaaaaattttatatgaaacgttgaaaaatacatatattaaattagtattttttttaaatatatgtatattaaaattgttgcgattgattggtaatctaatgtgcaatatactattaatgttctatatatacaaaatcttgtaaaatatatggtcattgtgcacaagggatgaagtctagctgttggataaatcatggatgaagtttggccgttgaatgttcagaagatgaaatctagccgttggattaaaaagggatgatgtcattgtcacatggaaagtaaaagcaaggcaactaagtggaggcaatggttttatttcgaccttcaacgtgctttcctcctcttcaccgcatgctgatggggccttttctttacttgttgcagaagcaacttattcccctcgtatgctgcaagttttgtagtcatcatcgccaaacacttgtcacagttgttagttattagtattggtcattctcttgtgttcagatttctcacggtagcattcttcaattatagctctttttccatttctgctttgaaattaagaacatttagctttatcattcacttattgttagctgtacaaagctacaactaacattttgcttcataatttcttttgttttgttcatggagtttttggaattatataaatcaattatgagcctacatattaatattaattgtatatgtgtgctatctgttattagcatattaaaaatatcatttaaattaattaatttattagacttataaggcatctttaaatggaacgtattgctattctcctcacatcccttcgttgagtgaaatttaagtaactccattattacactccaatagatataggtatgctttcttattaattttcttgatgattcattcttccttattatttagattttccaaattctttattcaattacgacataaaagaaatattattgagtagcctacttcccttcgaatgatgaatccccttaaacttaaattaaaaattaaagaagtaccttaccattcataagggatttacttgtctatgtatcgtttcattcgatctttttaggtcctgacttcatctccatggttatgccacgatgcccttaaagcctatatgcgatggatagactcctataaccatgacatatttgtttacttgaacatatttagcatgagattcttggacagtgaataaatgttttatcatttatcaattttctaataattagtgtgcgataaagttcttgggtgtgttttctctaaagctgaggaaaacatcatgcttgcgctgagaagaagaaaaagttgcagcacacattatggagaagtaaagagatgaagagatttgagttaccactccaaattacctgtagagaaaagtgcttctattgattaatataattctgaaaaggagaacaagaagcaaaagattgaacctgcggatctaagaattacagatgttggtgagaaatccaagccatgcctcacttccactaaatgagagatttgagtggacttgctgaagacttgtactacaacataaagtaaataaaggggtccatttcttctgcaaattggtcctggaagcgtgttagaggataaatgaaagaaaatgtgatagaagaagcaagacaagacactgtaaagataatcatgtgatgtgtgaaaaggagaaaaataatgagatgcgcagagcacactgcaacgggccgctccaataatgagatgcggccaaagtaatgctcggaatgcaggcattattaggacaacccacttccatcgaaccaaaatatacaattgagtcattttcaagcccatttatatgcacatttgagtgttgtttggattaagtttccttgtttttaaaaaatgttttttattttttaaaaacacaaagtagcagtaactcaactcttatagaaaatacatgaataaataatcttcatatattcttaaaacctaccatgaaactaagacaaaagattctgtttttaaaaattagaaataattatagcactatttgactgttagttctctataaactgttttaaaaaacaaagtgaataaagaccaatttttattttttttattttttattatcacttttaaaaatatacactatgagaaaatgaggagatagtcacacaactttagtcagggttagcaaaactcatgaccaaagggtgtgtacagttgtgtttagaggggttagcaaaaatcatgactcaaggatgtgtacagttgtgtttaagagaggtccgcctctactagtcatgatcgtaccaaattcaagtgggtaaatttcctggggtacggggctgtagtacaaccatagaatggttgtggacatggtatttcatgggcagtggaaataggcccaatatgccaacagtgggccaaacggtagagactgggtctgcatataaacccaattctttgcggccctatctctttcatatccatttttttttttttttttttgcaaatatgctctctgtgaactaatttcagcagccctagattaaaaactccacagatttcgtatccaatttagggcaaaactgcagtttggaggttttgatttagtttaatttttttagttctttctggtttgtttatcatttttattgtatgattaagaaaattaaggctaaatttttgtagtttgtttggtggagaaaaggctcaatatatacttaaatatcatgaagttaattttttttattttcttgacaaccaaatacacataatgctagtagaattagacaaattctcaatttgaagaaattcattagaaaattagtagacaaactaaaaaaatatttgcacaaaaacatgtctttttcttggtggaaccatcactaattttgttgttatctttgcctttttcttcatctttaattgtgaatatatatatatatatatatatatatatatatatatgtcgttattaaattttctttatttttccctataactgtgcatgttagtggatcagttattaaatcaccactttaacacctacacatcaatgcccaataacacaatatttgtgctattgctaagcctaaatttcctttactttttgtttctcatttctcccatacaaaaccttttgtacatggttgttgtgggactataaataccgtcatgtattctcttggccatataaatggaatttgctatggtttgccatctctatgttgagccatattcaaacctgaaattctctttgttctattttttattttctgtcttcctattagagccattgggcatcatcaatataaattaaagccgactcagcatacttgcctccctttccatctatgacaatagtagactcaacttcattggcacttaatattgatctaccttaatccttcattactaacaactctttgcttggcaatatcatgagctttaggtctccaataaaactagattggaacaattttcttttatgaaaatccgtcatcattacgactatgaaagggcatgagttagatggttatctatttgagacacaaacccatcccagaaaagctactacaacaggttggtgagacatgattgaaggagtgcaaacaaagaaagggcttgagatgtgcatgagccgcataaaagtgcatgtgacaggttacctagagatgcaatatcaagttaattgaatgcatggctgattcaaacacatgagtggactaatgcaagcgacaatactaagaggaatttcaaatagaggaggaatggaccaaagacacttgaaatctcaaagttggaatcaaattgggattgcagtttgagttcgagtaggagttcatatgcttattgtaattgcagtcttaccaagactaggattgcttgtccctaatccaaataagaattattggtaccacaaccgatgaataagagtttgggtaggactaggattgttaattcctaatcaaaataagaataggtggtgtcacacttataaaaagaggataggagtgccatctaaagacatcttgtaggcatgagatgagagagagccttcatgagactaagcatgaactcatcaaagagaatgtgggagtcttgttatcttgcattgttatttaaagaagaaataatatacaagttggggattgagccccataaatctcatgtttctttgggttgatcatcttcagttgacatgccaatgccttgatattgttttaaaacaaacttcttgggatttcccttatgtggtgttgcttttgcggtgggagccctagaaatatgtgttgtgaattgaagtcaaatgagctccattcctgtaatgcaaattaatgagggggattattctagtgggctctagtgaaggagaagaaaagcagaagcagatgagagaaaagctcttgtaacagaacctaatcttccagcatccaactgttttttgattgtttttcttcattcctagaaatgggatgactaggcaactaaaggattcacacttgtcagaatatataattattgtaaataatattttactcctgtatgtaatttttcttgtatagggtgataatccctttgatgatgataggattcacactacttatttaaggcgtttatatattaaaataatagttagaaaatatgacttatcatataaattttatttgaacttattcaataaattctttcatgtattaatattatttttttaaaaatcatgattttggtttagtgttttttgagaaggtgtttcaaattcctatttagattatacttttttttgtaaaagaaatattatatagaatatttcataactttatatgtaattgtaattaaatttattagaaaaataatataaatatctttataaatattctaggtcatggaaagaaaaagttatgagagaaacaggataaagatgtgaggaagtgcgagagacatttgatggaataaaatagttcactagggtggagatgtaagaaagagtgaaaaacaaggtagaagacgtgtgaaaggatgaagttgctgttttttagtatgagaatttaatttaatcttttagccaaacggaatttaaagtagtaaatcaatactctctttgatattttgttcaatctttcttatgtgggatcacctagtgaagtaaaaaaaaactcatggttcaaagtagatatataaaggaaccaatagttgtatctatatttttttatcttttgtaatatttgttatcatataatagaatgttttattttgtctatagaggtaggcataaagagaaaaaaaaaaataactttttcattgaaaaattaattattaattgattttgccaataatgaaaagattactaagaaagtccgactccaaattgttcaagaataatatcattgaatttcttaaccctttgtaagtgggaaaccctttgtaagtacacttctttaagggtagatttgagattgactacgtcttcacacatctcttatttcctttatttttattatttttttatggataactagactcattatatgtttattcttcaaatatggtaggaatgagcctctactaatcaaggaaatcgttacagatattttgaataaattgttaagtacatctattagtgatactgaaaatctggttggaatagatgctcgcatgcaagaaatagagatgcgattatgtttggggcctgatgattttctgatggtaggaatttggggcatgggcggaatagggaaaacaacccttgctagagctatttatagaaaaatcacttgtcaatttgaagcatgttgtttttttgaaaatgttggggaggatttggcaaaggagggtttaataggattgcaacaaaagtttcttgctcaactattggaggaaccaaatctaaatatgaaggcacgcacatctataaagggaaggctccactcaaagaaggtccttattgttcttgataatgtgaatgatccaataatattgaaatgcttggttggaaactatgattggtttggtcgaggaagtagaattattataaccactagggataagtgtttgttaatttcacatggagtactcaattattatgaggctcagagatttaattatgacgaagcttttgagttccttacaccctattcattaaaacataaaattccttgtgatgatttcatggaggtttcaaaagaagtaattggttatgctcaaggcctcccattggctctagaagttttaggttcctttttatttagcatgaccaaagaagaatggagaaatcaattagacaaactgaaaagtactcctaatatgaaaatttaagaagtacttaaagtaagttatgatgggctagatgataaggagaagaatatactactagacattgcatgtttctttaaaggagaggataaagattatgtaatggaaatactagatggttgcggctttttctcacttagtggaatacgagctctcattgataagtcactcgtaactatttcttggagtaatgagataatgatgcatgacttaatacaagaaatgggtagggaaattgttcgtcagcaatcccttgaagagcctggtaaacgtagcagattatggtttcatgaagatatcaatggcatattgaaaaaaaatacggtaagagcaaaaaaaatatatgaaatttattttatgtagcacaaattaagataagaaatcaagaattgttttactttaaatatttatatgttgataaactttagtaagattttatgcattatgcatgcttttcacttactctatttcttggcctgtaggcaactgaaaaaattgaaggcatattcctcaacttgtctcatttagaagagatgttatactttaccactcaagcccttgcagggatgaatagacttagattgctcaaagtctataactctaaaaatatttcaagaaacttcaaagatacctccaatatggagaattgcaaagtgaacttttccaaggactttaaattctgttaccatgatttgaggtgcctatatttttatggatactctttgaaatcattgcccaatgacttcaatccaaagaatcttgttgagctcagcatgccttatagtcgcattaaacaactttggaaaggaatcaaggtaagatcatgatctattcatgttattttctttagagtatgcaatgtttacgaaagctaaatttaaagtcaagtttcttttcattgcaggttcttgcaaatttgaaattcatggatctcagtcactctaagtacttaatagaaactccaaattttcggggagtcaccaacctcaaacggttagttttggaagg

SEQ ID NO: 12231 - DNA, 4129 bp, Vitis vinifera
  Intron number 18 from transcript GSVIVT01032335001 (locus GSVIVG01032335001) derived from phytozome v7.0 (chr-ID chr 11; pos 15176070 to 15180198)
agcgtgtcacagaggcaaaaagaatatcccaggtagttcttttttctaacttcttgtttttctattatcttagattagcctcttgacctttttctattcatgaatgattaacttaaagagtgcttgaggcggcacttggcaagtgctgcagtggtttctggaaaagctgtgcttaatgacctctctggcatttcaagtaaattaatggtgatgtacactttataaggctgccagatccatgcactaataatggtttttatgaaacctctataatggtgtgaacatgtggtaatagttagtccattcttgcttctgaatggtaacattatagaggaatataatgatagaaaaaaagtattcacaaaaatatatctacctctaaagccatgatcatctggttggggtgaggcttttttggttgattgtgaaattatttgtttcagatacaacattaaaagtagaaaatggtgttattacaagttctattaatcactatgaaggcaaattagaattgaaagagtgagattatatgaaacccaaatatgggttgacttgtgtatcctattatttgttactggtactaccacttaaaatcagtcatttgcagtgcttttatcaattgcctattgagttgtatgttggacatggtttccattgaagtttgtatttagtattttcaagttattaaaatactgattgaatggtcaaaatatcttactagacctgttctttaagccatctcatctttcctccacccaaaaataatctctcgtagtctcatgaaatataggaagaattgaaagaaatttttcctaaaacttgtgggtcgctctgatactatattcattttgctagtctggtatggattgtaggcctacatcttaatagcttaaacttgtaggaaagttggtagcttaacatagtatcggagttctgtttaagtgtctcaagttagagtctcttctactgtttattccctcatctacctatggcacatggatacatgtatggtggccacacatgagtatacattgtggattcatattgtagcaacttaggtttttaagaaagttggtgccttaacacacttcaatgttagtttgtgccacaaattgtgagggagggtgttagcttgttatacagtgtgggcccatgcctagcaacttaagcttttacaaaagttggttgcttaacacacattaatgctgtttagtttgtgcaacaagtcagtgcttgggatttcatggattgtcctcctgaaaattttggtattgcatttatcagctgggaaaatacagggagaggtcctacagttgtatgctatttgatgatgatatgggtttaatggatgaaactaaatttgggtaaaatgtcacctactttataggttcctcctaaaggttattttctcattaactagtctccttagtcatgtagctcttatttacttgctttcaagtgacctcccctgtatggctgtttgtaggtctatgacttcttgtaaaagtaagtgaagcagaatatttacctttcgataggcaattaattgaagaagtttgaaaaaggatattgcagcactttggtttttcctttttatcagattctgtgtactttcttctggtgagattgtacaattctctagattatgtgtgaaaataatatctctttctttttttcttccatccttcatattcctttgattatcttttatcttgttcctaatcttcatttttaatctgcactccatctaatcattaacttgatgccctcctaatttatataagacgtccctattcattatattttgtatatgaccccaaacctacttataccctcttctttgaagtaaagcagcttcattcctaatttgaaggggctgccctacatcaattcctctgtcctatgaaccagacatattcagctaaagggttctctaaggaatcaacttgaagattgggaactgtaccttaacttgatctggtgttgctaaaaagtgagacaaataagcacattcttgcttttccttccttgaaacttgttcctctgctaaacaattctgtggcctgcaactttaaggttcctcaacaggatcccatcttttgcttgcaattgtttcatttcctccaaacctagaggtttttctttatactcaattatttcttaagtggggtcctaatggtgccaccatccagcttgaaaccaaatctttctccacacaaaatcccatgaaattttcctctcatttctaggtaccaactttggtacaaagactgagtatatggagcaggcgggaagattgacaagagagattctcttaagagtctgatttttaaagtgttttgagagataacccaaaattcaagatgattcagaactcgctacaaccaattctggaattgaagtgacattgagtggtgcagctaggtggaggtctaagatgttgaaaaatgagggatttatcacttgcaaatctgatgcaacctgaatactagatatctccctgccctttatcttcaactttttaatgatgcaaatgggtttggtttagtggggctttctcagtttaggaaacttttaccccttgaattcacttcattatataagttgtaccatgtttctaaaagattctttctatgaggaagagtgaggagcctaaaatgtccagggaaattgggcaagcagagggtctctcaagtggaaatgccttggaagaatattcttaaagaaaccagaactttccacttctttcattgtaacctatgggctgatttataaggtctcctttctttgcagccagtggcctttttaccaaagaaaaaaaaaacatggtgtttccctgcagagcactggccctagccacctctcaattcagctatgttagatttccagtgtctggtttccttgcttggctgcttctaactatatccatcaaaccacaattctcgaatcagcctatattttaggcttccctagctatactcctgattcaaggagatgctaaccatttgggtgttgcataaccatgaatcttcaaggaaagtgtaggagattaggtgtattcttggctcaacggagacatcttcaggctaccaccctcttgaagaggtgtgaagagttcagcatcaaaagtataatttatgcggtgagtaggtggcatgatcctcctggggtggatgttgtagggacttcttggagagtagaggtgatcattgatacccttttgattgggtgagatggtgtcaagtgaaggtggggaagtgatgcccctaactcggcatgatggggagtgacatcccgttgtagtgtgttgagagtgaattctcattcattcactttactactagagagctttttcatcagatgcataatgataggggttatgagttgacttcttccatcctcaaattagcagaagaatctcttagcatatgccatgggtaagcattgaggagctccaacttttatctgagtgtggggcatctgtatgaagatgccatgatgtcttagtgctgaagaagatagagagaccatggttgtggggtaatgaaataactaataatttgatctttgggaagacatttatacgtttttagtcttgcatgccaaaatggacagctggcaacatgttggttcatttgttgttggtactcaggcatcattaaaccttaacctaatatgccaaaaattaagaacacaagtaagattaatatgtatttgcatcaaacacgcacaaaggatttctcctctaaaaagattggaaagagggaaagtgtacaactcttgattcctgctagaatcacaaccctgtgtaggagttttggcagttaagagtgttacctgtgacttatgttgtgataggccataagaaagccatagatgcatatatttttattttcgttcttctatctgatcagtggttaaccctttacaaacctatagtgaatatattctcccgaggaagaacaatatcattgtttgtttgtggtggtacaattgttattatcgattattgttattgccctgaactacaaaataagctttttttatgttttcatttcgtctgttaattcaactcaattgattggactttgtagaaagtaaaagagacaggaggcaagaagaagagaag

SEQ ID NO: 12232 - DNA, 1418 bp, Vitis vinifera
  Intron number 2 from transcript GSVIVT01028916001 (locus G SVIVG01028916001) derived from phytozome v7.0 (chr-ID chr1 6; pos 17583670 to 17585087)
tgcagatctcatcaattctgttgtgctccaggcaagtttatattgtgcttgttctttaatatttttcttgattttgtaagagcttggataatgcttctgaattgatattcttcctgcatattcatcctttgttacactctttttactgaaatactttcgacatttctgacagctttttggttcttgttttttgttatgcttttgtttgttgatgatgctgatatttgtaggctaggagcttgtccagaagaatgatcatgtttgcttgatttgaatatcatcattgtaggaagcactggttaacatgtctaaattttagcatttggttaattttgagttggaaggcaaacaattacaagctcctatattttagtgcaaggcttacaccatattgctacgggtaaaaaaaatttacatttctaggggaacacatttttgaattattgctcctgaattttgtttcttcaatcccaattcacttgaaatgttacgtgaaagacaactgggtcaaaagcactctatgcttattcacatgacagtttatgttaacaatctccaagagaaaaaaaaggtagaaagaatttgtccatatgtgtgctctcaaaagggatagagtctactcatagcacggatatggtaatgcttctgattacttgataggttctatagaaatggctttcagatggttggaattagttatattcaaaagaagaagaagaatgagaccatttaaaacacgtttaacacattcacattagatatattgacttaaacaagacgctgaaggggacatcaatggcatatgtacactggagagaaactagtgattttactatcagagtaagctgtaagcctgcatcagaagtctgttatcctcatagatgatttgagtaggcatccatgttatttgctgactgcttagttatgttaatgagattagaacaagagtaagcctatgctcggaagatgattcatggattctttggacttcataggttttaaagtaagcgacactcacttggacatataaaacatagattactttaataagtttaagaacataatcaaggcaattgttataattggtgctttgaagatacataaaagcaaccatttgagtttcattgtttccttcacccattaggagggtgaaatttaataagaagttttccagaaggatgaaggaagtggagagctgcacttttggtttttttctgagcacaaaatgggcacttagcagacataagttggttgtgcacttttgagtggacaagggatcagatacataaaaatatgaccttgtctgccattaagttttatgatgtatgtccaggatgtatttgtttccctaaaagcttttacattcataatcagaatgttggtattagttctaataatagttttcacattgaaacagg

SEQ ID NO: 12233 - DNA, 3168 bp, Vitis vinifera
  Intron number 2 from transcript GSVIVT01020031001 (locus G SVIVG01020031001) derived from phytozome v7.0 (chr-ID chr1 ; pos 11317449 to 11320616 reverse strand)
ttatctggctttgtggccctattacaggccttgtggtaggtgataatgaccagtttcttcaactgttgtgaactgcccagaattactacatttttattttacaatttcctaataacttatatcatcaatgccttgactgggagtatcttttgttctctaacctgccagcatgcttatcacattattgtatgccttggtacagagtacctcttttattttctgacctgtcatcatgcttatcacattatgttggaattattttgggatgtttgcatctttcatcatttgttaatttaactggataatttttatgaccatgggaccttttgagaaacaggatatttaggaaagatggtatacaatattttagctgatcccaaattgagtatccaaatcatttgtgtttgtgccattttaattcacatcagatgttaatcatagaatgttttttatttgaaacctttgctgctttcatcatggatttttgttgcgtgaacaataattattgtttgttattgttgtcattgaattttttttttctccttttggctctagcagggatcattgttgtatgtttatcattaattttgactggcttgctcctttttttctttataaacagaagaaacttcattttggtgccttttgaattaatataactttattctcacttgtattcatatttttacagttataatttgtaatacttatgtaatgtgtgtaaatgtgtagtaattcagaaaaaggctttgaaggtcaatagttgctgaaaattctggacagtaggtaatttagaattttgggctgagctagaaatagaagactaaggaagttgtgttctgggttaaaagaactaaagcaacagtatatggttatgtttgaaaaatgcttgcagcaatacaaaaaattgaagagaagaacaacaataggacaaaatcgtacaagggcaagaagtaggagaaagaactcaaatgctctctagtcttgttttagtacatgggggcctcatttggtgatcaaaccttttagaaattaaactagtgaatgtaaaagcgaatatgaatcgaattcttagaatagttttttcaatgtgcagtgaattggttcacatccttcttaagtaaactcaaaatataaattcaacggagtaactcctcaaaataggaagcttaactaaatagaaacattctggaaataagaaaacttccctgcaagatacagacccataaccaaactactattaacctggggtgcccaatggtcgtgtactccttaaagttatcaaagttcccctgtcaggctaaaattcaatggggcttataagaataattcaaccacataatatagacaccctttggatgaaaagaacttattaatttgtgatgagtcaatccctattccaaggattccagagaaggtatcccgaagtgactgctagcgggtcatgcttaataacttgcttacatccacacacactcttggaagcatctaacttattaaccaaagaatctagatgtttcttgcttctttattcaatttatttaatttgatctcaaatctgtataattgagtattctctctctctctctctctccaaaatttccttgcacccttgtattgcagtatgttaaatgagtagccatgagttcaaagttcctttacacctttatattgcactatgttaaatgtgaagctgagagaagcttgtttcatcactctttctttttattcttattcttgttatttttttattcactgtagtagttaattttatttaaaatttataaagttatttttatttaatccttgaggatgattttttattcctaatatttaaaaattatcttttattttgaaatttaaaaattaaatttttattttttaaggggcaaaatctctatttttcattttattttattaaaatctctaatattatttatctatatttgtatatataattactttgaactatagacaataataactatcaaactcttactaactacttatattttatttagggtaacatatgactccattaaaactttaatttgttctaacaatggtacgaccctcatattatgataccataaataattttttaagtgatctcatcattttcaattgattttatacttattgatttgaaaaacctcaaattttgtcagaaaaattatttaaatctttgaaatttttaaggacttttcatgaaaaaaaaattttaattttcttttcacatttgttatcatttttttcattctttatcatttttatttttatttttattttttttttgtaaatctaatattgtttttggtaaattgatgatgtatatatatatatatatagatacaccatttgtaaaattacttagtttgtttaatgataaggaagatataattaactacctttaaacttaccgatgacttattataatgcatataggtgggtttgcaccccctagtcaaagtttctggcttcgtcactgttcataatatatgtatatatatatatatatatatatatatattctttcctatatgtgtgtgctgttctctctttctctctccctctctctctctctctcttaaattcatcttaccatcatattgcagtatgttaaataagaatccatgagcagactgttcatcaaaaagtattttctgttgacagatagtgtagttgacttggtgtgttcaagtatgtcacaaaccttctcttaggcagttaagagcttttcaggcaccaatcagtgccttgtttacttatttataaaatgaaaatgatttactaatgggtattgtatttcacttgaagagagaaattggattgttaacttactcataatatgtatccttgacaaacattgagcctaatctctctcacccacacacatgtacacaagcagtgagtgagaagtagcctgcccaaagtacatctagcgtaccttactccatgctatctctttgtctttgcctttctaagggaatggagtttgttttttgtttttggttttggtttttcctcctagagatgctatgatgtaatttgattttaaatctgaagtgcaagtaacaaaaatttgttattactatatatacacttcatttgaatttaaattttcctgaaaattgctcggacttttcaggttcagccttgtgttgggat

SEQ ID NO: 12234 - DNA, 6778 bp, Vitis vinifera
  Intron number 1 from transcript GSVIVT01022092001 (locus G SVIVG01022092001) derived from phytozome v7.0 (chr-ID chr7 ; pos 16514209 to 16520986)
attttttcgattctcaattttcttgtttcctaatagttataaactgaattaaaccctttatgtataattgtttaatatttgatcattctgtttatatttaattttattataatgattcattattttatattataattaaattaattttaaatatatttttatcatcaaatttgaattaattttaaaaacaaattatacataaaaattcaataaattaatgagtctggattcaaaacaaaaacaaatttacaactagactaaatattaaaaaaaaagactattaaacttaggaaaaaccaatttataaaaactaaattaaaccggttttaaaaggtttggtttgatttaatttttaatcaatttggatgatatttaagtcaaaaatcaatcaaatcgtatttatttattttctttacccttactttacgttcattgtgctctttatttctactttatatgttcgaatttttttagtccacttcatactcatatgggcctgtcaattacagctatttaccagtaaacaatacatcaccatctattattatttaatatatttgaagaatttttaaaatcataatatcaattcgaagagtaacattcctcctcatgccttatcagaccatcctatcttaatttattctaacaatcaattgaatagaactgtaatacagacgagccaacccacccaaccaatgatttaattggtgtaaaattttacttttattaagttattatttatgtgaattaggtgatgtttgtttttttggttgattaaaaaaattaaatattatttgattttttcttatttaattaaaaataatataattatttatttcaatcaatataattaaattaaacttattaataataaatttattttaattgatattaaaatattattttttatctaaatataaaaattaaatattttaacattttttattcaattaaaaaacaaatactatcttttggtattaattgaatttatgaaaagcagtcaaaacctaatatttatattattattttaattatattatatattatttcatataaaatatgagaaatataaaaataatttttaaatattaaaatcaacatttctaacattaccataataaattttaatttatctatgtaataaaatattattagataatatatttgatatttgttaatattatttattaattaatagcatcttcttgattgataaaaaatcataaatttaaaataatcaaactaaatcttcatcatcattaaacaatttagttgaaatagtcattaaatgaaaattaaataattgtcagaaataaatatgtatattaattttagtttttatatactaattttattatttgaaagaagaatatttgaagatccctatatacatgtaatattgaaaaaatgattaaattataaaaacatatttgattataaaaagaatgaaatctaaattatgtatgtaacattgtttattactcccattttttggtatgtacttattctatatcatggtgggattgttatttttatttggatcttaaccgtgttaaatattagtgtagaccccttttgtggggggccgggagagagtttttttttctcttctttgcatttcttttttgaaataaggggggccccttttctcccggaaatcggctgcatgggcatggcgggggccatgctggtggttgagaagctatgctggctgatggaggaatagtagggttggtgatggcttgctgaggaagacataaacaggggtgttgggagatatttgaggagcaagaagaaagccggaggggcagaggtttttctggaagaaaaggcttaaagaaggagaggaggatcatcgtggtggggggtagcagagaacttttataaaaaaaaaaaactgaggttaggagttgtctggagcttgagaggactttggaggaaggtgagcatctcgggaggaaaacttggagataggctggtcttgctggaaaaggattttctcaggtacgaatgctacgggtttattatttgttattgattgtttatcacttttccatgtcccttgttgatatttgaacgttcattaacttgtttggggtggataatgaaggccactggaaaaggatgttctcagagggctcactgatgactcatgaagtgaagcctctgagaatcacctttacttgttttcttttatgttctattttctatggattcttctttgtagtggccactatttgtttctaagccttgctcaatgcaatggctgtgaaaaggcatatccaagtctggctgcacactcccacaaagatctatcagggtcaaaagggacgtattgggttttgagagatgttttgtagaggttgttttggctgaagaagtaaaccagccgaagacatccagagatgagacttgcttgagccgagaaggattctggagaacaagctttgcccgggaaataagaagaacctgagacataaagaattgtgggcagcttgagaagaagatcatctggagaatgtccggatgcatggagctctgagatgcttgacactcctttttggggatttggatgacatagtagtgccaaaactagcgcctgttttgttcccatgctcacatacaattgtttcgtctcctcagatttatgatgaacctttgctcacaaaagcatttttaatagtttatgcttgcacttccttgttgggtgtgatggctggtgtatatgagacagaaaccagtaattttgatgatgctaatgcttagaacatggatggatcggttcttaccatcttagggcccccggcgcagtctgaagatcctgatgattggagcattagaatggaggttttaaagtgtttgaataagtttgaccagattttctcaagcctcacggaaatagagtttaaggttgttgtgggacctttgtggcagacatttgtatcatctttaagagtgtatgaaccgctatcagttggaggtgcagatgatcctcatgagggaagatatgactttgatggtgcagaagaaaaaaaaaaaagccttgaatcctttataatccaattatttgcgttgctgttgaccattgtgggtggcagaagattggcaaaggttgttgcaaatagatttagtgagtcacacgggaaaaggagttcattcacttgcatctaaggccccacgtggattagcttgatgggaaaatgggtttgtggcctttttttttttattattattatttgtttgtttgcttttcttaagtacacgcctgtttgccaggccattcctatttttatcattttcttagtttttccaacttttgatgccaaagattcattttcaaaattttatttttaatttaattatttaaagaaaaactcccattatatatatatatagttttcaaaattttgacctcccaaattttaattattttatttatttatttatttatttttaaaattccatccttaaaataatttttcgggtttccatttttcgaaatttaatttttcgacgttccatccttaaaataatttttcaggtttccacttttcgaaatttaattttccggcattccatccttaaaataattttttaggttttcacttttcgaaatttaattttttagcgttccatcgttaaaataatttttcgggtttccacttttcgaaatttaatttttcggcattccatccttaaagtaatttttcgggttttcacttttcgaaatttaatttttcggcatttcattcttaaaataattttttgagtttccatttttcaaaatttaatttttctgcattccatctttaaagtagttttccgggtttccactttttgaaatttaattttccgacattccatccttaataatttttcgggtttctaatttttgaaatttaatttttcggcgttccatccttaaaataatttttcgggtttccacttttcgaaatttaattttccggcattcgatccttaaagtaatttttcgggtttccacttttcgaaatttaattttccgacattccatccttaataatttttcgggtttttgatttttgaaatttaattttccagcattccatccttaaaataatttttcgggtttccactttttgaaatttaattttctgacattccatccttaataatttttcgggtttctgatttttgaaatttaattttccggcgttccatccttaaaataatttccacttttcgaaatttaattttccgacattccatccttaataatttttcgggtttccaatttttgaaatttaattttccgacattccgtccttaaaataacttttcgggtttccactttttgaaatttaattttccgacgttccatccttaaaataatttttcgggtttccagttttcgaaatttaatttttcgacattccatctctaaataattctttaattttccaattctcaagttcacttcccaattttcacaattatttacctaatcattattactattattccattcgtttatctattcacttattcttttatttaaaatctcatttctaaataactcttcaaactttcaatctcaaagattccactattcacgttcattcgtttaaatattattccattaatttattttacaaattccaataattaaagttcaaattttcaaaattccattttccaaatttaattttcattctcagaaattccactattcacattcagttgtttaatattaatttcatcattattattattccattcatttatttattcactcattcgtttattaaaattccgtctttagaataattattcaaaatttcgattcccaaatttagtttttcgaaattctaattcctttcaaatttaatttctaaaattctcattcttgtatttaatttctatttcgggtttccattttttgaaatttaattttccgacgttccatccttaaaataattttccgggtttccagttttcgaaatttaattttccgacatttcatctctaaataattcttcaattttccaatttcgaagttcacttcccaattttcacaattatttacctaatcattattactattattccattcgtttatctattcacttattcttttatttaaaattccatttctaaataactcttcaaactttcaatctcaaagatttcactattcacgttcattcgtttaaatattatttcattcatttattttacaaattccaataattaaagttcaatttttcaaaattccgttttccaaatttaattttcaatctcagaaattctactattcacattcagttgtttaatgattaatttcatcattattattattccattcatttatttattcactcattcgtttattaaaatttcgtttttaaataattctttaaaatcccgattcccaaatttagtttttcgaaattccaattccttttaaatttaatttctaaaattctcattcttgtatttaatttctaaaattccaattttcaaataatctctaagattccaattttcaaataaatttcaaaaatccagctttctctcgaacagtttttaattcctatttggtgacgcgtgtgatatgttttatgctctttattatacactgactccatttttatgatagcgcattgctcgttcgtggtccaggtatgcatcctttcccatttcggtcattctttatgcatattttgattcccatgtgtgcatggtcgatttgagtatccattgattttcccattgattaccacatcagcttcattttattagtagagacccgactttaaggacttagaggagtgttacgatttttaccgtaccttcctgataagtaacatgaccctcgagcctgatctggtttttcacataccacattttccaaaataaggagtcacacttagggttttatttcttattttgtttatccttttaaaaataaaaaataaaaataagtggcaactccaagtcattattttaataaataaaatcattttcaaataaaaatcgaactcaccattgagtggaagacatatgagttgaaatgcgaggttcacaattagatttatttagttaaatatataattattttttccctcaaaaatgttttttttttctttttttatgaaataaatacaaagagcaaataagtggatgtatttaacatgtgttttctaaataccggtaattaaatatctttggccttataaaaaataattactatattattttaataaatatttgaaaactagtaatttaagagaaaataaaaatttattacaatttttaaatattccaaaatatcaaattttgttatagtaataaaaggtttaaaaattagtaagattaatattattatccttattcaaaacttgaaaagaaaaaaaaagacaccaaacatgcaagaattcagtcaaacaaaatcataaacgacaatttcattcctcaaaaactcttaaaaatataaaaaataaaaaataaaaatggaatgggggcgaagatctggaaatatataagtgatgagtgcttggaagccagtgatgagtgcttggaggctgtggcagagaagatacatggcagaaataagcttcatttccgcagccatcgtcgccctgacgaatccgagctagtcaactcagaggattgagttgaatccatgggagctccggttacttctacttgatcccatccagaagggtcttcttctctttcgcatgcctacacccccataagagcacagcatcatagaccacttgaaaacctccctctc

SEQ ID NO: 12235 - DNA, 2627 bp, Vitis vinifera
  Intron number 5 from transcript GSVIVT01014451001 (locus G SVIVG01014451001) derived from phytozome v7.0 (chr-ID chr1 9; pos 3887201 to 3889827 reverse strand)
aagattgacaggtaacactttcttttcaattttagcttagacttcataacatgaatatgaatggtctggtgtcacttataggatgatgcaccttatatagcaagcactgattcttgcgactctttaacttttttgcttaagcactctttgttggaagtctcatcttttcccttttttttttttttttttttttttttttttgtcttttttgtgtttttctcgcttcatgtatttcttagttaaatgagttaaatagctaacttgtatgcaatttaacttagatttgaaaatatcttctaccatatcttgatcacatttatacatgatatataaatatttgggatactaaaggaaaatgtggtttcaaaatatgtgcattgaaagaaaatgactatgaaccttttctgatttgtaaaataggccagaaaaagaaaaatgtgcatattaaggaaaaatattacattgaagctatttatgtagatagctttcgtagagacttcttgtatagtagaggacaacaattgggtatttttgtaattgtagggaagacttctcatccttcttatgttttcattctagttggtcagggcgaacactggggagtgtggttccaataagtggcacatggtcttgagtttgaatcttgccactaatgataccctaaatatacccggtgttggttgttgcgggacggtcaacaccctgaggtttgtgttcccacggagagtcctaagggcttggccatggaaggtttcttagttatcaaaatatatatatatatatatatatacatctcttgtttttgataaaaaaaaaaggctatttatgtagataacaaagaatgaccttgtcaccctagagaatgcgtccatcatactagtctttgtctagacttctgtatgtgacatagtcttgaaggcttattgtttattctagcctaagaaatagttgtgatataatcaccctatgaccatagttgtgaaaggcgcacttaggtccaggcggtgcgatgcgaccctcaggcgctttgcctgaaggcaggtgacgccctttcacgaaggcgccacttaggtgtgcaaggtgtgacgcggtccacaggtgcaccttgatcccctatctcttttttcttcttttggtcttcttctccgacgacgagttgcagagggcagaagagaagccctttttttttttgagaccaaaacaacgtcgtttggtccctgttcttttaaaagaggagaaaaaatagaggaaaaatagacgtacctttttgggaccttcttgattaaattgaaattttggatgatatttgatgatttatgtgtttaggacaaataaatgattgttaaatttgattatattatataaaaatatatatgtaaattaaggtacgactcacttcactaaagcctgcgccttaggtacgcctttcaccttaggctttaagagtattttgcatcttggtgtgtcttgagccttttaaaactatgcctataacataacgttagagcaatgagggtttgtagctttcagtttgcaatgccttgattggatgagaattagctataaaagttggaccttgatagacttgaaggtttgataggtcaaggttacctgttaaacaacaatgatgaattcttaagaagagaatctaaggctttgtttaggaagcatttttgaaaataattttgaaaaataatttttgagaactgtttttgaaaattgttttttgatattttgtaaaacaaaagtttgaatttgaaatgtttttaacttgttttctatattttaaaaataacttttatctatagtgctttattttaatcattttccatatttgtataattattttttaaaacaagtgaaaataattgaaaataattaaacgttgttctttgaaaacaccatattttatgttttttggttactaaacatgttttcttgtttttgtattatggagaatggaaaactattttcaaaagtattgccaaacatgacctaaatttagtgaatctcctgacaagaggggaggattggtcactgtccttcaacccgaaaaacctcattttgttcttctgaattcattgaagaaataagtcactatggagatactttaatgaaaaatgtgatacaaaatattaccttctatgcttgaagaatcaagattattccaatgcttgctactttgatttaagttatgattgcatgattggttgtttcctaatagttttttgtatattctaagatcttatccttatttgcctattcattgttgataaggaaattgttgaaatgtttcatgtatatttgtacttgtgagtactataacaatgggttagaaaatgcttaaattacaagtgtaactcacatgggtttgggtataactgtatgtgattttacatccaagataggacatatattgttttactcaagttctttggaaaataaatattaaacctatatctagtggaggttgcttttatttttcctctttcttgaactcgtttacaattttcttggtctagctatatttgaaatgggaatcccttgtcatttagttgaatttctaagtttcaatttttggatactaatgccattcattttgttatagttggtatattaccttgaga

SEQ ID NO: 12236 - DNA, 2201 bp, Vitis vinifera
  Intron number 2 from transcript GSVIVT01030911001 (locus G SVIVG01030911001) derived from phytozome v7.0 (chr-ID chr1 4; pos 18873951 to 18876151 reverse strand)
gattcttaatcatcagtcttctccgattcgatcaggtatctcatttgtgtttagggttgctacgatctaaggggttttttttttcttttgtatttttcgttcgtttaattatcgatcatattttttgatcgtagatcttgctttttttttttttttgttcatattcaaatatgttgttgttgtgaaatgttaattgccttttaaaaaaaaattatttttcctctccaatgaggattttgtttctgaaaatcgttttttatttttatttttgtttatatctgaatcttttcctggaaaatattaagattctcctagaaagagattatgcggttctttgaacagcttccgctgatattggaatttgataaggaaagattcagattctcggagaaagaaattatttggttttttgaacagcttccattattatcggaattgattcttttttatttaagcattttaatttactgagccagtttaaaattcgtggtaaagaaaaaaatagtttgatttctaatcttccttgttctcgattttatgtttacttaggcgttttgtagccaaaactaattaagattcttctatttttgtgcattgtggggttacatttggtatcttaaggttgattattctatatgacactgcataatttattattgttgctgaacctattggttgctttcttattgttgcttgtgttgggaagaagattctttgccaagttttattcttgtttgccgattgcccaatggcatgtatgatttggagattcacatgcagttatttatgtctctctacctgtccaaatgatatttagttgctgtagtactcaggttgtaaatattgattcaaatgaatgttgaattttccactatagatgactccttttgtgtgttttttaatgtttcctttaacattattatatataccataggtggtgatccatacaacatgtatacatccacaataaaaatttattaaaatataagagattaaatgggagttttgatgggagtttctgatagatgttgagtttcaacatgggatgtgagagttgtacatgccattaatttcaatgagacttctatggaaatgtcttttttatttaattttatcaaggctaaaaagttaacctgatcccttttttatttatttaatttaacttttttggactctaaatccacatcacaagtttttttaaatactttccaaattgcacagagtttgtatctctaaattaacttattgtctcggatttgttcacgtttgttctttttgagtgttatttagtactgctatggtaacaaattcatctgagttggagatgaaagttttcatattattccttgtatttacaaatatgaaattgaagatgaattctgtggtttgttgtgttgaatgacttgctttaagatctgtatgagcaggttgtgaatgttctaagggggctagacactgaactggcccctgtcttgaacaaggctagggccaattcctggccttaaagtaagaatgtagcccattacagcaggccatgcctattattgttttttttggggggggttctgaatattttaatatttcatatcatataaaattaataaatgagttttctcattaattaatgttatagaatctcaatttgtggcaagaaacactgatatttggtaatttctttttataagatgtaaaacataacttgtaattgtaaattataaactgtgaagttcaatatatctttcaaagttcaatgaattacttactattaaatctatatagctatataagctatgtacgttaatacccctatatgtaatgataattcatttagatatatgcttacaaggtttaatatttttaaatttgtgtgaatttatgagcattcagagccagacttcagccaagagctgggcttggaattgggttgttggttgttgagtgatttgtaaaaggcagagttgggtatactttctttactataaagttagttgtagtattgtaataaactctgaatgaggttgtggggaattaatggaatatttttcttttcttttatcttcataatagtcatttcattattcatttggagggttatcatttgctaacaatttggactatttttcctgggtttgtatgacctaactctgaatatttttgttgattcaggtagctttgcgggttcatctgctatttgcagattt

SEQ ID NO: 12237 - DNA, 4011 bp, Vitis vinifera
  Intron number 23 from transcript GSVIVT01026355001 (locus GSVIVG01026355001) derived from phytozome v7.0 (chr-ID chr 4; pos 14823536 to 14827546)
ctcttgtttcatattcaagtcgacttgcttcgcaggttaggcaatctctctctctctctctctctctctccctccctcctctcactgtgtctgtgtatgtgtgtgtgcatgtgtgtgtggggggcaccatataaaactgcaatatttactgtgtctgtctatccctgtgtgtgttggtggaaagcaccataaagaaccccaataccatgtctctctggatgtgtgtctgggcaaagcaccatactgcattgcaatgtttagtttcaatggaaaaggtaagttaatagagcaccatacaaaactaaaacatttagcctctccagaaacagtgaattaattgagaacaaatgtcggatactgcaaccaaattacttcattatgctctctatatatcaaatatggtcaaagtgctctattatatcatcaatctattaaatcttaatctattggttgcattctttcttatcaaactactgatgataaagcaaaataagaaaatgacaagaaaacttgatgtgatcttattcagtgaaggaaattgcattctggtggaagttggatcatggagaggagattttattctgttgcttagaaaatttttgagttatgaaggaggatagatcatgggtacttcaattattttgaatcattacaacaagggatgtgtactttcttactaagaggcaatcttaagggaaggcttgctattttggactattgtaacaggcaccctatgggttgaggctaattccgctactgttgtttcctagttgtccaagaaagaaacaggtccatgaaagtatgataggtgaatccatcaaataattgatgttgcaagtgacttaagaagttctttttcttgggctccttttgttgctaaccaaaagtggatcatttagccaagaaggggctaaatacttggtatcctttgtttgggactttttaccagcttaagatgtagtgcattcttggattttgctctcctttggtttcttttataagatgtgcagtttgttattcttacattcagaggtataggcatacctctctctctctctctctctctctctctctctctctctctttctcttttctaatcagctttttgaaaattttgaagggatttctcatctttcattgttttgtttctgacaaaaaaataaaaatacattcaagtgtttgaaaggtgaaaattgtgtgcactggcaagtatgaaggggttttattttataggaacccttttttggttttaatcccaaaaaaaatgggggctgaggatttgagggatttcagacccataagcttagtgggaagcctatacaagtggttggctaaggttttagccaatagacttaaaagagcggttggaaaggtggtttctaaggctcaaggggcttttgtggaggggagacaaattctaaacgtggtgctaatagccaatgaagccatcgactcgattctaaagaacaatgaaaatgggatcttgtgcaaacttgacatagagaaggcatatgacaatgtggattggtcctttcttcttacagtaatgcagaaaatgggttttggggagagatggttagggtggatcaagtggtgcatatccactgcaagtttctctgtgttgattaatggagcgcctaagggttttttccaaagctcaaggggtttaaggcaaggtgatcctctctcgccttatctctttgtgattgccatggaggtcttcagctcgttccttaaaagggctgtggacaatggttatatttcgggctgtgtggtgaagggaaggaatgaaggtgggattcagatttcacacttgttgtttgccgatgacactttggtgttttgccaagcctcccaagatcaactgacttacctaagttggttgctaatgtggtttgaggccgtttcggggatgagaattaacttggacaagagtgaactcattccagtagggagggtagtggatattgatgatcttgccttggactttggatgtaaagtgggtagtctcccgtccacttatttgggtcttcctttgggtgctccgtttaagtcagtggcagtgtgggatggagtggaagagcggttccgcaaaagattgactatgtggaagagacaatacttatccaagggaggaagagcaaccttgatccgaagtactttgtcaaatcttcccatttactctatgtctgtcctgagattaccaagttgagttagaagaagactagagcaaatccaaagggattttctttggggtggtggcaatttggagcgaaaaccacatttagtaagatggaaggtggtgtgcttaagcaagaagaaagggggtttagggatcaaatgcctttccattctcaataaggtactcctttctaaatggaattggcgttttgcaaacgagagagaggctttgtggaatcaagtgattagagggaagtatggggaagatagagggggttggtgcactcgggaagtgagagaggtgcatggcatggagctttggaaaggaataaggatggactgggatttggtgggtgcgcggacttcttttagtgttggcaatggaaggagggtgaggttttggagggatagatggtgtggggatgcccctctgtgtgagtcgtttccttccctctttgccttatcgattgaaaaggaagcttgggtggcggatgtttgggatcccttggtgcagggggtagggggggttggaacccttgtttttcaagagccctaaatgattgggaggtggaggaggcggaattatttttggggtgtcttcacgggaagagagtccttggagacgtagatgataaggctgtctggactgaaacaaagagcggcattttctcggccaagtctctataccttgctctagaagcggactgccctatttcttttccatctagctgtatttgggaggtgtgggtacaacccaaaatcagcttttttgcgtgggaggccgcatggggtaaggcgctaaccctagatcttgttcagagaagaggatggtcattggcaaatagatgcttcatgtgtattgaaaaggaggagaccatagatcatctgcttcttcactgctcaaaaacaagggtcttatgggagttgtttttttctttgtttggggtgtcttgggtgttgccgtgttcagttagagagactctgcttagttggcagacttcttctgtgggcaagaaacacaggaaagtgtggagagcggctcccctgcatattttttggacggtttgaaaggcgagaaatcgattagctttcaaggatgatgaaatatcaatacagagattggaatattcctttttatgctcgctttggtttgaggcaaagctgtttatagtagaatgccctcaaactttggtgaattttatagattggttgggatcattgtaaggtttttgggccttttggttgttgggtctcttctttgtctttggcctcttttggtggtgggtgtataggtttgtatactttgcataggttgtataccttgagtcgctccttggcgtctctttataaatgaattttctttacttatcaaaaaaaaaaaaaaaaaagtacaaatgattttgcacatcacataaaaagaaagaaaccaagcaagccaatactgagtagtacccaatgatagaaattatggcactttggagatttattaaacatattttatcaatttctcctccaaaatagcctttcaaaagagaaattatgaaaacattgtgttgtcaaaatatatagtccgttataactatacaggggacgaccaaaatgtggaaacatcagtggtatttcacaatttttttcccttgaacatgtcatgaaattcttctctttgatggaaactaaatgagatattttcttgtttcttttttattaaaaaataaaaagggaaatgcatattcagaatggactttaaaaatgcagttatcatcatgcttgatttgtttgtagtttattttatcttcatataatcaatttgtttgtgactcacagatttgg

SEQ ID NO: 12238 - DNA, 12574 bp, Vitis vinifera
  Intron number 9 from transcript GSVIVT01026720001 (locus G SVIVG01026720001) derived from phytozome v7.0 (chr-ID chr1 5; pos 5510661 to 5523234)
tcaaggtatatttatggatatggtcttatggtcttatggtcttatggatatgaaaaatcttaaggtttattggtgcgcacattggctattcagtaatgacaaccgtagaagttctcatcaaatgccgagtgattggctttacctattttagttttgttttaatggatttgattcattgtcactccatcaataggttttaaaatgcatcggcatataaatattaatcagaaaaaaccaattcggttctatggactagaaagcaaaatgatggatgagttattctgcagaatacagagtctgaccaaaagccagaggaggaagcttcaaaccaaagagaacaactggtgcagcggaaggttttgaaatgaattggataacactcaagaacaaacataaagatcacaataggatctgaaaattaggaaatcattctgataaattatattgaactgattctaacaattacaataagccttaaaataatatttgtaatgcaaaaataaaggaaataactgaaataggaaactagaaataggaaatgaagataattagaaactaaaactagcaataggaaactaatgatgaacttaaaatagaacttaaaataaaaactaatgatgaccttaaaatagaaactaataatgatcgtgtgctatatcaatcccttccacttgaagaaaactcatcctcgagttttgtggctgcaaagaaaactcattcggaggaatattcgaagatatcagtaatgttgaaagtactggaaatgttcatataagttggaagatcaatcttgtaagcatcaccaccaatcttccaataatccaccacaaataaaccaccaattttgagatgtgataagtgttccttctcattcttactgtagaggagactaacatcaaaataaaccaccgcaaagaaccttgttcatcaaccgcatgaatgtgcttagcgcactttattgcccaaatggcatcactagtaattcataaaggccatctttagtcttgaaagtcatcttccactcatctcctagtcggatgcaaatctagtgatagccactttgtaaattaagtttggtaaacaccacaacatcttctaacctgttaagcatgtcattaagacatggatgggaaagcgatacttgactgttattttgttgatagtgcggttgtccacacacatgtgccagctaccatctttctttggggtaagtaaagctgggattgcacaaggattcatgctctctcgaatcaagcctttatcaagcaactcgttaagttgttgtcgcaactcttcatgctcagttgggctcatatgataatgtggcaagttaggcaaactagctctaggtactaaatcaatatggtgttgaatattttgcataagaggtaactcattaggtgattcattaggagatatatcaggaaaatcaacaagtacctcttaaacgttggtgggaatatcaatagttgatttagattggcccttaaccatcgatgctataatagaatttggctccttgacttgcttaaagaaatctgggcatgttatgttagtgaatagtggcttaccttagtaaccaaattgttttctaacgattgagattgtgatatcaaaacgatgttcttgtcaaaccaccaaaagacaaaagtattatcttaacccttataagtgacatcaacatcatagtgccatgaccccctcaataaaatatgacagacatccatacccaccacatcacatacgatctcatctttgtaatacttcttgattaacgaagcaacttttcaaacctttagcgcttgaactttcgggccttttttaatccatgcaatcttgtatggagaagggtgcttctcagtcttcaaatttagtgctttcaccaaagccttggaaacaacattcttgctattgccaccgtcaatgatcacgttgcacactttattacaaatagtgcatcgagtttggaatattttatgttgttgagagtcatctggcttctttggggtaagcaatagtcgttggacaatgcacaccacttattctcccacatctccttctgcaaacaacgcaccctcgtagatatcttcttcaagaacttgttcctcttcatcgccaccttcttctgcaaagttaatagatcatctgttcgggcaattatttgaaagatggcctaactggttgcgccggaaacatttcccaagatttggacatgcataagggtcattattgattcgttgttgctattggtttcaacctcgagtattaggtcaattagagctgaagttccacttcgattttgcaccgaattttgagttgaagggacatctttattgctattatcgttgttgcttgaagttgttgatccctttggagtagaaaaagcttcttgggttggttgcttaaaattactctaggtgcgcgccatggacctattgatctaatattccactttcattgccaaatcattgtatctgtcatggtctaaaccccttgaagagccaattgatcttgaataaccagctttaggcctccaacataacgagcaattaatcgatcctctgtctcagacaaattaacacgggcatttaatcgataaaattcctccttgtgttcgttcacagtgcggttggcttgctgacaattttgatattgttggtataagaattgttcataatctggagggagaaatcacctttgtaacaactgtttcatcttgggccaagtacaaacacgttttccttgccgttaacgattatattgaaattgttcccaccaagcagaagctctgcctttcaacttatacaccacaagcttgacttgattttcttctgaaatattcaaatagtcaaaaaaaaattcgacggtatggacccaattgagagaaaatcttcaatatgtaattggccgtctaaactcggtaaatccatcttcatcttaaactcttggttattttgaccctgattgttagctcgataactgaaatggaaatcatcttctcctccagatgaataatccaaccttcgttgctatctttgttgaatatttctctgttgtggaagtcgagaatcatcaccatctcgaaaaggtggaaaaaactcatcttgttcagaaaaaaccttcgcagccactcgtggaaagctaccaccatcctcgaactcgttgtcgtcgtcatgccacctaagagctccctgattttgacgctcatacacccgtaatggaaatggctcgctaaaattgtgattcccggttggacttgtgcgaaaggcatctccattgtcgattttcagcccaatttgtggccggtgtcaatcatcatatccgccttttgccagtcgccacgttggtctggtcgtccctccatttggtttgcgtttcccttcaacagttaatgtagccagcatctgggtgaggttttgaagagtttcatcgatctcgttgagtcgttgcttgattttttcatacctctctttgtcgtcgatggtttgtttaccactagaaccattgtcaaccatcagattgaggtaaaaattcttgccccgataccaattttggtgcaacggaaggtttgttttgaaacgaaacggaaaacacttacgaacaaacataaagatcacaataagatctgaaaattagggaataattctgataaattttattgaactgattctaacaattataataaggctttaaataatgtttttaatggaaaaataaaggtaataattgaaataggaaactagaaataggaaacaaagataattagaaactaggaaaactaggaaagaaataggaaacaaagataattagaaactaaaactggaaataggaaactaatgatgaacttaaaatgaataataatgatgatcatgtgctacatcaataataaggacaatcgtgatgagatggcaaaagcaagaggaggaagcttcaaaccaaagagaataacaaggacaatcgtgatgagatggaaaaagcaagaggaggaagcttcaaaccaaagagaataacaaggacaatcatgatgagatgaaatcgaatgataatagaaaaggtagaacatcctatcataaagatgagagaaacccttaggggggtgtgagatctctcagaaaacctttcaagttaaaacttggcgaccaaaagggagaatggctagggagggagtcttctgggcctagcggaaggaaacattaatgggcccaatatgcttgagaccctgtttaatgcccagcctgttagagcccagatagggacgaaaaatcgtggacttcctgttggtccagtggttattcaagcccacgagattgtagcgctgtcgtcttcaacgtcccagtgcgcaggatcttctgcaaaggtggtcccgttgtttgcaagctcttaaggtccaatcgaagttagggccggcggggacgaggctttctctgaagaggatggtcgggcctttgagagaaaggcccagtctcttcccaaccctagcccaccttcagccgcaatcgtgggctgtaatttaaaaggcccgtcgaggtaggcccaaagaataggaggaacgaagacctctgttaagaagggtttgtttcgaagggaagaagatgctgcagtgagaaagggaaaagctcctgaggttcagacgagaggctctgaacagaaggaagagaaggtcgtttcaaagaagatgtggactatcctttttcctccaagttttgatcgttgacaaggactttagagtcacagcgagtctcttttcctcgggaagacatcgtcagttagcgaagtttgtgtattggaagaggatttcgggacgggatctcagttggaacgaggattcagagcgagtcctctcttttattgtcaatcggcaaggaatcgaaagcggtgttcgggggaagggacctcgtcgtcaagaggcaaagcggttgaacacaatccccatttcgaagaagacaaagaaggttttttgggctgagtggggtccgatcttcgtggtttatcagtcacggattcaccttctagtccaggaatcagaggtaaagggctcaactttgaggggatttgtgaaacgttgggagtggaaaacttggaggtatgcctgtattcaccttttcagccacctgagtattcttctatcccttcttgtggtttggcacttcctttgccgagtcattctggtccagatcttcctagttcagtttctcttccttagtctcctttggaaaatagagtaatttctgaatttttttctaaaaaggacgttgttggcactttttatcaaaaatatgttggcattcctattcgtgatgagggggagaccgaattggctttatcaaaccagatgtctgagagttttaaccctagtaagtctaaccccagcttgcctaaggaggtatccaacctggttacaggtagccagggagataccgtggtctctccattgggcgagttccaaatagatggcctgtcccccaagaaaatggctaaagtgcgtgaggttttaagttcgttggaaattaaggtttattccaagaggaagaacaaatggtccacgggtatttgagacttgttggaattggtttggtggttaagggtctgtgagtttcttcatgaaaattatcagttggaataccaggggcttgggttcaaggaataagagaagggtggttaaagattttctgaggtcaaagaatccggatgttgtgatgattcaggaaacaaaaaaggtgaagtgcgacataaggtttgtgggtagtgtttggacggttagaaataaggattgggctgctctttcggcgtgaagggcttcaggtgggatcttgattatttgggactcaaaaaaactgcgtagtgaggaggtggtaataggatccttctcggtctcagtcaagtttgatttggatggatgcggacctctttggatatccgcagtttatggcccaaacagtccatcacttaggaagaatttttcagtggagcttttagacatttttggcctatcttttcccttatggtgtgtgggcggtgattttaatgtcataaggagaagttcagaaaaattgggtggttctaggctaacttcaagcatgaaggactttgattgttttataagagaatgtgaattgcttgatcgacttttacggaacgcatcattcacttggtcaaacatgcaagagtctcccgtgtgtaagagattggatcgtttgctttactcaaatgagtgggggcatctctttccctaaggccttcaagaagctcttcctagaaggacatcggatcattggccgattgttttggatagcaacccgttcaagtggggcccaacaccttttaggtttgagaataatgctgagagtatcacagaggagattttactttactttgaaaagctctacgcgagtcctactggagagtcttggagtgttgaaggtttagattggtttcctatatcggaagagagtgcgtctaggttggactcccctttcaccgaagaagagatttctagggccatttttcagttagatagggataaggcgccagggcccaatgactttaccattgcagtatttcaagattgtttggatgtaatcgaggatttagtgagagtgtttgcagagtttcacagaagcaggattatcaatcaaagcactaatgcctccttcatagttctgttacccaaaaaaagtttgacaaaggatatctcagactttagacccattagcttgatcactagcctctacaagataatagccaaagtgctttcagggcgtctaagaggggtactacatgaaaccatccattctactcaaggcgcttttgttcaggggagacaaatattggatgcggttctcatagccaatgaggtagtagatgagaaaagacgatcaggggaggaaggagttgtcttcaaaattgactttgaaaaggcttacgatcatgtgtgttgaaaatttttggatcacgtggttgagaagaaggggttcagtcctagttggaggaaatggatgagcggttgtttgtccttggaatcttatgcagtcttggtgaatggaaacgctaaagggtgggttaaggcttctaaaggcttaagacaaggtgaccctttgtccccttttttgtttactttagtcgcagatgtactgagcaagatgctattaagagcagaggaaagaaatttgttggagggtttcaaggtgggtagaaacagaactagggtgtcccatttgcaattcgcagatggtaccattttcttttctaatactaaggaggaagatttgcagactctcaagagtcttttgctagtgtttgggcatatttctgggttcaaggtcaacctggacaagagtaatatttatggcatcaatcttgatcagaatcatctttctaggttggctgagttgcttgattgcaaggcttctggttggcctatactctatttgggtcttcctttgggagagaatcccaaggcttgtggcttttgggatccaatgattgagagaatctcaagaagattagatgggtggcaaaaggcttatttatcttttggaggaaggataactcttatccaatcttgcctcacccacatgccatgttacttcctctctttgtttaaaatacctgcttcagtggctgcaaaaattgagaggttacaacgggattttttatggtcagggattggggaaggtaaaagagatcatttagttagttgggatgtagtgtgtaatccgaaggcaaaagggggattgggatttgggaagatttctctaaggaatctcgctctcttagggaaatggttgtggaggtaccttagagagggttcagctcttaggcatcacgtcatcttaagcatttatggttcacactctaatggttgggatgctaaaactttagtcagatggtcacatcgttgtccttggaaggctattgcataagtctttccggagttttccatgtttactcggtttgtggtaggaaatggggaaggaattcgattttgggaagatttgtgatgaggggaccaatctttgggatccaaatatccaagactatttagagtagtcttggataaaaatattcctatttcttcaattctcggttctactcgtcctttctcttggaactttaatttttactgtaacctttcagattctgagatagaagatttagaaggcctcatgcggtcacttgatggtttgcatctatcaccttcggtttcagatgccagatcctgacttttatcttcttcagggcttttttcagtcaaatatttctttctagccttatcccaattttcttgatctcctccgatttttccttctaagttcgtttggaactctcaagtccctttcaatgtgaagtcctttgtctggttaatggctcacaataaggtaaatactaatgacatgttacaattgagaagaccctacaaagctcttagtcctgatatttgtattctatgcatgaaacatggggaatcagtagatcatcttttcctacattgctctttgacgatggggttgtggcacaaattatttcaattagtcaagatggattgggtctccccgaggagcatctttgacatgatgtcgatcaaatttaatggttttggttcatctaagaggggtattgttgttgatccctttggagtagaaaaagcttcttgggttgtgtggcgggaaagaaacgtgaggattcttgaggctaaagtaaggaattcagagtatctttgggattctatttttttccttgcttctctttgggctttctgttccaaggtttttaaggggactccccttaatgtgttacaacttgattggttagcggtgtgtaattcctaaggattggtctaatctagagtgctagcttgttttactgtgtgcattcttgtttttgtattcttgtagtttagttttctttggtgggagggtttctcatctggttcatctaattcttttttctttcaatatatctctttgtcgtttcctataaaaaaaaaaaaaaaaaaaccttttagtctagaagtacatggctttgtcaaagtatttgctctttgctctctggtttctgctcaaggagtccacaaagaggttcaacggttgaggaaatgtgggataaaaaaaagtttgtttttttgcatgggaggcgacgtgggggagggtgctgactttggatagacttcaaagaagaggcttacaacttccaaatcgctgctttctgtgtggttgtgaggaagaaagtgtaaatcatattcttatacactgtacagtggttagagctctatgggatatagtgtttgggttagtagatgtgaaatgggttttcccataaactgtaaaggatgttttatttagttggaggggttcgtttgtgggaaagaaaaggaaaaagatttgggaagccattccgttgtgtattttttggacggtgtggaaggaaaggaatagattagcctttagggggggggggggggggtgttgaatgttcagaagttaaagaatttttttgtttgtaatttgtggagctgggctaaactgtatgtaggtgaggaggcatttttccttataggttttcttgagtggatggcttccacttaaagggaggtgtttctgctttttgttgtttttgaggcttagatgccttgtatacttcctgtatactttgtggcgttttgccttttgaatgaatatatcttacttatcaaaaaaaaaaaaaaaaaaaaagaatttaatttaaatgaccctctttttttttgaatggcctaggaaataattgcaactgattcactctctatctagaaattattgaagcccaaagacctagctaggatcaagccttccaacaatgctggcaccttctctgaagttagtcccacctcacaggctttgaagaagctctaaccacaacccccttgtgatctagaaacaatccaccgaaacctaactgtcctagattaactgacaagaagccatcaaaattaagtttcaggtgactgagggggagggaacctaatcaacatgcaccttcatcatcctcctcattgcacaatgaggagattctaatctaagattatcaccttcaatgaggagactgcaaactctgaagggactgaagcccattataaaaaaaccgaataaactgcatcttgtaatgactccaccagccttcatttgtccttttatgtcctgaaattcccttctgctgaagcacatgattaaatgcttgaggctgagagctctagaggtctcatagccactacatatcatttccaattgaaagccttaacaaaccttttgtccttggctttgttaaccaatctactcaatacattggccacaactacaatgaaaaagggagagagtagttctccctttttaatccctcttggcatcttcacccaatcttagcacacccattgaccggtactgcagagttaattgtggagaagcaaccctaatccataatctgcatcaagattgaaagctttccatgtccaaaacatgatctagaaagcctcaatcaacactactatgaacctttttaggttaattttaagtacaatcctgttctctcccaataaaaaattttcatcctctaactagctgcactaagaactgcatttagaatctgtttcacaaaagctccttgcaagggtgaaatggtctcttggagaactgcttgaaatcataaagcaataccttagcaattatcctggaggctggttgccaagttgatgggtgtgaagttggccattctatcaattgagtcctctagaacaatgatggcggtgttgtttcttttattgacaaggtattgtaaaatttgggaatacctttggtaagccctctctcattgtgggccaacattttggaaaacctttaaagagaagctaccaggaccgcgtgatttgtcttgatccacatgaaaaacatctttgatttccttttcaaactctctaacccaataacactttcctcatagataggggaccaatgcatcccctaaatcatccacaactctttatttagccttgaatggagatgacagaaatatcttaagactttctctagaatgctgtcgtagtgatgtccaaaactctatctccaatggatttaagcaatctcttcttccgtcaactattgatgactttgtggaatatttactatagcttccttaatccattttactcttaaccattagtcttgaaagacatcctccttcaacaggtttttctctcgcttcaattttctaggagttataacaatttgaaattattctgtctgactgtctaaaccttgaacattccctttttgtaagatcttaaataggtttttatactctttggattgggatgttagtttcccttactcttcaagaaaccttaccttgtcttacctctgagcattccaataattttaaatacgattctttgacttggggattaactccatttaggtttgaaaatatgtggttgtttcccccaaatcttaaggactgtattggtacccactgatggtgagggccccaaattaggggtttggaaagtcataatttatggagaatttattacaaggcatcaaagcaaaagtgacttgtggaagaagttcacttttggggatattaaggaaaagaaggaaaccactattagggacattgccatggtatattcttgtgaagggaaggttacatcatctaatgaatttataactttgagggctaccaaacaagtgaggttcaaagcacgactgttaaagggaagaggtatattggattgtagaacatttatattaccatattcaatgtctatgatggagtcctttcatatttataaaaaaattagctgtactttcatgcatattttaatgggcccatatttttttagcacctttccttttgctggcaaattcagctgctttctgatctacgtgttctactattctcatctttacatctcttcgttgtgggcctttcttcctccttgacattgggtgtttggttagttttcattttggggttgctcttttggttgtaaattacttggttattgccatatagatctttttgttgttttggcggtgatgttttatttgcagtctttttttctttcctttgattgtggctgaaatattcttcatccttccttgtacctaagttttttatttaatacaatctctttctgtttcctgcaaaactactactcctatatgaggttcctgaaatgtacttcgataatttaagatatgagaatggcagtgtatgatttctgacttaacatgcttagttgttcctatacatttcccccaatattgctgggatactagcactagcaacttcatattttatgttattcttggtgatgaataatcctgaatcctgattctttatattttgtctctgatagtgaaggaagttagtgcatgaattaatagtgcaagttcttttatatccattattgtaaccatttttttttttattgttcttcagatataattaacaggtaggacttcttgtttatttgaattttttcttcgtacttatgagtcatattcttgcagggcggttgctggccctattagctcatttgaca

SEQ ID NO: 12239 - DNA, 6415 bp, Vitis vinifera
  Intron number 1 from transcript GSVIVT01012268001 (locus G SVIVG01012268001) derived from phytozome v7.0 (chr-ID chr3 ; pos 12797311 to 12803725 reverse strand)
tgtagaaaacattgcgtgtaagggagatttctcaggtatgattatcccagctctcagattatttatgcatatcactatcttcactctgttcttgagtttctggcattctatttgttgcttatgtgtgggtgttattagttggttatgtatggatatccaaagttgtatggtgattgctgaatctggagattattcctaccattacctttgacttttttcgtgtcttttgtttcagaagtatgtttcattctctttccgaattctcttttggtctcttcatttactcttaaagctcattgagaatgcatgatttggagctttgttcactacgactatcagagtctggcctatttttactgtcattccttttttcctgttttctttctttttctgtatttcctccttgttttgtgcactccccgtatgtgcctcccctgtgtgtgggttcacattgatttcaagtgtcactctgttgaggaattgggtctgagagcagaaacccctattggaacttcatttaccgatgctcatgctggcaatgtaaagttcaatttcttgaatggttcggatccctaccgtgcatacctccaacaccgcctgtttgaacttcgctctcagaatcagtcctctgcacagcagattccttcacgacttgcagattcttttgctcctgaatctaccccatctgctccacctgccgacaatagtgagacattgatgaagcatgagccctcgtcccagtttaaaccattccgcaaggttcttgagccccccagagactgagcaatgcgctgttcgtcttccagaagggattacaggggaagagttggatgttattaatctcacagctcaatttgtgactcgaattgggaagtctttctggacagaactgaccggcagggaggtgaacacgcccacggttccatttttgaagctctccatggatggctctccaagttcgtagtccctgaggttgaattctgctcacgaggcagaagctcagctccgccatgccgagccgatgggccaccgctgctcataacctgccatgattggctatttttcttacagaagttgccggacgagactgtttcccgggccatgaaaagccttgggaaggatataaaagctttgtggattcatcaaggggaggaacgacaacaaaagaggaagggggacggtcttgcgaaagagcttgacaggaggattctagccttccagaaggcagagaacagagtcctagagttcaagctttcagaacataaatctgagccaatcgcgcagctagagatgggtatatacctgagcaccccaaaaactgagaagttatctgaggatggtgagaatggcagggttagatatggttcatcatccatgcaaggatggcgcgcaaccatggaagatgctcatgctgcataccctgatctggatgcttccacttcgtttttttggtgtttgtgatggctatggaggtaaggtagttgcaaagttttgtgccaagtatcttcaacgacaggtgctcaagaatgaagcatatacagctggagacttgggaacttctgttcaaaaattctttttcggaatggataagttgaacgcggggaaagcaaagatgagaaaggaagcttggaaaggatttcagggttgccgcctttgggaggtggaacgaggccctgcatggtgacttaggtgctgccaggtgtaaataggcagcaagttggtgcatttcatggagaagtggggcttcattacttcacctacagaagctggtagcgcactaatgacataaggcggtgtaagcaaacggtgaatgacaagtcaagggtggcatgggaattttcataagtggcagggcacttcaagttttctgaataaataagtggcagtgaaatggtgcagttgtggtctcattaagtggcagtgaaatggtgcagttgtggtctcatggtggaacttttttttttttttccacgtgtccaagtttgatttccgtaaattttttgttttaaatgattattaaaatcccgatttctcgaaaaatctcatttttattccaatttttaaatgattgctaaaaattcaattcttaaataattttttaaaatttcaatttttaaatttaatttttaaaacttcgttttttaataaattcttcaaaattccaatttttatatttaatttttaatttccaaaattttaattttcatatttatttattttatcattattatttttgtaatcattattattttatttatttatttatttttaaattttcatctttaaataattttttaaaatttccatttccaaatttaatttttaatttctaaaatttcaattttcacatttatttattttatcattattatttttgtcattattattttattttatttatttatttttaaaatgtcatatttaaataattcttcaaaatttcgatttccaaatttaaatttccaaaattccaattttcatatttatttatttaatcattatatttttgttattattattattctatttgtttatttttaaaattcattttttaaataattcttcaaaattttaatttttgaatttaatttttaatttctaaaatttcaaattttaaatttgtttattattattattatttatttatttataaaattataccttcgaataatttccaagattccaattttcataatttaattttcaaaattccaattctcaattaatttttaaaactccaatttctttcaaatttaaattttaaaaccttaatttttaaatttaattttcaaaactcccattttcaaataatatttcaaaattccaattttcaaattaattttgaaataattttcaaattttcaattttcaaataaatttcaaaactctagttttcttttgaataattttaattccactccagttttaaatatttttttaattctacaacttttcatcctttattaaggttttaggttgcgaaaaatcttgattttaataagtctgttgtcattctcattttggtatgcgcttgtataaattttctttgattttaaaataattttccgttttccttgatttttaataagtatgaagatcattttcataattccaaaacaatggaatttgtgagattgatttatgcaaaatcaattgggctttagtgagggtcctatatatgagtttttctcttctgattgtcgactgttatgcttaaaggacattgtttgatgtttggattgctttttgatgtgcatgtgataattttgtacttgaactaaccttgtttctatgataacgcactattacttgctattaaggtacgatttcactctcactttgcttgttcttatgcatggttcgttttactatttgataatttcattggtatcaattactttccttattaattgccacatttgcttcattttatttagtagatattcatttttagggacttagaggggtgttacggtctttactgtacctttctaataacctgactttcaaacctaaactcgatttttcgtagatttgtttttccttcaggagtcacatttaggttttttttttttttttttaattttaaatttttttttccttaaaaaataaaacaagaataagtggtgactccaagtatttttctaaaaatcataatttttcaccaaataaaataaaaaagcgagttttgtcatcaagtgagaacgcatcgagcgaaatgtagggtccacaaatgcgtatattcactttttatattattttaattagtaaggtactatattttaaatatattaaacaatgatttcatcatctcaagtttttatattcatgttaggttagagaaaatgagttttgggccaaaatagccccattatgggaaaaaaattaagtttaaccattctgtcaaacttatgttcaaagtgaccattttattaccatctagaaataatatatatatatatatatatatatatatatatatatatatatatatatataatttaagttaaggttttatttagcaattgagggtttagttagaaaaatgaagttttaattgttaattatgacttcattttttaatttgaaacctcaattaccaattaagacttcagttaaaaaatgcaatctcaatttttaatcgaagtatcaattggtaattgcaacttcattttttaattgaaatcttaattgtcaattgcagctatatttttatgggagaatgatgtgagactcatgtgattgaaaagatatcacattggatataagttttaaaaggggtcattttgaccaaaaattcataaaaaaaaacattgaatttcttagaaattgtatttttatattattaagacaccgtattttaaatatatgaaacatcatataatctttcttaaatataattcaatttttgaagttttacataatttttttttttactttttaatttttataatagaaaaaaaaagtttttttaaaactacaaagcagcttttcatcttattgttgtaagtgtcatgaccttgttttaataaactatctctaattatatgcatgctgagatttgggaagcctataattatatccttgcttattagtctcatatggatagataatgagaattatagtcaagaatttttaagctttgtttgataggacaaaaacatttattttgcttcaaaacattagcatgtgcatgcaccatttcataaatgtattgatggacttcctaaaagcccagaattgtgtttgcaactcgtctaatgccaaaaattccaagaccaaatttggtataaaatactaaagataattagatatagtaaacatgtacattagttaaaaacaaagattattcatttattaaaaaaattaatatacttctttttactattcattttaaataaaatattattaatccatgttttttttacaaaaacttattattaatttttaataaaaaaatataacttatttttttatattaaaatattaacatccatatttcatatttgagtctcactacaatgttgaattgctacatatcaaaaaatgtgaatcaaattgcactacatatgaataggtcccattattttgattgatttattattttatacattgatctcattattgtacatagttctattcttttatacttgggtctgattatttgtacatttattcaatggtttagattttactatacactttcattgatgtagattatatgttccataggtgctaattcaataccctaattttcctttaaatctgttaaaatattatcattttttccaacaaaaaataatataatttgttctttattataatattagtgtttacatattataaaaaaaaaatgatctctaattcatttataattgcaaaaaatattttttattttttcataagatttgtattaaatttaatttaatattaaaactttttacaaaattaaagtagaaaattaatttttttttaaaaatgaaaattattttatttccttgtttaaaaattatttttacaaaaacatcccaaacactcttatttaaataataataataataatagtaaaaccatttctttttatcttgaatatatttagagatattgaaaaaaaatggccttaattaaattaccatttttttgttcttttaataaccccttataaccgatgtttcaaaaccaaacaagtcattaaataggaaaagttattgatttatggttaaaattgatagttgaactatgatgaaactaataacatcataaatttataattcatatattattaaactatttcatcattttatttttaatattagtatatattaatcatgataaccatattatacaaacatatgaatattttttattaatcaaataattttttatattattcatatattattagttttgcattttatgattttttataattttgtgtggtttatatattaattacaaataattcatgccataagaaaacacttttacttgatgatttatatttaatacatattaaggaatgtgcggggggaaaaaagaagggttggaactgccctttgacatttatgaaacaagcaatgggatcaaccatttaatggtttcataaaaattaaaaaaatcaagtgtcgggcctctattaaaaaataaaaaataaaaaataaaaaataaaaaataaaaaataatagttgaagatgacatcaaaacttggttcgatggaaagtctctcattcgagtcttctctcggtttaattcgtttttgaagcttgaagcggttcaattagcaaatggaatccgatagaagaccggtcaacggtttgtttggccactcccatccaagttttataagattgcttataaccttatgaattgggattttgcagtgactctggaacgctgtaagaaccccatccctctc

SEQ ID NO: 12240 - DNA, 13692 bp, Vitis vinifera
  Intron number 5 from transcript GSVIVT01019065001 (locus G SVIVG01019065001) derived from phytozome v7.0 (chr-ID chr4 ; pos 17183218 to 17196909)
ctgtgagtcactgttttttgattggatgacaaggactttttgtcaagtttatttattgaatttggcaagaatctttgcttaaaattgtcaatatgtctgataagtgcacatgaaacagtatgttatatgtctatcctatattctttgaacttcttcagatgaatgaatagggtagaacagtaattagttaggaaagcagggttctgatttgacaatagcccacaatcagctccctattaactgagtctctgagtttagaaaggctttggggggacatggaagcatccaaaaatgcatgcaaaggccgttcgtaaatccaattgctctgtcaagaccattagctagagtggagttttagccgttagtttaatctgaaggcttgttttacctgtttccagtttcatgaaactgtttttatgtttctcgtcttttcaagtaatgtattgacttttatgtagtgtggaggctctatttgtaatgttttaggaataatcaagggttgagattattttccatgttatagaactattagctacagtgtcaaattttaattaggttgataaaatgagggccaattttgtgacttcaattttgacagtttgaaatcactaataaaagtgtattcagtacttttcttttgataagtaactatacttgtatcttattagaaaagtgagtgaacatacctaaagaaagaaggatgagaaatccttccaaaagaagtgtacaccaatataaaagggaataacaatgatagtccctagaaatgcctttggcttccatcgcctaaaccctacaagcatgacagctcaagggggcatgaaatcctcaacaaaatcaacaaaagatgaggctcctttctgtatgaaaataagaaatcttcttattcactcattgaaaaattagttcaaatatatatacgactttcaaacttgtacaataaatggaaattaaataagacagctgacctactcctaaaattcttcctacaaattttctagattacaatttccctaatttacgcggtcaactaatttaaatatgcacaaaattaggaataaatcaaataaactccatgaaatcaggaacaattgttggattccaacactttccttgaagttggttctaagatgtctttcatccccagcttgccaatcatagagttggatgtcggatctaatttgtgaagacatcagctagttgtagtttggatgcggcaaacggagtgcaaatcagcccactatcaatcttttcctcaataaaatgtctataaatctcaacatgcttagtcctatcatgttgtactgggttatgagcaatgctgattgcaaccttgttgtcacaatatagtctcttgggatcctcaagattcacttgtagttcccttaatagatcctttagccatatagattcacaaatgtcaaggaccatagctcgaaactaagcttcaacactagatcgagcaactacttgttgctttttgcgttttgctttttcacataagtaagttgtctcctacaaaaatacagcaccctaaattagatctcgtattagtaatagaatttctccaatctacatctatgtaaatctcaattctaagatgattgctccttgagaacaataagccttttcctcgagtgactcaggtaactcaagattctcaagattgcatccatatgacatgctaagggggagtgcataaattgttttaccatgttgacaacatatactatatttggtctcatgcgggacaaataaattaatctcccaacgagtatttaatatttcctttgtcaaccaatattccgtaagtgatggcacctaattaataattttgatcaatagatgtactcactagtttgcgatctagcatccctatttcagtcctagcatcccgatttcatttaaaaaatcgaggatatatatcctttgtgtaacataaattcctctttttgatcttgccacctcaatgccaagaaaatatcttatacttacaagatctttgatttcgaattcttttgccaaatttcccttaagattctacatctcttctacatcatctccagtgacaattatgtcatccatgtaaacaataagtgtaataattttcttttatgtcgattgtttgatgaatatggtatgatctccttggctttggtgataatcaaatttgagaagagacttggtaaatctcttagtccatgcttgatgagattgcttcaaaccaaacaatgatttcttcaatctacaaacctttccactattgaattttcgttcaaaactaggaggtaaatccataaatacttctacttccaagttcccatggaaaaatgcattttttatatcaaattgttgtaaaggccaatcaagtttgctgctaaggatgaaaggactcttaagggaattcatctataccactagtgcaaaagtttcttggtagtcaattccaaaggtttgtgtgtatccctttgctactaaccggactttgtacctttcagtctaaccatcaactttgtttttaatgataaacacccacttgcatccaactgaagtttttttctttgggaaaatcgacaatatcccatgcttcattcttatacaaggctttcatcttctcatttatagcctcctttcgcctaggatcacttagagcctcttatacatttttaggaattaaaggtgaggacaaatgagtggtaaaggccttataccggtggtaaagtttgataggatcgaaaatttgacagaggatgtttagtacagcttctaagaccttctcaaatagctataggaatatcaagatcaatgtcaaatccatgattaagaagagagggattagaagaattagatgtacctaatcctagagttgatgattggtcgtatgctagagagatcgagtcttgttcttgcattggcaaccttggcctcctagagtaaaccaccaaaattgtatcaacattttctgttgctgctggttgtatgatctcagtttctattgttgctgctggttgtatgatgtcagcctcctctacatcaccatgttcaagagcatgactccaaatgggtaaaggaagcattcaagactaaccttcctacagtattttcttcccctgaagatcagatttctggaaataaggttggtttaaaaagaaaaacaaacataaatggagacaaatttcgtttatgtaggtggatgataatacttataccctttttgtatagaagaatagcctaaaaaaatacacttagtggctttgggatcaagtttggattggtttttgtttgggatatggacaaatatagtacaaccaaagacttggggtgaaagggagttaaggcaatttatgtgaggtaggtgttgttttagggtgtctattagagccttggagtttaggctttttgtgggcatttaatggataaggtaggcaattgtaaggactacaactccccaaaagaacttaggaacagttctagcaaataaggctctagctacctccaacaaatgtttattcttcctttcaactacctcattttgttgaggagtacctacacaagaggtttaatgaataatctcattctctaagaaataatttccaaggatttgttttaaatactcccctccactatccaacctcacatcttgcaattttgcattaaagtgggtttggatcatatggtggaattgtttaagggtgaggatagtgttaaatttttcttttaggagatagatccatgtggttcagatacaattgtcaataaaattttataaaccattttgttcctaaaatacaaggaacttatgaaggactctaaacatcaatatgaataagagaaaaaggaatttcatttcttttactactcaaaggatgagaaatatggtggctttttaataactcacagactttgcattgggattttgaaagatctaaattgacatgcaatttatggagagccctaaatgcggagggggctgcaggtggcattttgatatgctgggacaagagggtcttggatattttggattgggaggagggtcatttctcattgtcctgtagattcaagactatagaaaatggggctacttgggtttttacgggagtgtatggtccatttaccaaagtggaaagggagggtatgtgggaagaatttggggcgataagaggtctttgggatgatccctggtgtctcggtggggatttcaatatcactttgtttcaacaagaaaggagcagccaaagaagaatcagctcagccatgaggagatttgcagagactgtggatgatctagagctggtggacctgccccttcaggggggagagttcacctggaatggggggcttaataatcaggcgtgggcgagactagacaggtttttagtttcccctagctagttagatcagtttagtggagtcactcaaagcaggttgtctcggccaatttctgatcatttcccaatcgtgttagaggggggtggaataagaagaggcccaaccccgtttagattcgaaaatatgtggctgaaggttgaggggtttaaagacattgttagaacctggtggcagggaattgaagtcaggggcagcgctagctatagattggctattaaaatgaaggaaattaaaaagaagctgaaagtttggaacaaagaggtttttgggaggctggaaactaataaagtttcagccttacaacaagtagacttttgggatcgggtggaaagtgagagaaacttgactgtggaggaagctaaagactcctttaagaaatgggtcctgttggaggaagcccattggagacagcactcaagggagatttggttaagagagggggatagaaacacggggttcttccatagaatggcaagtactcatcgaagaaacaacgctatggatagaattaaggttaatggggagtggctagtagaggagcagcaggtgagagaaggagttgtgaattcgtttcagcagatgctttctgaagatatggtttggcaggcggatattggtagaattcaggtgggttgcatcagccaacaagaagcagagagtctggaaatcccatttacagagattgagattcattcggcgttgatggagatgaatggggataaagctcctggcccggatggttttactgtagccttctggcaaaacgcatgggattttaccaaagaggagatcatggagatgtttaaagaatttcatgagcataactcctttgttagaagcctcaacaatacttttttggtgttgatacctaagaaaagcggggctgaggatcttggagactttagacctatcagcttgttgggggggctctataaacttttggctaaagtcttagctaataggctcaaaaaagtgattggtaaggtggtctctattgctcagaatgcctttgtaatgggaagacaaattctagatgcgtccttaattgctaatgaggtgatagattcgtggcagaagagaaaagaaaagggccttatttgcaaattggatatagaaaaagcttattacagcatcaattggaattttttaatgaaggtccttcaaaaaatgggctttgggaccaagtgggtgggttggatgtggagctgtgtgtcttctgctaaattctctattcttgttaatggagtgccagttgggtttttccctagcactagagggcttcgtcaaggggatcctctatccccttacctctctgttatgggaatggagattttggacgtcctcatcaggagagcggtggaggggggatatctttcaggatgtaacattcggggtggtagtagaacttccttgaatatctcccacctattttttgctgatgacacaattgtgttttgtgaggcgagcaaagagcaagttacttatctaagctggattctcttttggtttgaagcggcttcgggtcttcgaattaatttagccaaaagcaaaatcattccagttggagaagtggaggagattcttgagatggcagctgagctaggatgcagggtggggtctctgccctctcactatttgggtctccccttaggggtccccaatagggctacttccatgtgggatggagtggaagagagggtcaggaggagacttgcgctttggaaaagacagtacatctccaaaggggggaggatcactctcataaaaagcaccttggctagcatgccaatttaccaaatgtctatcttccgaatgcccaagtccgttgctaaaagagtggagaaaacccaaagagatttcctatgggggggaggaaacttggacggaaaagtccatctagttaaatgggatgtggtctgtacagaaaaacacaagggagggctaggattaaggagaatagccactctgaatagagccttgctgggcaagtggatttggaggtttgcttgtgaaaaggataacctttggaaacaagtgatcactacgaaatatgggcaagaggattatggttggagatcaaagaaggctagtggggcggctggagtaggggtctggaaggagattatgaaagaatctgaatggtgctgggaaaatttggcttttctagttgggaagggttccaaaatcaaattttggaaagatagttggtgcactgacactccgttgtcccaatgtttcaatcatctttttgtccttgccgcgcatagggacgctacgattgaggagatgtgggatcaagattcgggccaaggagattggaatcttgtttttgtgagggacttcaatgattgggagttggatatggttggggatttgctccatactttgaggggtcataggccttccctggaggatgattcagttatgtggaggcagggaagaaatggtctctttagggtcaaagaagcttataggctactagacaagcctaatgccacagtgtttcccgcaaggagaatatgggtggatagggtgccaactaaagtctatttttttgcttgggaggctacgtgggggaaggtgctcactctggatagactctagataagaggggtgcaactcccaaattgttgctttttgtgtggttgtgaagaagagaatgtaaatcatattcttttacactgtatagtgactagagccctatgggatattatttttgggttgatagatattaagtgggtcctcccagaaactgtaaaggaaactttaatctcctggaggggttcatttgtagggaagaaaaggaaaaagatttggaaatccatttcgttatgtattttttggacggtttgaaaggagaggaataggttagcctttagggggggtgcgttgaatattcagaaattaaagagttctttcgtctgtaacttatggaattgggccaaagtgtatttaggtgaggagtctttctcccttataggttttttggagtggatagcttccacttaaggggaggtagttctttttggtcctttttctctttttgaggttgtagccatcttgtatactccctgtatgctttgtggcgtttagccttttctaatgcatatcttgtttacttatcaaaaaaaaaaaaaattgacatgcaatttagggtacaaggctctcaaagagaaaaaagttggatgccctaatcttttatgcattagccaaagttctcctttttttgtgttccattttattttatgagcttgactctttccttcatcctcagttaccaagcaatagagactctctctctttctagcactgccaatcatcttcctgtagttaggtcctaaaacacacaattagcaagaaagaaagttttttataggaaacaacacatgtatatattgatagaaaaaaagtacaatagaaggatgaggaatcctcccaccaaagatgaaactgaacaacacaaaaagataacaagacactacactaagaaaactatgaacaatctcccttgactagatcgtcccgttggaactacacactgctagccaatctagttgtatcacgttaaggggaatacccttaaaaacctcggaacaaaaagcccaaagagaagcaaggaaatgaatggaatcccaaagattctctgaattcctagctttgtcctcaaatatcctggcgtttctttcccgccacacaacccaaattaaagctatgcacgcattctgccacaaaaccacctctctcttggaattgccaaaacctttatagttgatgaacatcatgtctgaaatgcttctcggaggaacccaatccatcttagctagctgaaataatctgtgccacaatcccaacgacacagaacaatgaaggaacagatgatctgctgattttccttacttcatgcacaacttacaaatgtcataactaagagctttgtggggtctcctcaattgtagcaagtcattagtatttaccttcttgtgtgccacaagccagacaaggccttaactttgaagggggcttgagaattccatacaaacttagtagggaaaaatgaagataagttgggcatttgagacaaggctataaagaaagacttgactgtgaacaatcctaaagaagataaggaccatgatcttgcatctgaagccgaagtggatatatgcatacaatcaagagattgcatgagacattttagatcttctatctcagaatcgaaaagattacgacggaaattaaagttccatgagaaagggcgatcagaaccgagaattgaagatataggaatattattatctgtgactactctaaatagtcttgggtattggactttgaagatctgatccccccaccacaaatcttcccaaaaacgaattttttccccatctcctacgacaaaccgagtatacttggaaaaatcctgaaagacttgtgcaataaccttccaaggacaacgatgtgaccatctgactaaagtgttggcatcccaaccatttgagtgtgtcccgtaaatgctttgaatgacctgatgccacagagttgctctcttccttggaaacctccacaaccacttccctaaaagagcacgattccttaaaggaatcttcccaaactccaaccccccttttaccctcggcttacacaccgcatcccaactaacaagatgatctcttttaccttccccaacccctgaccaaagaaaatccttttgcaatctctcaatttttgcagccactgaagcgggaaacttatcaacaagaaagaaagttatagaacaattttgagattttgttaatttattgatggacaataagttacaagacatatttaggacatgcaaaacagatgaagagtgatattatgaatgaataaaataatgcctttaccactaatgggagtcaaagatccattagcaatatgtactttttggttacccaaacatggaatgtaggatagaaaaacattaggctctttaatcatgtgatcaattgcccctaaatcaataacctaagggttagaatgaagaatatttgaagtactaagagttgttttaaaagcacctaattgtgaaaaaacacaggaagtggaggaagaggaaaccttagattttatcataatcttatacaagagatccagttgtttttttgtgaaagggagactatttgaggttgatgttaaacctgatgtctcaactgatagtgcactcactgcctcacactgaaatcttttgctgtttttgaattgcttgttactattgtggctgtccttggcccttgattatgtctttccatgcaatttccaacaagtctctctagtgtatcttgacttattgcaatgatcacaccatctagtctcattttgtccccctttttgaagtcacctgtattgagtgctgaattctcttgtggagcttgtcccatcatgactgcccttctagactcttcaccatacacataggaataaacttcacataaagatagaagaagatattttccaagtatttgacatcttacctaatacaattgtggatttaatccacttggaaaatcaaagattcgatctcgtttaattatttcacccaaccttgttgcatctgctgcagattccctttcaatatgttgacaaagacccaactcttgccacaagacctttaatctgttgtagtaagctatcactgagagatctttctgcttggtattatggataattgtcttcagttcatagatctgagcaacatctcctttcttcgagtatgtttgtaacacaacatcccaaaccttcttagtcgaagatctgaacaaaaatgtttgccaatttctgattgcattgaattcagcagccatgacattatcatggaattttcagcatcccatgattcaaaagaaaaatcagattgttttggctcctcaatggttccacatgaaaatcccatcttccctcaactttgaaggaaaatttttgccgattgaaactgctcaagatagttatgcccattaagcttctcgattgtagtctgaagtgtgggattatcaaaatgggttgttgtcttgggttggttcaataagattctatcagaagtttcttcctccattggtagaagaaaacaaaggaagaagtaagggataaacaaagggttgatggcaatagaaagttgcaaatatgatagacaaggcttggcaatgaaggccaagaagaagaaaaaactaccaggacttgtttttcagctttcataacatgttggaaaataagaaatcttcttactcattcactaaaaaattagtacaaatatatatacaactttcaaacttgtataataaatggaaactaaataagacaactgacctattcctaaaattcttcctgcatgtcctctagattacaacttccctaatttacatagtcaactaatttaaaagtgcataaaatcaggaataaattaaatatactccatgaaattaggaactattgttggattccaacactttcttcagcgataggttagcagactccagcttaatttttgagtgcaaacggaaattttagtgattattttaacatgttgctggatgcacttacatatggaagattttttagtgtttaacattgaatctttttataaaaaaatattctaagagtaactcatcggcaatcataaaatcatgtaggattttgcccttgaggcttggctcaagtggtgaagggatgggaaaggtttgtgggaggttccaggtttaagtcccaatgagaacaaaaattcacctatcaagaataataataaaatcatgtaggatttccttttgattcaacatcgatgagactgttaaaggtaaggaattttaggtcctgtttggaaactattttcaaaaacaattttcagttttctaaaacaaaaaaacaagaaaacacattagacaaccaaaaaacagaaaacaattttctatttttaaaaagagaaaacagggtgttttcaaaaaacatcttttagttgtttcaatttttttcacttgttttttaagagttgttttaaaaaataattatacaaatatggaaaattattaaaaataaagtactacatttaaaagttattttcaaacatatttaaaaacatagaaaacagattaaaaacatttcagattcctaaacaagcttttattccataaattatcataaaatagttttcaaaaactatttccaaaaaactgttttttagaacttttttcgaaaacacttcccaaaaacagagtgttagtctattgactgttccagcatgttaatattaaatctcacctttgaagaagttcataatgaaggccatgatggaggcatggatatggagcttgatgagaatgataaaatattttccgcaagttctcgatgcaagaggatctcctaagtaaatcagtgcgaatttcatttttgtacctgccctacaaatttcatcacatggatggaaaaatcttgacaacagatgtaggagagagaagtaggaggaactgtcatatatgaaggccaccatgtttaagggaaagctttcatcaatattagatccttcctgaaagtcatggggttgtgaggtcctgtaacttacacatttatgttagaatttgggaaatcatttgcaccatcaatgatgtttaagaacttttaagtagtgcattttactccattgtcattagaagatctcttggatgatatgaaagaagcaataatgcataatttcttcagtccctctgtcccttttggcctttggtgcctagtatacaccatgtgcacccttttgaaggcgcttttaatacaattcttctttacctataaaaaaaaatgcataatttctttagactccaccaaaagtcaacaaggtgattgagaaagttaaaaaggatgagagattaataattatttgaagtattggcaggaaatgctaggatacaacaaaaatcccacatctagaagagatgaattcatatttggatgaggggataaagttcatgcatgcttaatcgagtagggaaaatggtgaagggcaatattggtgtttcaattcctagtacatgtgaagggcaaggagtatctgtagggaaattggatgcatagaaagggaaaattgtttatctgtgatagaggatatgaaaagcaaatgaaatagttggataaggacaaaggggtacttgatagaggtatcactgaggtaattgtttactaacctctgaaaggaattgcttgaggggaaagttcatctgcaacaacataatatctaatttcctcaagagtcctagtgctgagagcaagattcagcaaagcctattggctgtttgggtgctagtgaatcacttcagttaccgcttttcttccaaatattataatttcttattataagtactcacctccagaatatgatttcactaattattttgtctactgtcctttttttttttttttgcatgggatgaagataatgtgagattttccaattcaaaacacttgtttggtaaattgcatcaaacttggctctgctagttacatgcattatttaatttccggttcttcagtgtttcatttgttttattttgtttggttaaattaacaactccacctaggccaagcaatcccaatcatatcttcaaacataatcctaagaaaatccattgggtaattactaggctagatcttcctctctttttatggcatacctaatattagttaaataatctgctgtcctatttccttctcaaaatgtaagattaaatttagctcccatgttggactgtgtaataaaattccagctgtctaataccaagctccatatcatccaaggagccatagattttctattcatacaattattaatcaccttcgagtccccttcaactaccagttttttaattctttgatttttggccagaattgtaccatctctcagaccaagcacttctagtaatagaactgtaatcttattcttcatccattcagtttgggttcattaggttaacctatggtacccctaatacttccaggtcatagttttcataaattatcgtgcaccatatcgtttggtcctcaaagaaggtcatgcctttggatcttgtgttcttattctgcattaatcttggggcatgtgacactattccattttcttgtatgtttttggcttagaacttatttgcacaatccagtttccacctttttccttaatacatgcctatactcaaaatagatttgcataatacagcttaaatattgtgtcaagctgtgcttttctctcaactttgctattccacttaatctgtattgtactacaggata

SEQ ID NO: 12241 - DNA, 28712 bp, Vitis vinifera
  Intron number 20 from transcript GSVIVT01020995001 (locus GSVIVG01020995001) derived from phytozome v7.0 (chr-ID chr 5; pos 15799422 to 15828133)
gcgcatcaccaggtacatcattacctgtgtttcaaagctggctactgtaaggattggcttccttaaatagaatgatactccaaactgtgtttcataattttcaaattttatttttgtttataacattattcaaccaattagtttcaagttagttggtgttataatcacaaatttctgatggaaaatgagatttatatctttgctcactgacttcactcttgacttgtgatccccttcccttctacccttgtatcttgccatttacatcttgtttcttattttcttttacttcttgaattctttgtcattcttgtttggtagatattatagaatttcttatcaagtttcccctactagatgaaactaaatactgagctatcaagaaatagaatgattcctagaatgcaatgctctttttggccaccttcttttagacaacattctttctttccttgggtgacaaccttgatactgtgcatggctagggtttgaacttctactagtataggttgttgattcatggttttataagtacatttagaagcttattcattattttccattactttctttactggctaaatttaatgttgtattgttatgtggagcctaagggtatgttgaatattttccttaagtttacattaaccctaattagttaagggtttgtatggatagttactcacccaaaggctattgccttgcattacactctttttacctcaaagttgacatagaacaccttgccctaagaaagtagtctagtcaagtcaactagtattagaataatatttaaattacataggaaatttgagacttgtagtacttggctacgtggggtagttatttacgtgagatttcatttctaagtgttggaagttgtgaagacaataaagggttattgggataaatagaagggatagatgatgaagagagaccatttgcctttcattctaaattttcaagtcaatggaaatctcttcttgagagtttttgtggtggattccaagatttattgggttagacgtgttctatccttttactcttttgctttgtgttgtgtcgagggtgtatggaatggtatgccctttcaacctacctcaagcttgagattatggctgccctcaaatcctttatgaaaagaccacaaagtgctcataacaatttctttaaaaaactcactagaaattttgattttagatttattacacttttattgaacccattagggtgaaatttaatgatttgaactagtaatttttgggtttatgatataatttactgtggaaaagaatgatttcattcattgtatttctaaaaaattatgcaatatttttagtgtagaacaatcctaaaaattctacaaaattaggtaactaaattacataaagaaagttgactaattcctataaatcctataccctacaaattaggcaatatatttcaaaaatcaaggaattatataactatagattatataatcctaaaaattagggaattaatttcttggtattttcaaactcatcttgaaaattagggagttaattccttggtatcttcaatcagattagtcaacactccccttcaagttgattagtagatattatccattcccaacttgttagttattttttgaaatgagtggctcggtcgaccccttcttaggatatcagtaagttgcccatctactgaaacataagtagtacagattcatccattatcagtaacttaaacatatttttcacaatcacgttgaattggattatgagcaatattaattgttgatttattattagagtgcagcttgatagtccccttccacttcacttttaaatcgccaagaattattttttgccaaagtagttcacaaattccttgtgttgtggctttgaactctactttggcactggacttgacaactacattttgtttcttacttctccatgtcaccaaatttcttctaagagcagtataatatatagaggttgatccacagtgtactaccaatctagcctagtctgtatcagtgtaggcttctaaacttaactcttcattttcttgaagaggattccctttcctaaggtggattttaggtaccttagaattttgtgtgtggcatgtaagtgagcctttttaggggagtgcctgaattggcttactgcactctatgtgtaggctatatcaggtcttatgtgagatagaaagatgagtcttccaactaatctctaataacttcctttgtgtataattggatattctaatacttctctaggcttatgtttttgttcaataggcgtgttaacaggtttatatccaagtatcttggtttctttgacaagatcaaggatatacttctgttgataactaaaaataccatttctagaatgaaccacttcaactcctaagagaaatcttttatcttaaattctttggccaaccatttcttaattcttcaacattatccctatccacaattatatcattcacaaaaacaattaaggttgtgattttaccagttgttgattgtttggtaaagaaagtatgctggctttgttagaacttctagttgctcatagctttaccaaattttccaaaccatgctctaagagattgttttaggttatataatgtctttcataatttacatacttcattagccttgaatccttcactgatagaggtgcttccatgtagactcttcttctaggtcacaatgtaagaagatgttcttaatgtcaaattgctgcaaagattaaccaaaattagttgctaagtataggtttcttaatagtccacttcatatgtctaagtgtagcctttagctacaataaacatccacttacaccccattggtttcttagctttaggtaattcaacaatctcccatggcttttttttttttttttttcaagaatactcatttccttagctcctataggagtagataaggacgaatttggaagattgggtaagctcaagtctatctcatctcaatttaatgatagggactccctctaaaggttaggattagtgaaggattggtttttagtaaaagtgatatccatagaaatgaaaattttcttggaagtaggttgataacatttatatgccttcttttttggtgaagtgaataaccatcgaagacacattaagagcttgaggtttcaagcttgatgttcgaaggtaaccagttggttaagtaagcaatagttaatactgcttctttccagtagatgattcaggcacaattttctcatgtaacaaggcacaagttacctttagaaggtgatgattttattattatttttattttccatgactccattttgttgtagagtatttgtacatgatgactcatattttaatccttttctatctaggtaagaaaagagggattagttaaagttttctttctcgttacactaaactaggtactaatcatcttgtgaaacggttttcaaaaggtataaccaagtgacataaaaacacttatcaataaaagaaacaaaccaactagctctagttatatttggaagccaagagggtcctaaacatcaatatgaattaatgtaaagggataagatgattattattgctttaaggaaaaggaacttgatgatgtttgatcaagtgacaaacttcacaatgaaagtcatcaacatccaaattctgaaatagtaaaggaaacatagtttttaataaggaaaaggatagatgctataaacgtaaataatgtagccaaatttggactctatttgatgaaaagcttgaacgaaaagatactagatatgtgaccactaccattgtcactcccaacatcaagattagagtcacttttgttccctaaaaaacacaaaggaatgggaaaaatattactttgtagtttagatctttggtaacttgatgaattgataggagattatggagagttaggaacatctagtagatagcttagggaaagagatggggtaagggtaagtgaccgagcttgctttacccttttaggaacgtgtgcacaagttaagatcacactagatagttttggatattaagtctgaatgagggatgagggttttgataatcattggtatttggttggttgtagaatgcactgttcgaggttggattttttggggttttcaacatagtgaatagtgaaatacagatatataaatgatgaagaaagccattgagaagaaaaaaaaatgatgagggaaatgaaggctacttaaggcaatgaatagaagcaatgaaggtcattggaaatcggtggtaatgaagactataaaattttgaagagaacttaggaaccttggacacgctctgataccatgtggaaaagaatgattttactcattgcatttatgacaaaatgatataatatttataatgtacaatcctataaaattaggaaactaaattatagaaagaaagttaactaattcataataatcctctaccctataaattaggaaaaataatacaggaaatgtacaattataaaatcttgaaaatcaaagaattatataaatatacgatcgcaaaattggggaattaatttctcagtattttcaattaaatctcagaagctagggagttaattctttttttttatataggaaacaataaagaaatatattgatagaattaagaagtaaaaaagaaggatgaggaattctcccaaaaaagaaaactaaacaacaagaatacaaatcaataagctaaatggtaattacaaaaagcaaactctctttgctagaccatcccattggagctacacactgctagccaatctagttgcaacacattaaggggaatgcccttaaaaaccatggagcaaaaagcccaaaaagaagcaaggaagtgaatggaatcccatagattctctgaattcctaactttatcctcaaatatcctagcatttctttcctgccacacaacccaaattaaagcaatacacgcagtttgccacaaaactatgcctctcttggattttccaaaacccttataattgatggtcatcatgtcagaaatgcttctcgaggggacccaatccatcttagctatcagaaataatttgtgtcactaccccatcgtcaaagaacggtgtaaaaaaagatgatctgttgattctccatacttcatacacaacttacaaatgtcaagactaagagctttgtagggtcttctcaattgtagcaagtcattagtatttacctttttgtgtgtcactaaccagacaaaggacttgaccttaaaagagacttgagaattccaaacaaaattagtaggaaaaattggagattaatcagaaaagtgggacaaggctagaaaaaaaagatttgactgcaaataaccctgaagaaggtaaagaccagaatctcgcgtctgaaaccgatggggataagtgcaaacaatcaaacgaatgcatgaggctttctaattcttctatctcataatcgaaaaggttacaacggaaattaaagttccaagagaagggacgagtagatccgagaattgaacatatgagaatatttttaattgtgactactctaaatagtcttggatattggaatcccaaaggttggtcctcccaccacaagtcttcccaaaagcaaattctttctctatctccctaccacaaactgagtatgcttggaaaaatcctgaaagacttgtgcgatagccttccaaggacaacgatgtgaccatttaactatagtgttggcatcccaaccattagaatgtgtcccataaatgcttagaatgacctaatgccacaaagctgaactctccttaggatacctccacaaccatttccttaaaagaacaagattccttagagaaatcttcccaaaccccaattccccttttctcttcggtttccacgctacatgccaactaataagatgatattttttacattccccagcccctaaccaaaggaaatcccttgcaatctctcaatttttgcagccactgtagcgggaatcttgaaaaagatagaaagtagctaggaatgtgggataggcatgagtggataagagttatcctacctccaaaagataaataagtttttttccacccatctaatctccgtgagattctctcaatcactagatcccaaaagccacaagcctttgaattccctaccaaaggaagacccaagtagagtataggccaataaaaaaccttgcaatcaagcatctaagccaacctagagagatgatcctgatcaaggttgatgccaaaaagattactcttgtcaagattgaccttaagcccagaaattcgcccaaacactaacaaaataaacttaagagtttgcaattcttccacacatgagctagaaaagaagatggtgtcatctgcgaattgcagatgggacacccttgttctattcctacctacaccgaagccctccaatatacttctcttctctgctctcaacacatcaacgacgatagtaaatagaaaaggggatataggatcaccttgtcttaatcctctagttgccttgacccaccctttagcatttccattcactaaaattgcaaaagagaccgaggacaaacagcctctcatccaggtcctccatctagggctaaacccctttctatccaacacctgatccaaaaaatcccaatccacatgatcataagctttttcaaagtcaatttttttgtggaaaatgcaaggaaagctcagtggtttcaagaaagaggtagtttcacagtgagagaagaggtttttgctttgaggagatggtcgccagaagagaactcagtggtgaggggaaaatttagacgggggtggctggaactaagaggtctccctttccacctgtgggatgaggtgtagttgagtcacattttgcagcagtgggggagggtaacggaggtggcaagaaactccttgaagtttgttgatttgtcgaaagtaacattgcgggtggaaatgcttccaaaggtcgtgctcccagcgctattagaggtagaagatggagattggacatacacggttgcagttacagtcaccggagaagatgacggagaagacgacggaggagactctatcaagcctgagtcgagtcgcagcaaggacgagatgaggtcagccgggggttgcgtcttgcagaagccacagatggttgaggggctacgagctattgacaggaccagtgactgccaaagatggatgtcccgtcatcgtctccattttagctcttcagattcaaaatcggctaagggggagaaaggaaagggaaggtgggtgtcgggcccaatggcgggaagcaatgtcgggccaacaccagaagtctttgaagcccgttctgtttgggcccaagttggggcgaaggattttgggccaatagcgggtccagcccataaaggatcttcaaatggtggcccagttgtatcttcgtcttcaaagctccaaagaccagggctctctgcaaagaataaagcgtcggaaggtcttcctcaagcgtcgtcaaagacgaagggatctctagtctccgtaaggcgcagagcaagaagtgggccgccgagttttgacgaggcgtcttcttccccgaagcttagctttgaaggaggtggctcactggtgacaaatcgagacatttctcggggcaaatctcactccagaaagagtgatttctccactggtttggaaacatccaaagtttccaccggcgagacagagggggaagaggggattttgcaatgcaaactgatcaatgaggtgcgtaatcctatctcagctatttctgagcgagatcttcctctgtctggggcttttgagtcgattcttattcccgaaacctcggtttctttgggtcatcctttttgtgtccactcttcttcttcgtatccggtggagtcaagccacgcttttcagcgtggatctgtttctatctctcctgtggtgtatgataaccatcgtggtggtgcgtcctgttcgaaaggtgtggtggtacccctagaaacctctaaccaaaaatctaaagaccgacctttcattagggaaattcctagcaaccttgaggtgcgtggtgactcaggtgaggctttgttccctgtgcaagaaccttccactctcccgctggaaggttttcaggttgaggggcttacgcctcggaagatggtcaaagttcagtcggttctggagagtttgagggttagaattgtcagggataatgggaaaggtgtggtaggagagaacaggaatcctttctctgcggacaaggtttattccagaagaaagaagaaaaaggattttggaactcgaggagaggattagttctgggtgcgggttgtgttgggttgtgattgttctcatgaagattttaagctggaatacaagaggtttaggttctaggaagaaaaggaggactgtgagaaggtttttaagtactcaaaacccagatgtggtgatgtttcaggaaacaaagcgtgaaatttgggataggaggttagtgagtagtatttggaaagataaaagtctggattgggttgctcttcctgcttgtggggcgtcgggggggattgtgatcttgtgggattcagttaagttcaattgttcagagaaggtgttaggatccttctctgttactgtaaaattgaactctgatgaggaagggtctttttggctaagctcagtgtatggcccgaataaggaagtgtggagggaggatttttggttagaacttcaagatctacatggtctaactttcccaaggtggtgtgtaggaggggattttaatgtgatcaggaggatatctgagaagatgggtgattctaggctaacagtcaacatgaggcgttttgacgagtttataagggaaagtggtttgttggacccccctcttaggaatgcggcttttacatggtcaaacatgcaagtcgatcctatttgcaagaggttagataggtttttgttctctgctgagtgggattcttttttctctcaaaatattcaagaggcccttcctagttggacctctgaccatagcccaatttgcttggaaactaatccttttatgtgggggccgactccttttaggtttgagaatatgcggttgctccatcctgagtttaaagagaagtttagagactggtggcaagagtgtacggttgaaggttgggaaggtcacaaatttatgaggaaactaaagtttattaaatcaaagttgaaagagtggaatacaagggtctttggagatttaagagagaggaaaaagcatattcttacggatttaggcagaattgatagaattgaacaagaagggaatttaaatcttgagctggtctcggaaaggatcttaagaaggaaggagttagaggatttgttattgaaggaagaggttcaatggagacaaaaatctagggttaagtggattaaagaaggggattgcaactctaagttttttcacagagtggccactggaagaagaagtaggaagtatataaagtctctgatttctgagaggggggagactttaaataacattgaggttatttctgaggagattgtaaatttctttgggaatctttattccaaacccgagggtgattcttggaagattgaagggattgattgggcccctatttctgaagagagtgcaatttggttggataggctgttttcggaagaggaggttcgaatggcagttttccaattgaataaggaaaaggcccctggccctgatggctttaccttagcagtttatcaagagtgttgggatgtgataaaagaggatcttatgagggtgttttttgagttccacactaaaggggtaataaatcaaagcacaaatgcgactttcattgctatggtgcctaagaaaagccaaactttcaaaatctcagattatagacctattagtttggttacaagtttatataagataattgctaaggtcttatcagggcgtttacgcaaagttcttcatgaaactatctttggctcgcaaggagcctttgtggaagggagacaaatattggatgttgtattgatagccaatgaagtgttggatgagaaaagaaggtcaggagaggaaggggtagttttcaaaattgattttgagaaggcctatgatcatgtggagtggggctttttagatcatgtgcttcaaaggaaggggttcagtcagaaatggagatcttggatgagggattgtttatcttcttctagttttgctatcctagttaatgggaatgcaaagggttgggttaaggcctctagaggattgagacagggagatcctctttctcctttcctttttactatagtagcagatgttctaagtaggttgatgattagagctgaggaaactgggataactgagggtttccttgtggggagggataggactagagtgtccttgttacagtttgctgatgataccatatttttctctaaagcctctttggatcttcttcaaaaccttaagattatccttttggtttttgggcaagtatctggtttaaaaatcaacttagaaaaaagcaccatttcaggtatcaacactaggcaggaaatgttgtctagtttggctttggttttggagtgcagagtgtcagagtggcctttgtcttatttaggcctccctttaggagggaacccaaagacaataggattttgggatccagtggttgagagaatttcgaggaggctggatgggtggaaaaaggcctatttgtctttgggagggaggattactctaattcagtcttgtctgtctcatatccctagctatttcctttccctcttcaaaatccctgtatctatagcttcaaagattgagaagatgcaaagggattttctttggtctggggccggggaagggaagagagatcacctaatcagatgagaggttgtcagtagaccaagggagatgggaggtttgggctttgggaagacttctatgagaaatagtgccctcttagggaaatggctttggaggtttcctagagaaaggagcggtctttggcataaggttattgcgagtatatatgggactcatcctaatggatgggacgccaacatggtggttagatggtctcacagatgtccttggaaggctattgctcaagtttttcaagagttctccccttttgttcgcctagtggtgggcaatggggagagaattcggttttgggaagatctttggtggggaaaccaaactttgtgtgctcaatttgctgaactctacagagttagttctgtgagaaaccttactgtctcaaacgtccttggcaactcctttccattgtcttggaattttaactttcgccgcaatctaacggattcagaaattgatctccttcagagattaatgtcctcccttcattctgtgcttctttccccttcatcatcagactcaagagcgtggtctttgtcttcgtcaagttcgttttcagtgaaatcttttttctatgccttgtcaaaagattcaaatcctttaatgttccttccggccaagtttttatggagctcaaaagtcccttcaaaggttaaggctctcgcttggttagtagcacatgggaaggtaaacactaatgacaagttgcaattgagaagaccctacaaagccctctgtcctcaatggtgcattctttgcaaaagaaatggagagtcgattgaccatctttttcttcattgtcccgtcaccattggactttggcacaggttgttcaatctagtaggtgtgatttgggtccctccaaggagcattgaggatatgttggttatttcctttagaggcttggggaactcagtaagaggcaagattctttggcaaattgcttgccttactttgatttggatggtgtggcaagaaaggaataatagaatctttgaggataaagggagaacggaagaggtggtgtgggatttgtttcggttttactcttctctatgggcttcttgtactgaagcttttagaggagttcctctaagtattctacaaatcaattggattggggtttgcgtttaaagagtttgaagattgttgggttttctcttgtttttagattactattgttgggtgttttccttggttattgtgtaggaaggacctctcatccttcccttggttttttttctctttcttttgtctcttttttctcttctgtatttgttcttttattaatataatcttcttcgtttctgatcaaaaaaaaaaaaaaagatttgtctcccttgaacaaaagcaccttgagtagaatggatagtttcatgtagtacacttctcaatcgccttgataagactttggctattatcttgtaaagacaagtgatcaggctaataagtcctaaagtctgaaattttttttgtctagctttttttgggcacaaaaactatgaaggtggcattggtgctttgattaattaccccgcttctgtgaaactctgcgaacaccctcactaaggcctccttgatcacatcccaacaatcttgaagcactgcaatggtaaatccattaggccccaacgccttattcccatctaactgaaaaatggctttagaaatctcttcttcagtaaaaggggagtccaacctaaaagcactctccgctgagatgggggaccaatctaagccttctactctccaagattctccaggaggactcgagtagagcttttcataaaaaagtaagatctcctccgtgatgctatcaatattattcaatactaaacctctttcattttccaaaatcttgatgaatttcctatttcgtctgccattagccacattgtgaaacaactttgaattgcaatccccttcttttacccatttcaccctagctttttgtctccaatgtacctcttacctcaatattaattcctccaactcccctttgctcaaagctctttgtgctgaaagttcagaagaaagaaccccctcttgctcaacagcatcaatgttagtaatatcactaagtatgctttttttcctttcctttagcactccaaaagattccttattccattctttcaatttggacttaacaaattgtaacttcctcataaacttatgaccttcccaaccaagtccctaaaaacctctccaccaacttctaaagcaatctttgaaactaggatgttgtaaccacatattctcaaacctaaaaggagttggtccccacttgaatggattggtgtccaaaacattgaggaaagaattgctcccactcatttgtgaaaataaatcggtccaatctcttacacacaggtgaatcttgcatgtttgaccaagtgaatggagcattccgtagaggggggtcaattaattcacaatctcttataaatccatcaaagtccctcatgctagaagttaaactagagtctcccaaatttattgaaattctccttataacattaaaatcaccgcccacataccagaaaggaaaggaaaggccaaaaaggtctaaaagctccacccaaaaatccttcctaagtaaggaattgtttgggccataaactgaggacaaccaaaggggtccacatccatccaacgaaaacttgattgagacagaaaaggaacctattaccacctcctcactttatagtttctttgagtcccaaataatcaaaatccctcctgaggccccataagccggaagagaagcccactttttattcgtaaccgaccaaacactatcaacaaacctcctgtcacacacctccctttttgtttcctggaacattacaacatccgaattctcaagacgcaaaaaatctttaaccacccttcgttttttcctagatcccaaaacccctagtattccaattgatgatcttcatgataaaacccttctaattctaaacctccaaaccagttcctaaaagtctcaaatacttgtggagattttgttcttccgcctagaatacaccttaatatccaaagaacttaagaccacacgaactctagccattttgctcggagaaagaccttttatttggaacccacccaaagatgaaaactcagcttcaactgggcaatctgtaacaaggttaggggccttaataggcaaactgggcagggtcttaatggagttaataccctcagacatttggttcagacaagctaactgggactccacaacatctaggttaggattgccaacaaaatcttgacatagagcaccattgtcattttttttggaaaacatttcagatactactcaagatttcgtaggagacagagacagaattactgagctgggaagagcgggatcagaagaaatcaaaggtggatgtgccaagccataggaggggggaaaaattgaaaaagatgactgaaaaagtggagaagaagaaacctcattgttttccactaccatcaatccacaagtccccacagaggtgagccctttttctctagttactggactagaaggaaaaaccaagactaaagatccacgatgagcagaacccccaaatccctcagagtttgctcaatctacaccgttagacaatttgcacaatttcgccttcccctttgattgaatagaagccttaagataagacctttgttgattatccgcatcacctcttgtcgacaaaaccccttcccctgaacaacttcttcggaaccctaacggacgactaaaagtgagaggactcgagctgaaccttcgcaccatctgtgttccctcttcgaaagcaatgtcctttggtggagcaacaaaagctgaatatggaaactcttgcgttagaggctcgcttcgtcttcaaaccccttgtcggcatccagaagttggaggattaagactaatccacaacttctttgaaccaaactttgtcatggaacccctcatttgtgaagaagagtcctcggaaactgacttcctctttccctttacagaggaatcttctctgcgtaaagagcccttcccagagatggctaaattccacccagttctttgcccaaagtcgtcatcgggccttttaatttaaaacccctctcccaacccaaatttgctttcaccaatggcttgggtttttgagaagaatggacctttccctcttttattgaacttgagtgggccttatcccttccgacccatacttcaccaaacagctttggcctaaaggacccaattctctttgtatttgagttcaaattacccggagaggacgattggaaatagctattccccacatccgcacttctcttgccatgtgccccctcagaggcctcctcagccttttgactttctactccaactttcaatctgtcaactaccccattataagaccaacctttagccattggattagccttctcaaccagccttctgctacctgtccacgagtgagactcataatccctctaagttgactcacccatttctctaacccgtctttcgtcttcaactccaaccacaacaactaatattgtaaaaacccatcccccatctaacaccgcaatcaatgtagggagaattgaacgttctttcactaaaattctcacccttgccttacaaagatcatacagtttcaacgttcgccaatcgatctctatcaccgtcccccattgctccacaattttcttcagatgttcttttgaccataatgaaagagcaaaccccgtaattcaatccatcctcctctaaaattccccacaacttctgagttttcccttggcgaccaccttctcaaatgggttgtataccctcccttaatcttgagaaaccttaactcctgaagagagaagacttcctcaagagtttctacaaaaaataaaccttttccgacaaaaaaatggacgatagtcaccatgcctttttgccctaagaatttcgctagagcacgaccaacctcagcccaattaacaaaagaagcaggacattcacaaaccatagctctcgcctatctcccaactggaacaaggcctcctctccttggttcttcctctttgactacattcacaaaggaccgacatgtttgtaatttatgttttcaaccctgcactgccttttcttttcacctatattcgaggaagggaccaccagtattgaagaaatagcattttttagttgttctcatcccttgccttgctcgccctcagggattaccaggaaagttgactttctattggaggcaaactccaaaagccttataaacctaccatggttgttgaagcaaacctccattaaatgaactctggactttcctctatattttctgttgaaacccatgtaactcttcagctcgatagccttcgccaaatgttcgatcaaccagccagcctcttccttctcaaagcctaagacaaaaacagagcctttactatgctctgtaagcaagcaccaaataccttcggactcaccttcaaacctaactaggaaggtcttcttctccatagagaacttcagcgtcctcaccatgatgcaacagttggaaaataaatttttattaatcctctttgcatcaatttatgcttatatgagaaaagtattagggagttaatttcttggtatcttcaatcagatgagtcagcatctacctccttagattgaaatatggtaacaaacattttgaatttgataaaataatattgctttatgaataccacattttatttagaaaggtttgaaaatatggtaaggacgttgaaggtctttgtggaaaagaagaccttcttggttaggttggaaggcgagcacggaggaaactggtgctcgattacagagcacagtagaggctctgcttttgtcttaggttttgaaaaggatgtagtggggtggatgatagaacatttgacgaaagacatcgaaatgaagatcatttggggttcaatagaaagttcaagggaaaattatttgtccatttgatggaagttggcttcaacaaccatggaaggttcattaggatctcggagttcactaccaacagaagatcttttttggttattcttgagggcgagaagggcagaggatgggagaatcttaaaagcgcattgtcttcaatgctagtggtccccccttcgaatgcagttgaaaaaggaagacaatacaaaggggaaaggtttatccacaatcacgtgggtcctctacacaggtccttggcaaatgtagtcaatggtaaaggaccaagaggaagtggtttggttcctgtcgagaggtgggcgcgagccgtggtgtgtgaacacaatgttgatagcgttaaatgggttgaggttagccgagcggtggcaagaagcttagggaagaaaagagtagcaacgattgtacccatctcaggcggaaaatgagtattttttgttgaaacaatagaggaagctctctttctccaaaatttgaggaatattaggtttgagggaaggaatacagtctagttgagaaggtggtcgttgaaggaaaattcgaaaatagaggggaagtttagaggaggctggatcaaattacaaagggtgccatttcatctatgatttgaggtacacctgaagaaaattgtggagcagtgggggacggtgactgaaatagattagtgaacattgaaattgttcgatcttagcaaggtgacggtaagaattgcaatgaaggatagatcagttcttccagctttgatcgaggtgacagacgggggttgggtgtttacaatttcagttgtagtggttggagttgaagacgttcagagaggcagcgtaatgggcgagtcgactcgggaggcttttgcatctcactcggggacaggtggaggaaggcgggggggagagaatcagatcaacggttgggggaagatgtcgtgtcggggaagatggcagaatgaggaagtgaggagaaaagagtatggctgttgtttttccagtggggaaacgtggtaagagtggtcaggatgtggggatcagttggttcctaccaccatcgatgcccagtttgaattaaaaaaaatggacgatgggccaattgggactgaggaggcgggaggagttagggccagtggggatgaggtctccgctgatgagggctgtcgagcctatgagaggaaggcctagtctttgtctaagcctagtccattaattgcaaaagtgggttgcaacataaaaagcccgtcggggttgggcctaagcttaggaggaaagaagccaaatgagacggaggttacattacgaagggaagaagattcttctacaaagggaaaggggaaagcaacatctgtacttcctgaggttcaatcgagtagctctgcgaagaaggaagtgaagtttggttcaaagaagctatggactaccctatttcctccaagctctgatcgccaacaaggtcttcggtgtcgcagtgagcctcttttgcacgggaagaatccgacagacagcgaagagtttccaaaggaagaggctttcgaggccgaatcttgggcggaacaaggatctagtgcgagtcctctcacttctcgtcaatcaccaaggttttgtaagagatgcttgggggaaggggcttcgtcgtcaagagacaaagtggctttgagcaaactttcctttgacgaagacaaataaggatttttaggccgagtggggtccgatcttcgtggctcagcaatcacggttttgccctctacgccagaaatcagaggtaaagagcttagctttatggggaattatggtttattggtagcggaaaatttggaggtaatctcgttttcacctactcagtcacccccgtcttctacatccccttcttgtggtttggcttcttcttttctgagtccttctgttcccaatcttcccaattcagcctttcactctcagtttcttatggaaaatcgagtaacctttgaatttttttccaaaaaagacgatgttggtactgtaggtcaaatttctgttgccatccataatcttgtagtggaggagatccaacctgcttatccataccaactgaccgagagtattaacccaattttttctaaaccattttgcctaataaggtctccaacttggttacagttagcaagggtgttactgcgagctccctatcaggtgagttcaaaatagaaggcccatcccctaagaaaatggctaaagcgcgtgaggttttaaagtctctggatattaaggtatattccaggaggaaaaacaaatgttccacaggtttgtgagacttgttggaaatggtttggaggattagggtctgtgagttttttccatgaagataattagttggaataccaggggtttgggttcaaggaaaaagcgaagggtggttaaagattttctaaggtcggaaaagccagatgttgtgatgatgcaggaaacaaaaaaggcaaagtgtgatagaaggtttgtgggtagtgtttggacaatcagaaataagaaatggacacccctttcggcatgcggggcttcgggagggattttgattatttaggactctaaaaaactgcgcagtgaggaggtggtaataggttccttttcgatctcagtcaagtttgcattgaatggatgcggaacgttatcgttatccacaatttatggcctaaatagcacaacacttaggaaggatttttgggtggagctttcagacatttttggactttctttcccgttttggtgtgtaggcggcaatttcaatatcataaggagaagttcagaaaaattgggaggttctagtttaaccccaagcatgaaggactttgatgattttataagagaatgtgaattgatagattcacctttacggagcacaccattcacttggtcaaacatgcaagagtctctcgtatgtaagagattagatcgatttctttactcaaatgagtgggaacaattatttcctcaaagccttcaagaagttcttcctagatggacatcggatcattggccgattgtcttggaaaccaatccgttcaagtggggcccaacaccttttaggtttgagaatttgtggttgcaacatcctagtttcaaggagagctttagaagttggtggagagattttcaaggaattgggtgggaaagtcacaagttcatgaggaaattacaattttttaaggccaaattgaaatagtggaataaggcttcttttggaaagctaaacgaaaggaaaaagagtattctgatcgaattagctaactttgataccatgagcaagaagggggtctcacctctaaacttttagttcagagagctttaagaaaatgggagttagaggaattgattttgagggaagaaactcattggagacaaaaagctagggtgaaatgggtcaaggaaagggattgtaattcaaagttttttcataaagtggctaatggcaggcgaaataggaaatatatcaaggttttggagaatgaaaaaggcctagtgttgaataattcaaagagcatcaaagaggaaaccttaaggtattttgaaaagctctactcgagctcttctggagagtcttggtgagttgaagacttagattggtcccttatatctggagagagtgcgtctaggttggactccccttttactgaagaagagatttctaaggccatttttcagttggataattataaggcactggggcctgatggctttaccattgcagtgtttcaagattgttgggatgtgatcaaagaggatttagtgagagtgtttgcagagtttcacatgagcaggattatcaatcaaagcactaatgcttccttcatagttctattacccaaaaaaacatgtcaaagaaaatctcagactatagacctattagcttgatcactagtctttacaagataatagccaaagtgctatcagggcgtctaagaggggtacttcacgaaactatccattctactcaaggcgtttttgttcaagggaaacaaattttggatgcagttctcatagccaatgagatagtggatgagaaaagacgatcaggggaggaaggagttgtcttcaaaattgactttgaaaaggcttacgaccatgtgagttgggattttttggatcatgtgttggagaagaaggggtttagtcttagatggaggaaatagatgagaggttgtttgtccacggtatcgtttgtagtcctaatgaatggaaacgctaaagggcgggtcaaggcatatagaggtttaagacaaggagaccctttatccttttttttgttcactttagtcgtagatgtactgagcaggatgttattgagaacaaagaaaagaaatgcctttgagggttttagggtgggtaggaacagaacaagggtgtcccatttgcaatttgcagatgataccattttcttttctagcacttgagaggaggatatgttgaccctcaagagtgttttgctagtgtttgggcatatttctaggctgaaggttaaccttgacaaaagtaatatttatggcattaatcttgaacagaatcatatttctaggttggctgaaatgcttgattgcaaggtttctagttggcctatactctacttgggtcttcctttgggagggaatcccaagactcgtggcttttggaatccagtgattgagaggatctcgagaatattagatgggtggaaaaaggcatatttatcttttggaggcaggataactctcattcaatcttgcctcacccatatgccttgttacttctgaagaatttctgaactcttttattaatattaatcggtacacaccatacacatatatatacacaaataactgaataagaaaaaatcaatctagcttaattctctcctaaaattaggaaactaaatcataaggaaatatcctaaatgatctctccttttttattcctaaattaaagtcctaactttggcattatttcaacactccccctcaagctggagaatatatatcatataatcccagcttgcaagttaagtcttcgaagttaggcctaggtaaagctttggtgaggatgtctgcggtttggtgcttggtaggaacatagtttaatttgaccgtctcactagtcaccttctctgtgataaagtgtctgtcaatctcaacatgcttggtcctgtcatgatgcacggggttctttgctatgcttatagcggcctgattatcacacatcatcagaattggagatgaactcgtttgtcccagttcactaagaaccctttttatccaaatcccttcacagattccctgtgcaagagctctgtactcagcttctgcactacttctggctacaactgattgcttcttactcctccaggtaacaagatttccccagacaaaagaacaatatccggaagtggaccgcctgtcaatgatgtttcctgcccaatccgcatctgagtatactttagtgtcacggttctctgtctttctgaagaataggcctttccctggtgtcatttttaaatatctaagaatcctgtagactgcttccatgtgttcctcagtggggctgtgcatgaattgacttacagcactcactgcaaagccaatatctggccgagtgtgtgagagataaatcaagcgcccgacaagccgctgatatctccccctgtctaccggtgtactttctttctcgataccaagtttcttctgactatccataggagtatcaattggtttgcatccaagcataccggtctccttaagaagatcgaggatgtattttctttgagagactacgattcccttccttgatctagccacttccataccaaggaaatatttcaaatttccaaggtctttaacttcaaactcttctgacaaatacttcttcaaattctgtaactcccccatatcatttccagatagaataatatcatcgacatagactatcaatatggccaatttcccggcatgagacttcttgacaaatagagtatgatcagcctgaccttgtttgtagcccagcttcaggactgcttttgtgaatctatcaaaccaggctcgaggagattgtttaaggccgtacaaggatttttggagtttgcaaacctgattctttgccatactttcttcgaaaccaggtggtatttccatgtagacttcctcttctaggtccccatttagaaacgcattttttatgtccagttgttgcaagcaccaatcttgattgacagccaatgagagaaggatcctgatagtgttcagttttgcaacaggagcaaaagtctcctgatagtctatcccataggattgtgtaaaccctctagctaccaaacgagccttgaatctttcgactgatccatctgctttgtattttatggtgaaaatccacttgcaccccacaggcctcttcccaactggcaaatctgtgatagtccacgtcccattcttctcaagtgcatcaatctcatcttgtactgccttcttccattctgaaatttttaatgcctcttgtattgtgttgggaacctgagtatcatcaagagaagtagcaaatgctctgtaagatggtgataacccttcatacgtaacataattcccaattggatgatctgtacatctcctaacacccttcctcaatgcaattggcaaagtagaatcatcaatgctgggaattaacacctctccagccctatcctcacctatgttctcttcaggaagacttgaattggagtcaatatattggccacatgttgactgtgatccgtgctctaattcctgtcttttcctcctcctgatgtaaacttgtaagttctcattagcaagttgtggggctataggttgaataggcatgggagactggatggtcacgggagaaggaacatttgtgtgctgggctggctgaactgatggcggcatgggtgtggacaactcagtgggcgcgaattgggaaggatttggtgactctgagtgaaaagaaggtacaccctcaagaaaagactcccaaacttgatgttcattcatgctctccccctgaacatgagatttgggatagaagaagacatgttcaaagaaagagacgtccatggtggtgtaaaatcttttgttggttggagaatagcatttgtaccctttttgggttggagaataccctagaaaaatgcacttatttgctcgaggagcaaatttgctacgattttgaggatacacatgaacgaatgccgtacaaccaaatactttgagtggtaaatcagaagaggcggcatgggtgtgaggaaactgttttaagaaaagttgacgtggggattgaaaggtaagcactctggatggcatacggttaatcaaataggtagctgtgagaatagcttccccccagaaatagtttggaacattagaggaaaacataaggcaccgggcaacctccaagagatgtctattcttgcgttcggccaccccattttgttgtggggtgtcaacgcaagaacttatgtggataatgccatgattttgaagataagtactgagactactagtaaagtattcctttgcattatctgacttgaggacttgtattttggaattgaattgattttgaaccataagattgaaggtttgaaaaatgtgcccgacctctgacttttctttcataaggaaaacccatgttacccgagtatgatcatcaacgaatgtcacaaaccatcgagtgccagaaatattttttatccgggagggaccccacacatcactatgtactagagagaaaacagtcgaaggtttgtatgggatttgaggatatactgttcgagtatgctttgcaaactgacaaatttcacagtgataagatgctggatttttattgataaataatttgggaaacaattttgcaaggtaaacaaagctaggatgaccaaggcgatagtgtaacattataatctcactatctttattgaccttagaatttgacacagaattgaaagactctaacatactctgagactggacgcaacttgcttgagagacttgatttgagaattggccacatgaaaggaggtagagaccggaacacagttcagcactgccaatcatcttccccgatttcaagtcctgaaaaacacacaagtttggatagaatttagtaacacattggagatcatgagccaatttgctaatggacaaaagattacaatccaagtttggaacatggaggacagagtcaagatataagtctttagtaagttttatagaacctgtcccgacaatttttgactttgaaccatcagcaatatggacggatgaatgaccattacttggcttgtaattttgaagaatggcagcatctcctgtcatgtgatcagaagcacctgtgtctactatccacggcctcattcctcctcgattagcagtgaaggctacaccggtagtactgtcactgccaacttggcttaataatttctgtagcatctccatctgctctttgttgaatggactcggctcgggaacagatgtgctctcagagttggcagccacgtgtgctctgccatctctgtcaaaccgtggctttggtttccaatcagcaggtttgccatgaagcttccagcaagtctccttataatggcctggtttcttacaataatcacaccaaggcctatcccgtttctgacgatctccaccactactattaaatgaccgagcagcaagggcagaggcatccaatgttggggcaggttgctcttttgatcccatcatcactttctttctactttcttcacgcctaacctctgaaaaagcctccctgagacttggcaggggtttaatgcccatgattcggcctctaacatcatccaattccctatttagtcctaggaagaacttgaacagtctcttttgttccacaatttgcctgtatgtagctgcatcatccgaacatttccatgagtgagtctcaaataagtcaagttgctgccaataccttgtgagtgtgttgtaatactgagtaactgactgctctccttggcggaagtcatgtagagctgattcaacctgaaacagttctgaagtattttcagaacttgagtaagtttctttggctgcatcccatatgtcctttgcagtcccaaacagcaagaaattttcgcctatgtcattgttcatggaattgataagccatgacatgatcatgctgttttcaatcttccacttcctgaaacccggttctgtagtttctggcatgactgcttctccagtgaggtactcatcctttcctttaccgcaaatgaacagcaacacagattgtgaccactgtaaatagttatggccatttaatttgtgtcctgtgatgagaataggagaggaatcattgccaccaaggtttggaatttcagatctgccccctgattctggtgacgtgacgctggatacttgtgatgatgccattccgtattttgtcatggaccggaaagatagaagaacacttctcaaggcacgtgcagggactggagttgagaaaaaatagccggaggacgccggaaaatctgatcagagggcccgcggaagcaaaagaaccccaaaagaggcacgtgtagggctcggattgcacaaacaggtaggaagggtggctggtcggcgtcaggcgagcctggaggaggaagcgcgtcgccggaaagtggctcacgcgccctcacgcgccggcgcgtgagatgcagtcaccggccggaaaaacgcgcgtgggcggcgcgtggatgggtttctggctccggtgctttgggacaaattggagatctcctccaggcgctccttgcgatgtagaaaaaaaaaaccctcgccggaaagttcgccggaaaaagttgtcggcggtgagtgttttctgacgacgagtcgactgaccggaaagcgttttctcccttggctctgagaatagggactgatgaccggaatgagagagagagagagagagagagatgattggattgagatatggccagagagatttggccggaatgagtgatggcctgaataagaggtggccagaagggattagggtttcagaaaactggctctgataccatgaagaatttctgaactcctttattaatattaatcggtacacaccatacacatatatatacacaaataactgaataagaaaaaatcaatctagcttaattctctcctaaaattaggaaactaaatcataaggaaatatcctaaatgatctctccttttttattcctaaattaaagtcctaactttggcattatttcaacaacttcctctccttgtttaagattccagcctcagtggcagcaaaaattgaaagattgcaaagagattttttatggtcaggggttggggaaggcaaaatagatcatcttgttagttgggatgtagtgtgtaattcgaaggcaaaaaggggattgggatttgggaagatttctataaggaatttcgctctcttagggaaatggttgtggaggtaccctagggagggttcagctctgtggcatcaggttattttaagcatttatggatcacactccaatggttgagatgccaacactatagtcagatggtcacatcattgtccttggaaggctattgcacaagtctcccaagagttttccaagtttactcgatttgtggtaggagatgggaaaagaattcggttctggaaagacttgtggtggggggaccaacctttgggagtccaatatccaagactatttagagtagtcatgaataaaagtattcttatttcttcaattctcggctatactcgccccttctcttggaactttaactttcgtcgtaacctttccaattctgagatagaagatttaggaggcctcatgcggtctcttgatcatctacatttatcacattcagtttcagataagagatcctgatctttatctccttcaggactttttacaatcaaatctttctttcttgccttatcccaattttttggttttcctccagttttccctaataagttcgtttggaattctcaagtccctttcaaagtcaagtcctttgtctggttagtggcacacaagaagataaatactaatgacttgctacggtcgagaagaccctacaaagcacttagtcttgatatttgcaagttgtgcatgaagcatggagaatcagtagatcatctttttctccattgctctttgacgttggggttatgacatagattatttcaattagccaagacggattgggtccccccgaggagcatctctgacatgttgtctaccaattttaacagttttggattttctaagagagagattgttttatggcaagctgcatgcatcgctttaatttgggtagtgtggcgggaaagaaatgcaaggattttttaggataaagcaaggaattcagagaacctttgggattctattcatttccttgcttctctttgggctttttgttccaaggtttttaaggggattccccataacgtgttacaacttaattggttagcggtgtgtaattccaatgggttggactaacctagagaatttgcttgtttttactttgtattttcttgtatttgattccttgtagttttgtttttctttggtgtgaggattcctcatccttatcttgtacttcctttttatcaatatatctctttgtcgtttcctatcaaaaaaaaaaaaaaatgaataccacatttttaatatcaatgctatttgcatttcattcttaggattattggattatgaacttgtatttggctatgattgtcttaaattgtcaagcatatgttagtgaaatttttgttctttaatcatatcactgaacactctttcttggggcaactcaaaattcaaaataatgtgctaatatccattcaatgctcatgaatgtccattatttgaaaattgaatgcagaataa

SEQ ID NO: 12242 - DNA, 6453 bp, Vitis vinifera
  Intron number 13 from transcript GSVIVT01037287001 (locus GSVIVG01037287001) derived from phytozome v7.0 (chr-ID chr 6; pos 16463225 to 16469677)
actataaggtttcctctttctctctctctctctctctctctctctatatatatatatatatatatatatatatatatttgtgtatgtatgtgtgtgcatgtgtgtaagaatgatgatttaagaattgatgggccattgagacctgggcgagtaactatcccattggtttgatctctatatataggggaatgacgttcattcttttagggagaaaaaccacaatcttttaacaggttcctcccattgtttatatcaaactttagtctgatggttgctttctgggtaatatgggtagcttgggaattggggactttttcagagatctcaaggaagtcttgctttaaagctggctggatgtgggagggttgttaaaacttactatcattacttgaggaatttaaaggaggctctattgttggttttaggaagtatgttggtagaagaggatgagagacagattctgaattggataaaaaatggagatgaaggaaggccccaggggtggaagaagatggtttgctgtggagtccaaatcttttgagcttttggttgacaacataggagggaagttgagagggtgcatttgggagagatgcagaggctatcttcttggatcagatttggggatgcaagccttagtagtttgctggatggagttgagacttgctgtagagggagtgacgatagaagttagtcccttgtttgggaggagggggggaaggaagtataggctggagtgtcactcaaatgaggcgggaagatttcttctttgctctgttcatgatttagaggcaaaaagattttttctaatttttctagaagggaaggggttgattggaggctggaatatcttggcggagaagttgagagagactagggtggttccctctggaggcttaaaggattcttgatcccttgaggtgtttaggaagaaaaagagttggaactaaggacttttgcggatgttgaaaaataaaaaacgggtaggttagaagacaaagtctggttggagttggggaggagggagatgcaaggaagattggaacagttggctcgctgtttagtgcgtcggtgggaaaacttctctattcctttccttgggttggattttctaaagagttgggcttatcaccattggctcctcaaagggagttgaacatagctgtgttgggaagaggacttctgctatttgagtttgagttgttaagtgaggttgagcgagtcttagccagaggcaagaggagagttaaggagaatgttttatttttggaaaaatggaacgtggaggggggtgcttttgtaatggagccatctctaatgaggcttgggtgagggtggcgggtatccctcttcatctttggagttgcgagctgtttaaattgatatgagatggttgtggaggtttcattggagtggatgagaatacgacttttatggcagagttgcaatgggctagaattttggtgaagttgtttgatagggatttgcctagctctgttcagattgtggttgggtcggggagtttctccattcaactatggtgggaaaccccgccttggttttctcaagtggtgccggcgggaagatatcttggggtaggtgttttagtggacgaagatgaagctggtgggggaagaccatgcgccgtgtgtagtggaagcttgttggaaaaggagtttcagtccaaggtgcaggttggggtacaagatgtgtcaccctctggaagcttttcaaagagtgttgcaggcttttcctctgcatcctcggcatcctctgcagggtactgtcaatggcactgaggtagttgttggggaaggaagcctagtgaataggggtcatggagtacaaggtgcaagtttgggtacaagacgtgtcaccctctggaagctttttaaagagtgttgcgggcttttcctctgcatcctctgcagtgttattgtcaatggcactgaggtagttgttggggaaggaagcctagtgaataggggtcatggagtaggggggtgtcgatagattgggtgggcaatttattgggcgtgaggagcttaaaggtgggtctgttcatttggaggcccagaacaaaattgggcttggggaggttagaagtgtgcctgttcacatggtgacccagtcgcaaggggcggaatctcttttaaaaagaggttgggaggaaagtgagccaaggccctttcttttaaagggcactttggcaggcttcgaggagaggctcttctttttcagggctctttagtgggctgcaaagagctgttcggtttgggctttgggctcagagaagcggggttagagggagtgagggttcttaattcatctgcgtttgttgagacagaagctagagcactagaggaggcttcgtttgttcaagataggaaggataaggggctcgtttgctttctcagaggggctatgagggaattagagttgctcacggtgaatgttagagtggagattactgatgaagcgttggttggcgaggcattcaagtacgagtcctctccctttaactttgtgggggttcggtatttcttctcttctactccttcccttgggtttgttttggctttggtggtgggggagtcctctggcttgggagggttggctgccgtcaaatatgttggttttcaggctccgttgagtgttattttggctattggtagtccgtgggtgatggagacagagggggaaaagtccttggctgagattggagtgggtagggggtgggggggaaggcttgcgcttgatgagccactgtaggaaaggggggtttctagcagtagttgggatgatagttgtttggtgaagttcaacaaatctttgggattttcgacagaaggtgttgaaggggaaatcctaaaattgcttttaagactgaaaagtagaagagatgaaggcaagaagaggggaatttcaaggactattaggattgaatgggaattaaaaaagttagaatgttcaattaattatgatggggttaacaaggagaatggttcgaacagaggtggaggggatagggtttcatgttttaaatgaaaattaagatcttatcttggaatgttcgaagggttaataacataaataataggaagataatcaaagccttaatcaactctcaaaaagtggatttggtctgtctataggaaactaaaatgcaggacatgtctttagtggtggtgcaaagtctaggagtggggagctttgaatgctaggggtgctgctagaggggtggtagtattctgggataacagagttttggagtcgataaggatagaggtgggcctcttttccatttcctgtcaattcagaaattgtgaggatggtttcatgtggattttttcaggtgtctatggtcctactatgaaaagatatagaaaatttttctaggaggagttaggggtcatttgtgggctttggaatgacccatggtgcattggaggagactttaatgtgataagattcccaagcgagcatagtagaggagggagggtgtcttcttctatgagaagattctcgaagatgatcgatgatctagatttgagggatctccctcttcaagggggcccatttacctggagtggtgggttgaatagccaatccatgtcaagattggatcggtttttggtctcggaggattgggaaagccatttcaatggggtggtgcagtgcattcctcccaggctggtgtctgatcactttctcattctatttgatgggggaggggtgaggagcgggccaaccccttttcgattcgaaaacatgtggtcgaaggaggaggggtttaaggatatgttgaatagatggtgacaaggtttcaatttcagcaaatccttcagctttatccttgcagagaaattaaaggctttgaagtccaatttcaaaatctggaacaaagatgtttttgggaaggtgggggtgaataagagtttggctcttgacaaagtgtcttactgggactctcaagagaagttgagatctttatcgatgaaggagttggaagctagaaaggaagcaaaagagggttttaagaagtgggctcttatggaggagattttttggaggcaaaaatcaagagaagtgtggctgagggaaggtgatggagtattggtcactcattttgttgtttgctgatgatatgctggttttttgcgaggcttcctaagatcagatgactgatttaagttggtagttgatgtggtttgaagccatctcaggtttgagaatcaatttggataagagtgaaatttttccggtagggagagtagagaatatggaagctttggcttttgagtttggttgtaaagtggggaggctccctacaacttacttggggcttcgattgggtgcgtagcacaagttcgtggctgtttgggatggggtggaggagagattttggaaaaggcttgccatgtggaagagacaatttatctctaaaagagggagaatcactctgattcgcagtactttgtctagtatgctcatttacttgatgtctttattgcgtatttcaagagtggttagattaagattagagcaaattcaaagggatttttttgggggagggggagttttgaagaggaagcctcattttgtacagtgggataccgtttgttcagacaaaaggaagggtggtttgggagttaaacgtctttctactctccatagggcccttttatgtaagtggaactggtgctttgcgaatgaaagagagtctctttggaagcatattattagtaggaaatttggggaggaagaagtggcgtggtgtactagggaagtgagggaggggtttggtgtgggattttggaaggaaatcaggaagaaagggtctcttttgcaaaacaaagttgtattttctatgggggatggtagaagagtgaaattttggaaagacaaatggtatgggaacattgctctttgtgattctctcccttctttgtatgccttagtggcttctaaagtggcggctagtggagttgtgggactcaacgggcgaggaagggggttggagtcctaggttctctaggcccttcaatgattgggaggtggagaggctacttgtgacaatacaaggaaggagacttaatcctaatttggaagatagggtgctttggaaagagactaaggacatgattttgttctgtcaaatctctttatagtgctctagattcaagaagtgctgttcagtttccaaagagcatcatatggagtccttatgttcctactaagtgggtttttttttgcttgggaagcctcttggggtaaggtcttaacttggatcaacttaaaaagagcgggtggactttagctaatagatgcttcctttgttgtgcggaagaagagtctattgatcatattctaattcattgcaccaaggccagagttttatgagagttattgtttgctcttttaggagtgatgtgggtccttccttattcggttagagatactcttcttggttggcatggtatcaacatgggtaagaagcgtagtaaggtgtggatgacaacccccttatgtcttttttgggtggtttggaaggaaaaaaatagaattgctttgaaaatgaggagctttcaattcataggatgaaaaattctttgtatgtaatttttggctttggactaagtcaattatagatgaaggacctctttctttaatcaacttttttgattggttgggttttagatgaggattggtgatttttttaatcccctcttctttttgttcttgctttttggcacttcttgtatacccctgtatgctttgggtcagccttaaggcgccctttcttctaatatatattttttctgtgtgtttacttaaaaaaaaaaaatcttggtagaagagggactcttcgataattacttcttaagcttccacagaagggggaggatcccagagttcactggatgtggggaatgcaattggtttgttacctcgtcagcttccacagaaaggacaggactgtggctttatgatcattgagtgtaggatatgccagggaatgttgttttctttatttggaagcctagagtagctaattgggaggctgatagcttgattaataggagagcctcttcatctcttgagtttttggggaacttcctccctcctcattggtgttcaggtttttagaggtagcgtgcttcagtgtctataatgttttcttgcttgtgagggagggaggtttctatggtctgacagccaatattgttccgatggataaatggattccagatatacttccaagcatgtaatggtctgttccagtattttctgcatctctataattatgaagttgtggttgtacttactgaataaaagaggtggcaaattgatagtgtgtcaattcctttatcttttgctttttgtcactgtatttgttaatttttattgacatttacattcattttataaacttgcaggcatttggggttg

SEQ ID NO: 12243 - DNA, 8116 bp, Vitis vinifera
  Intron number 3 from transcript GSVIVT01026351001 (locus G SVIVG01026351001) derived from phytozome v7.0 (chr-ID chr4 ; pos 14624099 to 14632214)
ccacttatcatttcaattgtctccttagtgtgcaggtgagttaatagaattttgtttcatgactttgaacttcttacatctatctgtttagcttattccttcaaagaagtcaggattacatagtttagatgtctaattataaatacaccaaataagtaatgtgggtgtaattatagatctttcaaggggtttggcttgctctttcacttggatgtgttactaactagggagcaaataagctgattaagcctagagcctcgtgtttgaggcagttgttagagattcatgccttcctaagtattatctgcttgtatgatctttgctgggtgcaacatggttcttgccttattattgtcattttctttgtctctacttgtactttctccttttggtcaagtggcttttgagcctataagactctaagcacacctgagcaccttcacctgtgcaacagtcaatccagttgaggcactattttgctatgcaatttaggaggaaacatagaagattgcagtttatgatcagacaaagtagcaccaatgaagaaggtgaaggattataaagaacatattggcatctacactaaggaggttggacctaggagggagttttggtggtaaatcaaagagggggatacgaaaaagttgaaatctcaaatggaaggaaatatttactgtaaagctgggagcattctaaatgttcaggtagcagaaacataggcaatcttttcaatgatgctttaataaatttattacatggaggaagaaggttcatagcttgaaattggaagggtaaagggaagagtttgtaattatagagtgttttatattttgaggctcaataataggcattggggaaactttcttgcaatggtgtattgttctatcatagagaattctttttttttttttattcttttattggctttgaatggatattgtggttgcaacacaacttcaaaatgctttcaatttttctttattttcctttttatatgcaaacaagataaatgtattgacaacatgtaacaaagactgcactgaaatacacaagtcgtctacaaagatgccatgaagcataggagaaaaagaaacgacataaaaaataaagggcccttcataaagatcctaatcaatctataaaatttaacatggttagtgaaagtttaagatcttctattgtgtaactatctagaggagggtgtttatttagcccaaagataatttttttattttttattttttatggattgtttaattagattgatagttattaatcaattcaagaatttcaatcgcacaagtacacaaatgatttatgtggaaaattacccacaaagcctttcatagactttgtggatgtaagaatcatgggattagagattgcagagttgaaatccactaactatgaagaaatggatgcacaaatttacttggtagttgctactgcctgagacttacgctgatagtacctacacatactttcatgtccactatgcgatacctttgtgctcactcttcaacaccttgaaggaatgtaattctctatcatgaactcaatgaacaattataaatactttgagagtgtcgggttaagcaccaagagtaatgacataaaacttaggtgcataaaaagtggaattacttaatattaggcatatagatataggataaaccctaatgaacttgaactcaaaataacaatcaaattttaccaaaattgaaattggaatctgggagaaatttggaaccttggaaaatctggacaatcccatcttgagccctcttgcacttgttaaggccactggagggtgagcgttgagagtgcttgagtggcccttgtgggcacttgagtgctctaattaaaatttctattttttgaattctttaaatgtccatttccttttttctaatatacaatactcaaaaaattatttgtttccaaaacaattatatttttttattttcatacaagttcactttatgtcttttacgtcattattatgaattaagtcaattatgcttacctacttaatcctgggttgatttttcagcaactttcagtcctcaagagcaatgtaaactataggaaagtgcacaaagtcctaaatcatgatgaataaaacaaaattgccaacttaactaatgcaccaacagttagggaactcccagttatgtacatcttaattcacaacaaaggattacaaagaaagatgaatttcatctcttgattaaatatttctttgctttcaaaggatctacaatttcccttcatccataatgactgaagaacacatggcagtataaccctttagaccaccttctggttttttatccacaaaagaacagtgtcactctaaaaaggtttctcttaccaaacttgacatcatccatgcaaccttaaacaaagacaatgttgaatttgataacactctagctctagcacaatgcaaaaggatgtgatctattgactattcatcttccttaaagagaatacattgattcaccaaagactattttctcctttgccgctaatacaaagtcaaaacctttcccaagaagctttccatgcaaaaaaagaagaagttatcaatactgaaattttcccttctttgcatccatccattccatcatgtctttctcaggtcatcttacagccttaccttgaagccttaagaggaagaccttcccatttaacacaacttaagaatatatatgatgctatgacatagataatgggttgcaacccaacctaaggaattgttaggttcttttggataaaaagtcagacttgtacatgtgctctgataaaaaaaagagacttgtacatgtgttagttgctcttgattgccaaatcttggatgacagtgtggctattttggctcaggctcaatgtaatgagatcatggaatgtccaatgagataaaagtagagactctgactttaagaaccagtaaaggggtggtttctgggtgggggaaaagattgagggttgagttagtgattatgggaattgattaggttattggattatactccagaagttgtatttagaatggaaggttcttttagggtattattgtgtgatattatcagggttgaattggtggtttaggagggtgaagatgaagaatcagattccagttttagatttcttctttaaagggttttagaatgatgttgcctgttattcttggttattgaagttaaatagcgtcatggtgatgatctaaaggttacaagctaaggtagacatggggaggatatgctgaaaagagaatggaagaagcttcattgttgtatatatacaatactagattgtgttaacttgcactaattgatggagcttattaatgtcttggtgggtgaatgggttgaatgcttgggaaaagaaaggttttggtttaggcagctcaagcattggaaaattaatgtggtatgcttcaagagactaaacttgagacatttcaagtggagattgcttaaagtttgtctagatcatgttttagaggttttgtggcttaggtgctagtgggacaaccaatattgttctttatgttggtttaaaaataaatcctaaaggcaatgaattcaattaacatatttgaaatgaaagaagttgaacttcatttcctttaggggttgaaaagaaaccaatctattattgtaaaataaatggaaaaaaacacttttgctatcatggcatgcatcaatcgcacataaagattaatctattaatcattgattagtaagatcaaaataataaaatggattcttatagccaatcttttttttttttttttttttgataagcaaagcagagaatatattagagaaggccaaaaggccgcaccgaatacaggaggtatacaaagcagccataaggccataaaacaaaaacaagaacacctcaccagcccttaggggaccgctacccactccaagaagcctagaagtaaagaggactcctctcccctatacaacttagtccaactccacagactacatacaaaagaattcttaagagtctgaatagtcaaaagaccccctctaaaagctaacctatttctttccttccacaccgtccaaaaaatacatagtggaatggtcttccatatcttcttcctttttttacccacaaaagggccccgccaacagaataacgcctctttgaccttctctggaaacacccactgaaccccaaataaggcaaaggcgatatcccaaagggtcctaaccactgtacaatgtaaaagaatgtgatttacattttcctcttcacaaccacacaaaaaacaacaatttggaagctgccacccacgcatttgcagcctatccaacgtgaggattttttcccaagtagcctcccacgcaaagaaagccactttggttgggacctcatccacccaaatattttttccctgaaaaacaagaggaataggggctgccagcagattgtaagcccccctaatctgaaacctgtcagaatccccacctttccaaagcactgaatcctcctcaggggttactctgatgtcccttagcaaaaagagcaaatcctctatcagcaccaactcccaatcattagaatctctaaccaatctgaaattccaccctccttggccaagccttgggtcccacgcatcattcaccgactcattactgcacgttgccaaggcaaaaatctggggaaacgcttgggacagcgcttcattaccgcaccaatgatcagtccagaacatgatcttagtccccctccccgccttgaacttcatgttattccagcaccagcccatctcctttaaaatctccttccaaactcccactccaaagggcccccgggctttccttagatttccaaccacaaccctccaacccgtgcttcaccccaattaccttcttccacaagacatccttctctacggcaaatctccaaatccacttgcccaataaggccttattcaaaatccccatcctccttatgccaagaccccccttctcttttttagtacacaccaccttccaattaactaaatggattttcctacccgtgtttccccctccccaaagaaaatcttatagccaatcttgacgagaaaataatgaaaataatcatattactgttaaaaattgaataaatatagtaaaaacatgcacaacttcatgaaaatatataaaaagaagagaagttatcattcaaatgaaagcttatttcactcgaaaaaataatacatttaataatgaagaaacaaaagaataattatttaaagaaacccttttcctaaaaaaaaaaagaaaaaaaagaaaaaaaaaagaaaaaggaatttagtagattttatgaaaaaaagaaaatctttatacttatttgaaacaaactttgaattattattgggaggattctgcctaactagaacaaattttcatcaaatttatttcttgatatatgaatttatttaggtattttttggcaattttaatatgtaaaaattgtctaataaaaaggaagttgttccctagttgggttctgcccttggtgttaaattttgatgattgtgccctaggacacccaagacaactaaggattggaggggtgataagagattataatggtgttgcggttagagctttttcaaaacaagtaagagatggtttagcctttttacaggccttgctacaagccagggtgcttagactttctaacctacttgtggaaggggactcttaccatattgtcatcttggtggctaaattgaaaagagggcctttgagttactatgggtggctttgtcaaatattctatgtttcatacttgcacatcttctggacttctctttctcttagtcttcttgttgaattaataatgttgctgatcttttagcaaagagaggagcaatgttttaggttcactttgtaggagattatttacgccctggaggagtgttgagtctttaccttgtatagttgcatgtggtactctagcgatgtatggatctccttagtccctcatagaagtttgctccatctcttctttcaatcagattttgtaaatcttggaaggattcctcacacttcatttttatttttaaattcatatcaatgtatgtgttagtttctaaatagaaaaatgtcaaataaaaactagatgaggatggacaaaacgacaacaaaagaagaaggataaggaaaaacatatccagttgtagaagattggagttggagttgtaagagtaatgttgaaaaaaggtaagttgtgagacatcttctgttttaatgaatgttatttgtgaaattccattctttctagaaggaattgaaatataaaggttcttctcaattacatcaatcatattatttcttttcacaaataccttccattccaaccatggaaattggagatttaaattcaattctttttttttttttttctccaaatccatccgctccttatgagtctatcatattccatctcttgctcatttgaaaagaatagtttcatttaggcagtctccaagtttttggtcctaataatgatggtgagagaagttatctattatggctttatggctttgaaattacgagaacttcacacaagtgattcaacaatgaatggtaaaaaaaaaaaaaaaaaaaaaccaaaagaaagaagaatttgatgcttcaatttttgtttaaactagataaaatttaaaattattttttattttaataatttttgtctattcttttattttgtttatgtactttgccttatatttttatagttttatttgattaattttgtaaattatgatatttacaccttacacttgagattatgctttaacccactaaagaacaaaatgcgtcaattctattgtttgtttttaaaactagccattacattttaaaactatgttagattgaggagatttttgggaaattggaggcaagaacatagaatatattggatgcataggtttaggcacagccacaccaagtgcaggcacaaagatttcccgaggctagactaattctttttggcttgctttttggcatctctgtgcactactttggtgcaccctttgctagcttgcctataagaaaaaaaaaaaaaagaaaaaaaaaaaaaagaaaaaactacagctcatgttcaatttataaatattataaatttggacatccaacatttcctttttccttttttttcctgatcctttgtttttttttggctaataacctctgctgcatattttgttagttcaaagagttttttggttaaggaaaacctgtgtttactttcctgttcatccttgtcatggacatgctttctttgtttcttttcaaggtaatgccagtagcttttgggatggtgctgatgtgggtaacagtgttggaggaaaatgagttcttctcacatctatttttcgcagattgcatcatatgtagagagcgaattccgttgtggttcattgaataaaccacaaaattacaaggccttggagtgattcatatctactcgagatttttgatctatcagagattgtagcatttctcttatggatcttattagattgagcaactcgtaggactgttttgctgaaaaaggaatgctaggtcttttttcagtacttgtagtttgcctgattagtttcaataggatggaaatgccacacctttttgttttgttttgatttttgtttttggtttcatttgtggtagttgctaaatgtatatgctgtccacttttcaacatcattttagagcattaattaaacaatttgacaaaggtgacgttgtagttgttatgcatgtcaaaattaatgatttatgtgattacagattgcttaaatttatcctgtttaaaagaatcccatgattgtcctttaaaaaggaagcatcccatggttgttgagaagggtaatctagatgcacagtgcatgtttataagaaccttggttgaaggctttggctgttgcttgatggataaattctccatcagagcattactttttcaggaaagctctttcctgtggttactatagacctgctcctgttttcctaacatctaacatctgactgatatcttttgtttattgcatgtaggcaacttgtggaatacctgaaatagcttttgcaac

SEQ ID NO: 12244 - DNA, 1671 bp, Vitis vinifera
  Intron number 1 from transcript GSVIVT01026802001 (locus G SVIVG01026802001) derived from phytozome v7.0 (chr-ID chr1 5; pos 7472219 to 7473889)
gtgccaagatcacgtacttcatccacatcaaacaacagagtaatacaagtgaataactaaataaaatgaaatgagtatgcaagaaatatgcatactcatttaaaaggttttttttttttaaatgagtatgcatattaacgaatattcccattttaatctagatcttccaaaaaaatattcaaggtatttaaaactaattaatgaaaataaaatattaatttaaagattaaaaatcttatttaaaaaattgatcttcaaccctaaatctccaattcttcatccctaagctctgatatttctgatcttcatgtaaaaatgttttttttttttttagtagagaagatagaaaaaatttaatttatacataggggttttaaataccaaaagacttttttacttttattaaattattttaattaattattaatttttaaattatgattttacccaaaattgggttttgggcattacatatcctcttctatgctgcttaaccttcccttctcctaagcctctaaaccattgatattttatatcagttttgaaaaggcttattgcatttaatttccttggaatattaaattaaaatcccaagacgttgcactagatgggtagaagtaataattgagtgcctgttcgtattgaatgctaagatatgaacatgtgctctcaaattaatgctatgcacacaattaatttttttatcatcaaattagttgaaaatgaataatctttaattaaatgcaaaatccaattcgatatgattaatcattttacaaacataatttaactaaaaggatgtttgagaaatcaatttaataatttaatatgacttaataacttaatttaaatcattaaatatattaaatatatctaataaaataacttattaattattacagcttaaagttatttttaactttaagtattaagttgaaatagttaacttgttcttaatctcaattctttttaccttatttgtccacacaagtgagaatgttttaaaattataaagttatcttgtacatgtaaaatactttaaatatatatgttttacaaataaatttatatgtcacttaaaagtggtgaaaataaattgagttaaaatcaatgacaagaaacacttgttaagattaacgagggtagatatgtcaattggatgatttaaaataaattttaaattaacattatcaaacaacctcaatacttcaaaataaaaatgtgttttaagttaataacttaaaaataatttaatttaaaatcaatttaacttatctaccaatcaatattaagttttaccaaacactcttttattaacattatattaaacatgatagacattaaatccaaagctggttgtggagcatcctccataacagaaatgggaatattagaaagtgagcaacgtctctgtacttttcatctttcactaggaacgagtatatggtatatggcatgaatcgcccatggggccaagatcacatcaaacaacagaggaatacaagtgaagaactaaataaaatgaaatgagtatgcatgcaggaaatatgctaagccttggtgtttccaaaattatgacagttcaaacaggaaaaaatcttatgcatggagacctctctttagtgaacagacagcgaaagagaggagatttgagattgccgagaggtatcc

SEQ ID NO: 12245 - DNA, 2148 bp, Vitis vinifera
  Intron number 2 from transcript GSVIVT01021402001 (locus G SVIVG01021402001) derived from phytozome v7.0 (chr-ID chr1 0; pos 4939226 to 4941373 reverse strand)
gagaaatccttagttgatgtagattacatttaactagtctttgtttgttacctattaaaaaaaaactagtcttcgtttgtcttaattgctccccttatagtacatgtgaaaacctttatgtggccatgccaaccttgtgcagtgccatctgtgttcctgcatgtgcttaatttttcttttttcactgatgtctcagggcttgccatttttcatatcatctttgttgctgataagttttgaaccaacaaatgggttgaattttctctaggtatttcacaccttagttccatttggcttttgatgatatagagcttcttgagaagattggcatcatggagtgataaaaaggatattgtctcaaagagtgtgagttgattttgatcatggagatatcccaacttaaacattcctaggtatcccagtgtttaggttgctgaagctcccaagacttctccgttggaatgagaaatatcttgtgtttaaatgtcatctacttatctacagggtaatttctttgagaaggagccaagtgactatgtttttttctgaacttcttggaagtaaatgcggagacttgagagcaacaaaataattttcagagatcagtagttgctgttatcatgtatcaggttcaaggtaaatctagaaaaagttaggagcatgaatgattctttgtggtacgtgtgtgttttgtttttcttcctttgatgaattttatataatcaactggcctgtgaggagattctgcagggcttagtattgagaaatccaagtaagtgtgagttttgtggggacttagtgtttttatgtgcagatgttccatgtgggtggtctaggtcttctttgaggtggtgaaaggcaaagtagtcttagctgcagaggtcagatggtagcattcttgttgctcagttgagcaaaatattggaaagtggatgaacaacaaatgtgttgtgtccaagatggatgtggagggtgtgagcctttctcttgtcagtttggagttaattttctatcttgatttgttgttgtttggtttatgctgaagtgtgttgttgccttgccagaggcaatagtattgtgagaatccaactcttctttagtatttgggaggagaaaattaacaaatcagttgctttgagtctcattgggccttgcttagatgctacttaggcttttttttttttcatttgtgaacagccttggaggaataaaatagaatgtctaatttaaattttgcaggatgttgttttgttgttttctgtgtgtattaccatcggaacccaaaaccagatatcctgcatgtggcgtggtagcccatgtatagtccagaatgaagtggaaaacagaattactaaggcaaaagcaaataatcctaagataagaatcgaactcttaagataaaggatatatgtattttaaaagattataacacatcaaaaccataacaaaaagtatgctgcagaataaaacttaagtaaaccaagtcaaactccagatctcaaataaaagctctcagaaggtgcattatacattgaagatatccatcacaaagtaactgaatttaaatggcaactgtctgaatacaactcaaacaggaatagtatcatagctacagacataacagagagtctaagatgggaaaactacactctgaatgatctaatggcacagaattaaaaaatcatagtaactaaattgaaggcaccaaatcacttggtgtagaaattaaagattaaaactaattctagatttcagtgacttaatatgttgtagttgttgagttgtcaatcttctgtagattcatcatgtacattagtagttccttttctcttgatagtggagggaagaatagctaagaagatgtgagcatttatgtctttggatcaattcctgcattgcttccatcaaatggaccacactctatttttcttagtacattttctttatttgatcttttacatgttagctcttttctgtagaaagttaaagccgattatgtttttctttggattgtccatgtcaaagaccattcaatcttccctttcttttcctgtgaactgttgctgttttattcagaaaaatttcttgagttagttgtgacttattatctcagacggggggtgaggcgcttgagagtgctcagttcat

SEQ ID NO: 12246 - DNA, 10530 bp, Vitis vinifera
  Intron number 1 from transcript GSVIVT01036476001 (locus G SVIVG01036476001) derived from phytozome v7.0 (chr-ID chr1 4; pos 22535784 to 22546313 reverse strand)
caaaccattgtaaactaattgtgggttaatagtgagaaggttgatgatgaaagaatacaagagaaagtcatgtgatatttaaatgcaaaatttgaatatgttgttgtaattgaaaaaaggaaagaatgtgttcactcttatagttgaatggttgataagttcattgtgttcacatgaacaatgaaggaatcggagaatcaactctaccaattttgagtaggctttgtaaagtagaacatctacaaaaaagtcatggtagtcaacaaagtggtcgatgtaaagtaggacataataactccaacactagagatggagatggtgacaaaaatcttccagagaaagggataacacttgttgattgaaagacacgtcacacaaaatattttagatgtaagaagtatagacactataagcctaaatgtcgaatgaaattacagaatgaacaagtagagtagggaaaccctattgaggcatatcaaaatttagtattagcctataatataacacatcaaatgcaaacaaagatgtttggtatctttatataggatgtctcaaccatatgcatagtaagaaaatgcttttgcgattagatgaatcaatcaaagaagactccaaaatttttatcatgaataaaggtaatattaaaatacgttctttaaaaatgatactgacgttattataatatatgtattttttcctttttttttttttggaatttatcaagcatatggcaattaataaaaaaggacattattaatatctataatggattttgcattcttagtaataaaaataagaagatgattgcaaaaatacataagacaaaaaaatcgaatgtttcttatgttttttgaatcaaaaactttatttagtttgaacgcaacaatgaaagataacaattagctttgacatcgttattttggtcatctaatttttcatggattaaagttataactacaatagaatatgggaataggattatcaatgattgatgttttagatcgtgtctatgaaagatgtctccttaggaagcaatataagaattcttttctagatagaaaatctagaaaaagttaaacaaactttagagttggcgcatgtagatatatgtgatctagtaaggtaaaatctcgtagttacaacaaaaatattttaacctttataaataattttacaagaaaaacttatatttatttattaaaggaaaaatatgaggctttttgtaagtttaaagaattcaaaattcttgttgaaaaacaatataggtatgataaacaatgagaaacaagagaaataaatttatgaactcaaaaaggctttgtgtgtattaaaacaaatgccacatgtttggtacattgaacttgatacttatctattgcaacatattttcaaaagcatacttttaagcacacaatttacatcaagttatattctaatggtaatataattgttatattcctatatgtggatggtttaatattaatagtaaactattagcaaatatttaatgatttcaaggagacaatgacataacaacttaagatgaaaaaattggtattaatgttatactttcttggaattaaggttcaataaatagatgatgatatctttatcttgcaaaagaagtatgtcatagacattttaaaatgagttacgatggaatcatcaacaacatttcatacccttagtatagagcgattaaagatgaaaaagggagacactagaatcccatgtattttaagggtatagtaggaagtcttcattatttgacttttacaagatcaaatattatctataaagtgagaattataaacctatttatgaaaaaaccatattagtcacattaacaagcaacaaagcaaattttgaggtatataaatggtcctcatgataatggaattttctactcctatttaagtagcttcaatctaatagattatacaaatagtgtttagggaggtgatgtacatactagaaagaataccaccgggtaaaaagtattctcatggtttcaaagaagtaatgaaatgtagcattattgactataaaagttgaagcatgaacaaaaagatcctacaaagattttgtatgataataagtatatattgcattgacaaaaaatccaaagttttatggtagaagcaaacacatatgcattaagttttattatattagataactcataaaaaatgataaaattaagtttgagttgtgtagattagaagattaagttataaacatttttacaaagccattaaaggcaagcgtgttcaagaagttgaagatgatacttaaggcaagcgtgttcaagaagttcaatatgatacttaatgtgcttgactttaaagctcaatttaatggagactataaaaatcctaattacaagaatttagaaatttgagaaatattatgaattgttatttatttatttattttatgttactttagaagtcttagttgaattatgaattagagttatagtccaaatatgattagattattataaatataggtttttatatagtagagttaaatgaaataaaacactttttttaaaaaaaaaaaccattgtcgttacccatagttgtggaatggaagaaattctttcaatatttcctacaaatgaatatttgtattccattagtatgcaatgtactcaaacgtttacttggagataggtgtaaatgtgtaaatgacatatcatagtggggagtatggatgtatccacaaattggagtgtgcaacaaagatgtatttagttgttcgaatctttagattattccattccaagccctagattgttgggatggatgctactacaatcttagggatcaagatctaggcaatgaaagcaataaaaaaatttgaaccttagatctaggtgctcaaaaaatgatatctataatttgaatgttcccacatcaatttcaattagagaagagggcgatgcgcatatcgaatactttacgatcttttacctaatgattctctcctagaccttggaacttgagaatggtagaatcttttctatggcgatggaggataagattcctccctctggaaaaatgaataaaaagattttaagtcttaaacccttaaaaaaggtttatatatatttacttgtaggcttaattgacttgagcctcaccttaggctttagtcacttaatttaacttactaggtcaccttattatactctaattaattaattaattaatccaaaaaggtcatttataagctcttgtttaccaaaaatgtccttatatacacatatgaataaaaaaaacccaactatttcttaaataatgtgtcaccaaggaatatgagattaagtgaagatcattgggatctataagaaagtattgactctcttataatcaaattctgagttgactcaacatctcaccactaagagtcaattgtagtctagtatctatgatattcaatcgagataaaaaaaaataaaaaataaaaaccctcaagtttgtgacttattaacaactgcatgaaagctccccataaattggtgttcgtaacctaacgaggtgaatgatatcaatctcttaagattgcctctacaatccgtaagtgttaaatcctcctattatgtgatcaagtggcatgctctaactctctaagattcttttagggaattgaagtctatctagcaaaagaatttgaagttaaagaccttgaaaatctaatattctttttgggaattgaaatgacaaaatctcaacaaataatttttatctcccaacaaaaatacacttaagatttccttcaagagacaaatgtaggtagtagcaaacccattggcactttaatagggtccaatcactagctaggagaaaaacaagagaaggaaaaactagttgattaaggtatttatcaaaaaatgattgggaagtttatttacttaaaaggaactccaaagaaagaccttttgtttaaggaagataacaagcttaagtttgaagtttatgtagatgttggttaggctggatctatgatggagaaaagattgactactaggtattacacagaattaattcatgcacacaaaagattaattatgtctatgaactcaaacaggaaaacaaaaatatttaatgtctaattttgtctaacttatagtagaaaattgaacataagaacaaagaaattgatctcaaaataaaacttttgtattgaaaattataccttgattgcaagagagttttgactatagactggattgttgacaacagaatgatgaatacaaaggaatagatttttggaatgagagagagattacaaaaactaagagaaaatttttagggaacactcgtgaaaactctaatctctgctttgctcgctctgccttgtgatgaaggttgcatctccatttatagaagaagtgggtggacgtgagtcttgatgggatctatggatttaaagtagaatttaatccgaaaataattgcaaaagacagttgacctcttttttccatgcttcaaacgaaaaaattaaatcttgttataagtaaaaaggccccgtttctttacatgtttttttgaaaatcaaagttgtcaaatgaaagacaatttttactatttgaatactatttgacactattcactactatttgaatagtattttttttgttttcttaagcatctttcacttagtttctttattttacacagtctttttactagataaatacaaggggataaatgtacaaaagattcttgaaatcttttatttagattgacccataggtctactatacaggatgaactcggggtctacatatgaatcatttgataaagttatgtcttcagttttttcattatcttaattatcaccaaactatttgagagtttgaataagtctttgacgatattattctaaatttgtagcagttgctaatgaagtttgacatttgcttatcagagttaggaattctgcttgagttggcccttgagaagggcttgttgaatcttttgaatttgaagattctggccttgaaattatttagaaaatcttttgttgacacatgaactcatgattgaatttgtcctaccatttgatgctaaattctctagagagatataatggaaaatgaggaggttgctcttgcttcttgataatattccatgtaagaatccatgaaggagtctcaattgaatgatagattgagatgaagtcttgctcttgtagaagttgaatttttcttaaatttcaggaggaaatatggagtctagtagaccaaaaacctcttgaaaattgaataaaccatgaatgttgataactttgcagatatgacatgttataccaagcattcatgtagtctatgtagttgtagctcataggatggaaagtttgactaaaagccttgcaagtaaagggcttttgatttcaatgagtcaaggtcatgactctaagaatttgatatttggagaatgcaatgctccgaggattgtttttatcagtattatgagtaatttcgactgaatcagtatcaactaagaaaaactcataaaattgacaagttttgaaaggatcattggaattaaaattgactccttaaggaaagatgtaatgaaggattttaagaacttcttcaaaattgaactttggttcaatgaaagcaatttctaaggttttgggttttttgacatattgactattagtaaatgaagatgaagatggaaatgttggaatagaacttggactatattaactctggataggaatacttttggaggttgatttaaaagcttgaataaagctttttgaaggttgaagaggaaaaaaagtctagagttaggacttgaaaggaatttgatgtttgtattggaaaagtatgacgaatatttggaaaattcaaaatcatcctatatgaaactttggttttcttgaatgataaaggaagctggggcctaataggagtacccattaagataaaatatgatccttaccttgcaaaaactcctgagtaaggaagttaggaagagaattcaactctcctttgataaattcaattttaaaatcaaaatttgaaagtaaagtttgtcatcttgcaaaaatttgttttgaaactagatttttaacatatttttgtaaaatgtcttttgcagctttgcaatcaatttttaaaataattttttttttatcaaatcactttgaaattttgaaatacataaaattattgataaaaaatttcttttttgacagttaaatagtttatttgagtacccaatcaaattcctgaatgatatcgaactatatgcacttttgctttgatatgtctccatagcctaaattagatgcatctgattctacaataagcaatgcattgggatgaaggatgttaatgcatggtaaatatttgactctttgtttaatttctttgactaaattagtatgattttcagtccatgcaggtgtatttttcctaattctcaaatatttgaaataatcagaaacataatttaaacagcttagaaatctttgcaattgttatttgtcttttatttcatcaggaaacttgttaataaattctattggcctttgattcggtttttttttttaccttgataaatttcatgtcctaaaagtcttatctttgtttgaaataatttcatttttggataagaacatgtcattccatttgctttaattactttgaaaaacttttttaaatgaataaaatgtttttcggatgaatcataaaatactataacatcatcaatatacacaataatgaattgaaaatgagagttaaaagtgtcatgcataatattttgaaattcagaatgggcatttttgagaccaaaagacatgatattccattcataatgaccaaaatggactgtaaaaacaattttgtatatatcttcttttttaatttgaacttgtcaaaatcctgatttcatatcaaattttgaataaagtaaaacactatgaaatcttttgagtaaatcttgtttattaagaatagggtatcttatccattgtaatactttatttaaaggtttataattgatgactaatttgggtgcacctctttatagttcaacaacattttgaacataaaaaacaacacaactccaaggagattttgagggtctgattaatttcttctttactaattaatcaatttcttatttacagtattctaaaagtttttcattcatttgaataagtatagctttagtgcgaattttagactcattgaaattttgaatataaggtaaacttatttcatgtttctttctggaccaaaaagcatttggaatatcagaacaaatttcgttttgaaaaaaaatttaaatttcttttattcttttctgaactttatcttctagaagttgtttttttactttcttatattgaatttcttttgatagaaaatttatatgagcttattttctttgaattaaatttatccttttatttattgaatcactttggacttgatgtatttcttttttagttaatggatatataaaggggggaaatatggtgtttcctaatattgtagttttgacaccttcatcagttacttgaaatggataaaacaatgtaataaaatgaattcctaagattaaaggttcgatcatgttttgcactaacacaaattgatgtctaaaacaataattatcttgacatatgtgaacattttgaagtttgtattatatgtctaattttcctttatttgcaacgaaaagttcttgtcctattttttcatattattgagtagggtttaatcattttttaatacaattcatattagctcctaagtctattaatgttgtcatttctacttcaaaatcttcaattatgacttttacatttgtataccatctttgaaaatatatttttgatattgtatttataaatgattctatgggaatttgtttatcatgtattattattcctagatcttgattattagacgtttcaacaaaattttcttgtttgtattgtattatatttcttatttgttcattttcttgttttattgttttaattgatctatttgcttttttatttcttgtatttcttctttcaaatcttcaatagttataggcttttgaatctattaaaaatttcatcaattgagtgttgtgcaggtttgatttcttaagttttatttggattttccatgagaattaaattttttaatttttgtaaataatttctttatgtttcctcatcatttattttgtttataacatcaaaaaaaagaaaaaaaacttgcttagctatttttgaaaatattacatttattgtttttattttgttttttctttattttctattttttgtacttcattaatttcacttgttttttctatctttgatgttgatgtttcctccacctctctcgaggtagaaaaaattaaattttgttccacttgactcttcttttgattctgcttgagttaagttttgttgatctaataattttttattatatggagaattttctattgcttttcttgaggttaatgttgcaattcttttaaggggtttcttaaatttgaaaaactaatggaaaaaaggaattgtcatcctaacttgttgcatatatttttcatattgttttcttcaagtatttgtaacttgaggaggaagttgtttaaaatactttcttttaccattattataaggagaaaaataatcaaatttaatacattctacatcaagaacaaaaagatttcttttaatatatcttttcctaatgatatttatatttaaaggaggattatcaagatgagggaaaatagttaactcagactttttttttcaaaaaaaggaatttttgaaacaaagctagacacatttaataaatttttaagtttattttcaatttgaatcattttttcatctaattttgaattattaaattttatgtgatgactatatgatgatgtagctaatgaatttgtagatttgtttaactcatatgaagaacagactgaattatatgtagaattatcttatgcatatgatgcaagaccacctattctaagagatctggatgaactaacactatttaatccctttataatattactcattgtcacataaaataatcataattttattcttaattaattcaaataatttcttgaacagggaccaccacaagcagatcaacacgggacttacactcattctgcctttaaacgccgctatctaggttcactaaaccgttcacaagaaattcaattcgaactaagtcatgactaaattagtgattaaagattgtttcaatttgtaataccactttgttcttaagcagaacgtggctatgataccatttatatccaggatatacaacagttcatacacacaaaagattatgttgtctatgaaaatacaaatatttagtatctaattctgtctaatttatagcataaaattgaacacaagaacaaagaaattgatcttaaaataaaatttttgtattgaaaattataccttgattataagagagttttgactatagattgacttatcgacaacagaaggacgaatacaaaggaatagatttttggaaggagggagaaattacaaaagctaaaagaaaaattttagggaacactcttgaaggctttgatcttcgctttgctcgttttgcctttgttacgaaggttgcatctctatttatagaggaattggcggatgtgagccttgatggattatgtggatttgaagtataattgaatctaaaaataattgtagaagacaactagcttctttcctccatgcttcagatgaagaaattaaatattgttaggggctataggtaggaaagccacgtttctttacatgcgttcttgaaaatcaaagttgtcgaatgaaagacaacttttattatttgatcattatttgaatactatttgacatttttcaatactatttgaatatatatatatattttcttatacatcttttacacatttttaaaaaatatataaatatacaattgtacaaaaaattatttattgtaaaaataaatcataatgtatgtttgtttattaataatcttaaattttaagaaatttaaattcataatacatttattaaacaaataataacacttatttattaaataataaaaaaatattaattataatttgatatctaggtttttttattgtaaaataaatatatgaataaagttgtcacacgttataatattttttttaaacagaaatacctaaaaatacttaaaagattaaaatttttgttttattttttattaaattttatatatatatatatttatttatttatttatttataatttttattaaataattaaaaatatatatataataacaactttattaccaagacacttggaacaaaattagtaatataaaaaattgaaaaaccctaaatttggcctaggaaaaaaaattactttataaaatgtaatattgaaaaaatacacggaagggaaaaatgatttaggtttattacacggtttaaggtttcagttcgggagaggcagtggagaaacggcag

SEQ ID NO: 12247 - DNA, 1201 bp, Vitis vinifera
  Intron number 12 from transcript GSVIVT01011157001 (locus GSVIVG01011157001) derived from phytozome v7.0 (chr-ID chr 8; pos 7450588 to 7451788)
cctgcttgaaaattgccctgcaggttttcttctatttattatgaatctcattagttataatgtctgtattattctatttattattatctttgtcttttttttcttatacttctctggcactagtagtgacaaaaaaatgacagcaggaacatcaaagaaaaactcatctgttggttttgtaactaccgatacagtcgatagttttggctagaggatatggggatgtgattgaattttttttttttcacttctgatggaggaataacaggttaattggataattgatatagtgatatatttttttttaaagaagggaaaatattaatgttaaaattggtttatagctaggaagacattaagaaaattgctttatgtgtgaaaatagcctctaattacattgcttttggctaggcaattaacaagctcatagacctctccctagcagttactgggggatgattgaccatccttttcactgttaatgtggtaaaatatttgttcccattccatctcttgcttgtcaattaacagcttcagtaccacgttttctcaaagatggaagatctaaaatggtttgtaaagccttaatacctttaagtaacacaatcttgtcctctcagctaaacttccaacttcttagtaccttagatgtttagtgcgtgtgctctttgtagtttggcttagtcaggggttggtatatactgaccctttactgagtttcttttaacaaatttccaaaacctgatacaaggaattgaggctaaatggctgtctaacttattcctttttgaatatgcagttcctaagataaaatcaggcagtcaataacaagataaaagtaaatgttggaatatgaagcaggctggtagatcctatcataagttttatcattgattacatagtttctccaaggttgataacttttcagttcttggtttagccttttgtgcaagcaacataaggcccaaaacttgatatgcccatctcccatgatgtgaagttagcattgattcaacttgacaatttacatttcatatcataatgaacagatgttattgtttttttctcttatgtagaagaatagtcctggttacagtttgaaaagtaacttttctttttcttatcttttttctttgtttgactttgatttttgtgtttgacttctgaaaagagtgcagttcatcactcggaggaagtgcgt

SEQ ID NO: 12248 - DNA, 7469 bp, Vitis vinifera
  Intron number 3 from transcript GSVIVT01017682001 (locus G SVIVG01017682001) derived from phytozome v7.0 (chr-ID chr5 ; pos 2612394 to 2619862)
gagcagtagcattttttcttgttcgtgttctaaaggtatgcttcctttgggatttcaacaccctcactcctgacatgctttttctgttccatgatcactgactcaactgctaatagatatttctgtgaaattagttgtacacctacaacaggctagctactaataactaactttttcttatgctcatttaccaagtaatatgctatattaattaaataaaatatctggttagtgtccaaaacttgctattacttagggtaaataagtcaattagagcatgtttgttaactattctccaaaacagttttcttgaaagcagaaaatagttttatgcttttaaaaacaaaaaattcaaacttaaaaacataataatatatataaatatatataactctactgtgttcttgctacttctttctttggattctttcactttcatgttaacatctttggatcacattgaattagctaaacatggtggaagatttctcctcacaaccaacttttggttgccaagaaagtaaaatagaaaagaatggaaatgaaaggaagagaaaaactaaatttttattaaagaattcaagaagaggagttcaatctcttcccgtgacaccttctaattggccacttatttaaaaaatgatataaaatatctcaaaataatttaaaaaaaatatgatttttgaatgatctgggcctatcttgggttggtggagtgccaaatatgtcgaattcaaagtagaggaggtttgggcttgaattggttgtggatgaattcgaaatggaatgcaaatttgaattggattcaaattggaggttggtttcttcccttgggcagtggatgaattcaacaaaatttgaattggaaaatatggtgttttttggaaacatattttagttgttttcacttctttactaaaggttgtttcaaaagctaatgaagcaattatgaagaataattaactacattataaaattattatttttaaaatatttgaaaacatagaaaataaattgaaaacatttcaagtttccaaataaagttttgctctagaaaacattagagaactgtttttgaaaattgttctcaaaaactatattttgactttgagaatagttttaaaaagtgttctgaaacaaacccttagatttctattcttgtaaggtagttagctattgcatatcatagtctcaacattcatattgcatattcatgttgagagtgaatctcaatgataaactatacttagagagaaggtgaataggtgtttttaacaaattcaagagatcctccaacacatatattatctttccttagttgattttattgattggttggggtcgaattgaggaagggagtatttttgttttccctatcctttttggcgctatttagcagccgttgtatacaccgtgtgtactttggtgcactttttttggtgttttaatactatttgcatttacctataaaaaaaatattatctttctttaggatttctcatagcttattcttttcttccaacaacttttctacaaagatgaaaaatcatatgcaagcatgaatgcaacaacactcttccaaaaatttatacattcaagttgcatgcaaattttttaacaatccccaacacaaatttttaataacaaattcttcctcaacacatttccaattactacttgatatcctttttttttatttttttttataggttactacttgatatctttatcaaattgaatagaaaattattcaagatatccaaaggataatttcacctatttcaatttttttttcatccatccaacagatatgctcgagtaacaaatgatatcaataattggaaataaccaaaagagtagaataagaaagaaagagacaatgaaactagttttttacatgaaaaaactccaaagagataaaaaagccatgagcttacgagtgattgaaaacatccagtaagacaaacaaaaactgaatacaaggttttacctaactcaaatctaccaattctattcagaccacttgactagcacctttccactttcagtttcacaccttctttcggagcacaattagagttcacaccaggctcaatcttggcctcttcttgagttctcataaaaagaaaatgggttttcacccaaacttaaacaagtgagaaaacaagagatggataaaatagaagaattaaccaattattttaaaaaaattccaatggaaaaacgatttggaaatcaaggtgaaagaggattttcttggtaaccaaacactcctaatttggtatgaaaagagagaactcaagaaagaaaaaaacggttgctagtgtctcccctgatctaaacttgaagcattttggtataaaaagaaagggaacccgtgatccaatagctaagaaaagatctagcaaaagatggatcaatcttatctaaatctagatcaatcatggaaaaggcacataaacacttagttaaaaaaactattgccctgacctccttaactcttttttttaaaaaaaaaactagttcaagaaaaatatcaatttgaaaaaacctggttgattcaatttcatccattgacaacctcaactacataccttagcctctgaccaacttttacatctcgctcttcgttaggtaagtagtttgagaaaggatttggaaaatcaagttacgagacatttaggaatttttgtccggaattgtcaaatactcacacatgttcactttcattcttttatagtgcttcttttaaaagtgggagcagtctttttaagttttccacaagatatataatcacaaaccgatcaagtttttaaagttgcaaatgcctgattttttccttagcatttcaaatgagaagcagtaggcagcataagtatctaatctaatattaagtgagatgtctgtctcatgtttcattgtaaccaggtagtgtatgagttagcctcaacaatgatatatatgaggtggattggaaatgtttatatgatattttccaatatctttgtgtttctatgtctccttttgttttaattttcaataatgaactccctgaaccatagaataagcataactgaaatattcatagcaagttttagaagctgggagccaagaaccaccaacctataaagggcagaatcaccatgcttgactgaaaagtttaccaagtgatggaaataactgctactaatgttgagatagattatagcaagactttatgaaatgaattgtttgtttccgatcaggaaaagaaaaaagaaaaagacgggtgtttagcaagccaataaaggattgaatcttaagaagttagtatcaatatccattgttgtagttaaggctacaaaaggttgaaatagtttttcatgttcaacaaacactagggacatagtgagtgagcaaatatggtaaaaataaaaattagtcagttgaggattctaaaagcttaaaatgacaattaccaaaaaggacatgggctaaggtacttacactgagcaaaaatatgataggctatgattaatttgaaaacatggccttggatagagcataatggtgaaaaaagaattgttaagccacctctagatgggttaagataaatgcttttgaagctaagttctctaaactaattttttgagagtcaattttttcttttacgtcatacatgccagttttattgacttgcaaaccacaaaacttgttatgctgtctctttgtctatatggggttttcaatagtgagtgaggttgaccacattggttgtgaggtgtgcaagcttgaaggaagagtggagcagacttggggttggtgggtgatgagtgtatggtaatagccccataaaggatcttcaaggtggggatttcttgtagaatttagagtgtgcttcagaatcttaagttcttaattgattcaaagtccttttaattgagaccctccctgcaaatttatagggggttttggaatgtaagtcagctaggttacaaatccatgagccaacaaagcttgccctgcgttggtgatcaattagatggtggaaactcactggaggcagcattccagggaattatggttaagggaaggggacaaaaatacaggctacttccatcgcatggcgactgcccatcgtagaatcaatcatatggacataattaagataaatggggtgtggctgactaaggagaaggatgtgagagaaggggttgttaatgtttttcaacacttacttacagaaaattcagattggaaggcggatatagaaatgttgcagttagagcaaataaatcagcaagaggcagagaacttggagcaccctttctctgaggatgaaatccatagtgccctgatggagatgaatggggacaaagccccaggactggatggctttactatggcattttggcaaagatgctgggttctagttaaagaggaggttttggatttgtttaaagagttctatgagcaaagtgccttcatcaagagcatcaacaatacgtttctggtattgttacccaagaagggggggcagaggatcttggggaatttaggccaatcagtcttttgggggggctgtacaaactattggccaaggtattagccaatagactcaagaaagtgatagggaaagtggtctccactgatcagaatgcatttgtaatgggcaggcagatccttgatgcctctttaattgcaaatgaggtaattgatgcatggcaaaaaagggaagagaaaggtctcatctgtaagctggatatagagaaagcctacgacagtttaaattggcagttttttatgaaagtcatgagaaaaatggggttcggatcaaagtggttgggttggatgtggagttgcatatccacaaccaaattttcggtgttggtgaatggagtgccggccagtttcttcccaagttctaaggggttgaggcaaggagatcccctttcttcttacctctttgtgatgggaatggaagtgttgagcaatcttattaggagggttgttgaagggagatttttgacagggtgtaggatccgaggaggagaaaggcagtcggtgcatatatcccatatgttatttgctgatgatactatagttttttgtgaggctaggaaggagtatctaacttatttgagttggattctgttttggtttgaagccgcatcagggttaaggatcaatttggataaaagtgaaataatcccagttggcgaggtggaagagatggaggagatggcagcggaattgggctacaaggtgggttctatgccttctgtgtatttgaggctgcctttggggcctcctaacaagagtaccgctatgtgggatggggtggaagagaagatgaggagaagacttgcacattggaaacatcaatatatttccaaaggtgggagacttattctcataaagagcacgatggctagtatgtcattgtatcaaatgtctctttttcgtatgcccaagtcggttgcgcgaaggctagaaaaattgcaaagggattttctttggggatgaggaaacttggaaaggaaagtgcaccttgttaattgggaggttatttgtacagagaaagaaaagggggggcttggcttaaggaagctagttccgttgaacaaagccttgttgggaaaatggatttggaggtttgcttgtgaaaaggaaaatatgtggaagcaagtgcttttggcgaaatatgggcaagagggatttggttggatgaccaaaaaggctaatgggacgtttggagtaggggtttggaaggaaattctaaaggaaaaagattggtgttgggaaaatatggcttttactatggggaatggtaccaaaatcagattttggaatgatctttggtgcggttgtacagtgctgtctcaaaggtttcctcacctttatgggatggctgctcatagaaatggcacagtagaagaaatgtgggatcagaatgtcggccaaggagattgggatttaaggtttgtgaggggtttcaatgattgggagttggatatggtaggtgaggatgcagttttttggaaagggggaagaaacgggcagtttaaagtaaaagaagcctacaacttggtggttaataccgtggctaacaactttccaaaaaacaacatttgggtggataaagttccaacaaaaattttgttttttgcttgggaggctacttggggcaaggtgcttacgctagataggcttcagaagagagggtggtaactccctaaccgttgcttcttgtgtggctgcgaagaggaaactataaatcagatcctcatacattgtatagtggcaaaaatcctatgggatatgatatgtgctttgtttggtgttcagtgggtctttccagaaactgtaaaggaggtcttattaagctagaggggcccttttgtaggggaaaaaaggaaaaagatatggaagtctataccgttgtacatctttcggactctttggaaggaaagaaataggcttgcttttagggggaggggggggggggggggtgatagatattcagaaattaaaaaattcttttgtctgtaatttatggtgttgggcgagaatgtatagtggagagaggtcgctgtctcttataggcttcttggagtggatagcctccagataagggctggtggggtttttttgctttctttttggttgtgaggcttagctagattgtatattccctgtatacgttgtggctttctggcctcttatcaatatattctgtgcttatctatcaaaaaaaaattagatggtggtctcttcttcctttcacttcatttgtgatgaggttgccaatcttagaactactcgtcttagtaggcctcaatgctaaccatcaaattaagatctttgaaacatcttgtatacttgatggaagggtgggttgaacccaccatcgaggtgcatcaacctatgttaggcttcctaatccttgcttatagcttgattgatgtcgagtgtcaggttactgtgctactatttactttaagggcaagcatcctcaagtgagccctctcttggagttggtcatgagagtaagtacaccctcttgatagggttagaagggttcaagttgagctaatatgtaaaggtggagaactaaacatctgtcatagtaagtgaagcatgactaggttggccttttcattcatgttatgaggtgacttctccaattctaaggtaaatgggagaatttccttcagcatctactattagtgggcatcctcattttgtgtacatccaaggaggttaggtatttgaccatggggcaggctcccattctaggttgaagagcttaccttctataaatgtattaatttctgtatgcatgaatagaatatgatattgatactttcctttttatatatatacttttgttgtcaactattgttataaatgtaaataaggtgagacagtttgattttttgttttttattgtttttcttttcgacatgcaggttgcatctcctgtcaaa

SEQ ID NO: 12249 - DNA, 6298 bp, Vitis vinifera
  Intron number 5 from transcript GSVIVT01026319001 (locus G SVIVG01026319001) derived from phytozome v7.0 (chr-ID chr4 ; pos 13641521 to 13647818 reverse strand)
tacccttctacaaatttgtggagtaactcttcaaggtgcactgcccatctctctctctttgtgtgtgtgtggaagcctagagagttatatgcccattgcccacgtacgcttttgaatatgatggagtcatgcgttttgctttcctttttcttttgcatggtaccttagcttggaaatgcaaacccacgtccaccatttttgaagaataaaagggttcttgtgtcagcttttgcttttccatttttattttaatttttttccctgtttggcttgttcttctttttcaatcttttgttttggaagattttctctgctgagatgtgttatcagataattaagtagctttgatggagtattaaagagaaaagcttacaggaccattattaaattctaattaggataagggaaaagcaacctcggtaacactttttctttttctttagaactctttctcactgctttcactattgttattatcattattcttattattaaactccggttcctattctctccacgagggcactccatatatgaccaaaaaggctactcgcaaacttgacttgggcgcatgctctcctctttcccatagttttcatatctatctcttcactgtgatcatgtcattttcacttcatttttttcttctagtccgctatttcaattggagatcataactacagtcttacattaattgacgtgccataattttttatgcttcattatgaattccaatccaaagcgatttttatttttttattcaacttgtttttgtcatattcattttggtgcttctgtcagcattaatttctgggttttcaatatctaagcctgccacactggcccgattgagcatgtaatgaagtttactagatcttttgttactgaatttattcaactatgatgattcttttcatgcatgccagagctcatttcaaaagaggatagctagcactcttttgggtgactgttgatttatgttcaattcaaagtgatatattttttgtttttgagtgcacctagctgactaagatatatatatatatatatatatatatcttatttaatcatagagaaactttatagtctgaatgatggaacgactcaattagtattatgatatgagaattcatttctatcttgagtacacagaatgcctttgctgtctttccttctgggtctatagatgcctttccatatatatatatgcagttagaatatctgaaacaatgggttgattttttttattttttttttgatatttgacttatgtgaccacttaaaacactacaaaaaaaattaaaataaaagacgaaggatgagagaacttagagtatgtttaacatgttattttatgaaacgtttctagtatttttaatacttgaaagatacaaattttcaaagattaaaaaaagttataaatacttcctaaaatcactaccaaacaaacttttaggcaacttacttggtttttttgtctaattttttaatatagaaaatggctttaatttattatatgttagtaattaaaattttacttaatttgggaatcacttaagtcattaagtcattagcccatttacatagagattctttccaatatgaaattattaaagccattgataatttcatcacattcaaaaaccaaagtaaatcacatagaacttcattttcatctttcttctctaggccatgtgtcatgactcatgagaatggtatagatacttcaagttgaatataatattgtctgaagtttttttttaatgcgctgaaatagtattagacattatttaacaatttttggagttaatataaaatacaaaagctaaatataatgatacaaatgtccaaattaagaagtataatggcagctactctcaagagtgtgattcttttccttgaaagtgattatgctgttggatcttattgtaattgccacaagttaaattagtatgactgacaacttgcataggttttattaccaattgtaaaaaattgtaattatagaccttcatttcttattaaaagtacatttggtaataaatttatgaagcgtttctaatatttttaatacttgaaagataaaatttttcaagtattagaaaagttgaaaacactttttagaattacaaccaaatagactctaaaacaaagattagttggaaattttccgataagattgtaacattaaacatatttcattacatatcttgaagaaatagtaaaatttaaggtctcatttcttctttggcttttaattttgttccctttagttacaccttgtttatagtgtaaaaagtaataatagcttaatatgtaataaaaacattttgtgttatatataaatatatataataaataaaataaaaaaataaaaaaactatttttagttaatgtgccatggaaaaattaagaattattgcatcctttccaacttatatagacccataatgtggctttaacaactatggaacctgaatgataacttgaacttccagcagctcgaattcaaagtgtttgtatcgagcatgtgaaaatatgaagtctaagagagtcttctatggttgtccaatttgtttcttctttggatccattcattttaaatatctcctttggtaatggaagtgagaggaagcaatataggtaaagttttaacatccaaattaagataattagtattggttagaggatcatatttgaataattaaacataattgtcattggtattcacctcaaagttcacatttgtttttcaagctctttacacttgaggagcacaacattagaacacaagaaccacattacagcaatagtatattaggtaaaaaattaacaaatttgccaaagacttattgctaaatttgtagatgataattgataacgatattaacaaaatagggtttcgattgccttgtagcactagtttagtttattttttattggctgatttcttctttcttcattggtgagaaaaaaggtcttctactctaaaatctcctcataagccatgaaaattaaatttacttagtcttcaaaaatgaaattcctctaggtaagcttgttgtatcaatggaatttatgttgtgataatggttgttttagaaacatgcataaggttctctaattagctttgaatggcttgagagtttacaacattgcagtgatctcacttttaatagtttagaagttttcttggtaagctgcaaatttctgaatatatgggaactcttctgtattcccatcgactgttgctgtaaattacaagccttttatatactatgcttggtttacattctacaaaactatggaacactgcaaaacctactacgaaatcaaattctaactagggtttaagtatgattgtgagggttgtcaatgaatgatacaaacttcaatacttcggaatcaagtgttgcaaatatatgtgcttttaggtatatcctcatctttctttcatgttccttttggacaaaccatataccttaacaatgtatagaaaaccttaaggagcaaatcttttcctccattgaaccaaattagaactagaaaaccagttattctttagaatagattttttgagttgtgacccagatttctatttgaactttcaatttagactttcgcaaatttgacgctaggctcaaacattataaacttcttatattctgtcacttgattgaatttgaatgttaataccggataaaagttacactctgtacatttctgtaccaagactctagatttggaaatgcttttagtggctacatgtttgcagccaaaacagaagaaattagtatcatgatctgacaaaataagaagtgtactgagacatgcatccttaatatgatcatattatgccataaccattatatgtcctaccaaaaggttttgtatgaaatctcatatataccataagttaagacgcctgcccttcatcttatacctcatatgcaacaacagattaggtttcaacttgtctaatacagattgaatgttattctatccttacctgttctatttctgttagcgctagagttttatcagtcttcagatggtatcaaaaaatttaatcactatataagaagctataaactctacatatggaaaataccaccaactttgttctatcaagtattacaaacttgatatacgtcatcaactcatttcccagaagttcaagcttatggataaaatgttgctcaaaatgtcatcagagctatgagccctaaagacttggttttgaatctcccttttttttcttttttctttttcttttttttgtttatcgctcctttattgaacccacgtccaagaggaagtcccatctacggcaagtaatcaaacaatgtggagtgggttttctctatcatattcctttcattttggagatagaaaacaacagtcacttccacggtcaaacaagcccttaatttccttctaagagtttcttcctaatagtttactccagttccagggtctccaaaatgaggagaaagaagaaatattattgtttatgctctcaatcttttaattatctctccattgaaatatgggctaattaactcccatgccacaaaaggtaattatatttcttttcttgaatccctttaaatcccaacgttttctgaaattttacaagaaaattcctttcttgaaaccaaattcaacttcaactcaaactccattgtttgggaaaagggttacttagatgttttttaggggtgatcatatcaaaatgtcttccagacatagttttcattattcattgtaacaaatatataggactttatgagtggcccaaacctagctaattaactttattaaaacaagttgccaccattgaatcttaacaatatgtcctagtagctttagaagttactgtctggactgcatataattaataaatcaatgatttgggcatatggatattgagggttgagagtgaaatatttcaattatagaagtattaaataagcataaactgtaatttgatttctttacgtttggttgcttatagtatttcatctatatgctgggaacaaaaacagtacgatgtgtaccttccaactacgatatagatacatctgggtgattgacaagtaatgagaacttcaaaccctgcaatagtttaagatatttcaagtaaatgtcataattctatcttaagatgcagtagtttaactctctcttgctccttccctaggcagctttcgaagaactaggcactagctctcagacccttatacaagtataaagatttttggtccatagaggttatagcctatctatagaaaaccctgaagaaagtatttcccctcagttcttcaattaaaattaggaaacatgaacaagatctgtactaaaaccttatggatccccaaagcacatgaattgtacaaataactttgagctacttattttgcaccatatcccaatgatccataaagatcacttcttcctgtaattgagactaaaccatatttctatgatagggtatatttccataccgtttttactttaaaagagcccataattagtgttacattgaaaccagctagataaatccttacatgaagtcctctttatgtctttcttttccttgtttttgcaatgctagaagtctcatttagtacctgacagcagtggctattaacctggatagttctaaaggaatttatgttataaaaattacattttttttttttattgtgacagagttttgattgtaaaaacccaagctcggagttctcgttagacagctgtggctattgaactcaatcttagtagaaaagtttcttcattattttcttttagatgtgtaaataagtcccagttcaaattctatatattctatatgaaagcatgtaattggatcacttacatatgggataatgaatctctccatctctggtttataaagctgactcatcagaaattcattggcatgactacaatattcgaatagggccatagcttttcattattttatgttacggcctttaggagcctcttcacttggccctctatggtgtaacttgttgctctttttgggacatgaaggggtttcttaatttgtccttcaatctcttttcctagacccataaaaaggattcacagtagtttgattcagcagatctaggacgagatatcagattgtgtgaatcataggagtaatgttgtatatatataacaccatttgtgtgaatttttatgataggcaaacaagttaagactgactccatattttatgaattttttagcagtagagaagcttggttgcagcaaaactctagtgaga

SEQ ID NO: 12250 - DNA, 6918 bp, Vitis vinifera
  Intron number 1 from transcript GSVIVT01014573001 (locus G SVIVG01014573001) derived from phytozome v7.0 (chr-ID chr1 9; pos 5318339 to 5325256)
ccactctccgtgatcctggtttgtctctcttttttattattcttttgtttatttatttcaatctaattttttgggttgcaaaatgtttggaaaataaaaaatccttcatatttcaattcaatacttagaatttgggcatatgatgattctataagtatcatgtgattttatttttaaatttttagcatctaaaattgtattttagataatatattttaaaataaatattaaaaaatatcgtgcatcgaaattggatcttattaaacccagatattatagacatttccttatttccaccctgaaactttttttttttttgtatttatcttctatatcaatcttattattaatttcatactttttttttaatcaataaaataaaaaatattcaaagaatccaaatccccaactacaaaagaagagtcacaagaggtttttctaatcattttttgtttttattacttcatcttctttaagcatttctaacttcgaattttctcaaactcctcctcagatgttaaatgtccatgataaaatctagaaatatgatacaaataaatgatatcaaaatataagattttgattgttaaatgtttttgtaaaacatgggatataaataaaatcgatgaaaatataatgatataaataaataaaatagaatataaaattatagccataaagttctattattatgatgacacataggagtctttttgatgcctaccaacaaaaaaaaaaaaatctcccatggtagcatgatcataaatattttaaattggccaaaatcacatttttataatatgattttaaatgggccaaaatttgcaaaataattctaaatctagtctcttttagtcacgggaccatccatgttacaaaaaataaaagtttgataactatgttttttaatttttcttttaaaatttttaaatttgtaatcattaactacgattttaagttaaacttgaaattataattgatggttatgattttaaatattattttttattttaaacttaaatttaaagttataatggtttattaattataaattaaacttataattttattattttatttcaaatattttagtttagttttttaaaaattaatttaatatcataaatttattatattattttttattaatatgtaagtaattaataaaattatgtgattattttaaaaaagtgaatatatgaaattaaataattaattatatatcatataatatttttttaagtgtatttttgaatcttttagtctctctataagttattttttcttattattttcacaatttttgatatttttaattttatataaaaattacaactataattttgattatttaaaaaaaattaaatcataattattaattatgattttgtcaagtggatagtcacgtgattgagagtgaatttgaaattattttgttaatcaacttaatttatgattatttttttaaatgaattatttatctcaaaactcccgagttacgtgtacttgattcagtgcaaaagctggcatccagcgacaagtccaatccatcaactttattttagtgtaaaaagcctgctccctctttaagtgctttggattttttcccaggcccgatccccaatattatctccacctcagcctaatatccctacatgcctacttcacgaattttgctatgtttttttttaactttattattactaaaaaaatcactgatggtactaaaaaataaatatattgcctaaatagatccaattatttatttatttatttttatattttggttatgaattccatttatatacttagtttcatttttcgatttatacttatttgataagccaatttataacttaatttaagttattaggtaaattaagcattttttgtaaaataatttaatggtatgacttaaagtaaaaaataattttaagtaataagtaagaataattaacttatttttaattttacatattttccctcttaaccgtcactccttgcccgaattgtgagtacttgaaaaaattatcaacaaaaaaggatgaactcaaagcccaatatgaaatattaacacagttttatggatcaaatatcttcaattatacttacaaatatgagatataacatatgctctatttataaaacgtttgaattaagcatgttaatacatttaaacagttcaacaaacattttcatatatatatatataaatcatttcatattggttatcaaataacaaatagtgcccatttaagtgaaactttacaaataggtggttaacctcaaatgttctttttaatttaattaatttaattttactagtactagtaacctctaattaaacccttagaggttggggttcaaatcaattacatttcccaccacgaaaatgtaaaggtcaactattatatcatgttgacaaagatcaaacaaactaaagtcaaattctttattttatatattccaacttacaaaagcaaaaaatccccaagtgtttcaatataaacaaaataaatgttaaaacacattttttcatacaaaaatatatttgatccatgcttaaaagcaaaattaacaattacacatttcaaacaatatatatatatatataattattttcttttgcaaaatctatattaatttcccttatctcataagaactcctaaaaaactttggagaaaaataattatggaaaatctattatttacctaacaaagtataagagaaataactattacatttatctaaaattataggtttaacaatcctaaaattttaggtattcaaattaatgtttttaattatgaaagataatttaatctattcctattttagaaaaatttattcctattttagaaaaattaataaatttctaattcatataaaatttaaattttattttcaatttatttattaggacacaacctaatttaattaaattacaatttatttcactaattaaattttatgctatttattaacttgcacccatcattagtataattataatgccaaaaactttattttacttccttttatttataaattctattatctcactatcagtttttttttttaaattacacataaccaatgcacaacaactcttcaccgttattattctaccattgttaatagaataatatatatatatatatatatatatatattaaccaccaaacagttccatacatatcttcctttattattaatattatttttattattcttatttttcccatcatacttattcttttccactggctcaacacccaagcctgcatatatatattaatattttccaataccttaatgcacatataataatatatttatttacttatttaatttttgaaatttcattatttagatctattcatttaagaaaattttgaatttccatattttcatcaatgggacaaactatattcataatttcaatattttgacctaaaatttttaaataaattaaccccaacctaaatcgaaattttccaaagaaaatttttttttttcatctaaaaacttaagatttcccaattttcaataataaatcaactcataatcttaaatttccaatattttgatattaaaaagaattaaataaactaaccctaatctatttttttttcaaagaatatctaacgtgtttagattaactaattattagaaaaattaggttaatccaaacctatggtaatcatcttaaagggaggatgaatagggtgatggtccatttttgcaatttaaactatgtgaatgtaagagacaaatatatgcaagtatataataaaacaatattaaagcaattgcatataaagtaaaggagtaggggaaagagaatgaaaacacaagatttttatagtggttcagcacaatccgacctacattcactattctctagcttcaatctcaaacttgaggttccactaattcaaggcttccaaaccaagtcttcaagcaatacaattggattatggtttcaatccacctcttggatttttggctccaagcaccttttacacttctcaagagatacaccgctcttgaacaacctctcaagtgatactccacacttgagaatccctaagtgatacttcacacttagattcttcctctcaaagatatacaaatacttttacaaactcatagtacaaaactttaggctcaaatgatataagtaaactaggattgaatggtgcactaataatatgcaagttttagaacaaaggtgcactaaaaaatactctccaaatgctcaaatatattaaagaaagatttaggaaggttaaactcatgaaacaatgaagattgaagcttttttatagaagaaaacaactaaactagttgttgggggtttgaccggtcaagctgggggtcgatcggttgactaaccgttagcatttaatgtttggtagataaccgttagaccttgatcgccccttaatcggacctcgaccagttgaggtgggggtcgaccggctcctcatccggttgatcaaccgttctggaaaagagaaaaagttttttgcacccctcgaccggttgagctgcggtcgacctactcctagactggttgagttaagggtcgacttgctcctcgaccggttcaaccagttgagccgtttttggttcaacaaccaaaattttcaacttaaaaaccttttaaacaagtttggaaaacatttgacacaaggttttaattgaaaacatgaaatcatcctattttaaaggatttaaaaagaaaaaactcttggataatttttatgcataagtaaagaatgtaatgcatgaaaattcgagtgcaccaacaaccttacaaagagattttatgaagtttgggtcttgaaaagaacttctttttgaagtcttcttcttcttattaatttctctttggcttattttgttcgtgtgattgtcactttggaattcttcttgtttaatcacacttgaaatataatattagtttcaaacattgttttgttatcatcaaaactgagattaaccaaatcttgaaatattaaccaccaaacaactccatacatattttcctttattattaatattattttattattcttatttttcccatcatactcattcttttccatacactcaacacccaagcctacatattatatatttatttattttttttatttttttttaatattttccaataccttaagtcacatataataatatatttatttactcatttaatttttgaaattttattgcttagatctattcatttaaaaaaaattgaatttatctttttttattaatggaacaacctatattcataatttcaatattttgacctaaaatttttaaatagattaaccctagtctaaatcaaaatcttccaaagatttttttttttttttcatctaaaaacttaaaatttcccaatttccaataataaatcaacccataatcttaaatttccaatattttgatattaaaaagaattaaataaactaaccctaatctaattttttttttcaaagaatatatagtgtgtttagaactaactaatgaatataatatattaatttagggttagaatcttacctgaaaaaatcttaacttcaaactctaaacttctaaaccttcagccctacgatctccaattctctaattatggttgatagggttttctgaataaagaaggcaagaggaaaatctaatttatacctaggattatcaattgtaaaatgactctttctcctttaatgagtttaattaattaattaattattttatgatttactattttgcccctagagttaattttggggtgttacacttccatgttactcaatctcatttaccctaattataatttatgaggataaatataatcaagatttagaataaattttaagttaattttattaaataatcttaataattaaagtaaaaattaagtaataaattttaaatcaataatttaaatataattaaacttaaaatcaacttaagtcattaagtaatgagtattaaattttaccaaatacctccctactcatagatattaagtgtttagatacaatgacaaccattagagagaggttcagtttcaacaaaatactaaaaaattaaataaataaatgctaagggaattttttatatttggttttatgataaaaaaaaatatgaaaaagaaaatcaaatatgactaaattagttaaaaatttatgcacttttaaattatttgatttttatatagaggaattaaaataaaagcaataagtttaaagtagatataaacataatttattgattttaaatctattttttttctttttattttccatttctcatattttctcttctagaaccaaacatggtagaagaatttgcttgggccttacaagaaatggttttggcctagtccaactttacaagcccacaaaatagggcctgggtccaatcttgacattacctctggcagatttggtccaggcccatttttgaagtctagttcatatcaagccaaccttgggcataagaagatttaaactttaaaacattgaagaaaaacaattaagtcatcatttttcttggatcaccgccaatcatcacgagtacaaatttttacaccacaagtaatttacatatctaatatcttagcaaaatttatttttattttttctattttagtgaacaggaaaaaaaaaattactttcattttcactaggaagaccttctggctattttcaaaatttcaatggctcaatcaaggtaaaacttgaatcaatttgtcaccaacttgaaatccaaaatccggtgtcgaatcagagattcatcactacattacctctccatacttacatgtatatgttaagtttgataaaatgtcaccttatgctaaaattctcagagaaggctgcacatcttttaccctc

SEQ ID NO: 12251 - DNA, 11789 bp, Vitis vinifera
  Intron number 12 from transcript GSVIVT01026355001 (locus GSVIVG01026355001) derived from phytozome v7.0 (chr-ID chr 4; pos 14776299 to 14788087)
atacttgtttttgatcagaaaataagactgtcataatgctgatggcttctttaatatggttggaaaaacagaaaatagacaacattgaatggggtatataattcctttttcttttataggactagctttagtaattctcatggtggttgtgaacaagcatgcatatgtgcattgattgtagtcttcagaatcattaccgtaagaggtggagaaatgtgtcactgtagaactcaattctttatttttaattggagttagttttgtcaaagaaaaacatagaattattgagctaattccttaaacaagtttgagaagtgaatcccttttaaatcatttgtcagattactggttgaatcttctaaacaagtttgagaagtgaatcctttttaaatcattgtttgattattggttgaatctgctaataagcagtgacagttgtttatatattgatttctaaattgccataaaatttgttagattgcgacaagaatattccagtgttctatgatgctggcaaaagttgcttatcttctgaaaatgtatgatagattagaatatgcttttcggaattttggtcaattatgaaagttttgatttttgaaatacaactacatgaatctggtatacatttattaagcaatatctttgttgagagagagagagagagagaaaggagaaaaaccttattttcattcatctaatctctacttacaattgagagatatatatatacaaggctaggagtcctaactaccatacatgtgacctatattaacaaggaaagatagtatactatacatacattatattcaacactccccctcaagctgaagcatatacgtcatatgcaccaagcttgttacaaatatatttaatcctaggacctctgagagatttagtgaagatgtctgctagttgatcatttgaattgacaaaacttgtagcaacacatcctgatgcgatcttctctctaatgaaatgacagtcaacttcaatatgcttggtcctttcatgaaagactggattggatgcaatatgtaatgcggcctggttatcacagatgagtttcatctgttcatcctttccaaatcgcaactcctgaagaagatgtctcaaccatatgagttcacatgttgccaaagccatagctcgatactcggctttagcgctagatctggccactacatcttgtttcttactcttccaagatattagattacctccaataaaaacacagtaccctgaagtagaacgtctatctgtgggtgagccagcccaatctgcatctgtgtaaccaacaacttgagtataacctctgttctcgtacaatacaccttggcctggtgtacttttgatatatcgaagaatacagattacggcatcccaatggctatcacatggtgactgtaggaattgactaacaacactcacaggaaaagaaatgtctggacgagtaatggtgagatagttcaatttacctacgagccgtcgatatctcccagggtctcctaaaggctccccctgtcctggtacaagtttgacattcggatccataggtgtgtctaccggtttacagtctaacataccggtttcttccaggatgtctaaagcatacttcctttgagaaaggactacaccagaactggattgagctatctcaattcccaagaaatacttgagtttccccaagtctttggtctgaaagtgggtaaaaagatgttgctttagtttctgtataccatcctgatcactgcctgtaatgacgatgtcgtccacataaacaaccagataaatacactgccccaaggagttatgatgataaaaaaccgaatggtctgctgtactgcgaagcatgccaaactcttgaacaacagaactaaaacggctaaaccatgctcgaggagattgtttcaagccatatagagaacggtgtaacctgcacactaaaccagactccccctgagcaacaaaaccaggaggttgctccatataaacttcctcggcaagatcaccatgaaggaaggcatttttaatatccagctgataaagaggccaagagcacatagcagccatggagagaagcaagcggacagaagcaatcttggcaacaggggagaatgtgtcaccataatcagaaccataaacttgagtatagcctttagcaactaagcgggccttaaggcgatcaacctgaccatcaggaccaaccttaactacatagacccaacgacaaccaactgtagatttactagggggtaaaacaacaagatcccaagtgccattagagtgcagagcagccatttcatcaaccattgcctgtcgccagcctggatgggaaagagcttcatgggtgctcttgggaagagaaacaaaggatatagcagaaacaaaagcagaatagggtgaagatgatcgatgataactcaaaaaattgtaaataggatgagggttacgagtagagcgagtacctttccgaacagcaatgggtaagtcattaggagaaggcagagccggggcaggtgaagccgaagggataggaagtgagtcagcaggtgcctcaggagaagggagaggagcaacgatacgcgggcgacgatgataaacctgaagtggtcgagggggcatagcttcaggtggggagacaatgggaatgggcaagacttcagaaacgggaagagactcagaagtggtggaaaagaatggtgagtcctcaaagaaggtgacatcagcggagataaagtaccgatgagtctcaagggaataacaacgataacccttctgaagtctggaatatcccaagaagaggcacttcatggctttggcggaaagcttgtcctgtccaggagtgagaatatgaacaaagcaagtacaaccaaagacacgaggaggaaggaaataaagtggttggtcagggaaaagaagggagtgaggaatctgatcgtgtaagacagaggagggcatacgattaatcaaataacaagcggtaagaacagcgtccccccaaaaacgaaaaggaacgtgactatggaggaggagagtacgagctgtctcaacaagatgtcaattcttgcgttcagctaccccattttgttgaggagtatgagcacaagaagactgatgaagaatcccatgatgagacataaacgaagtaaattgggctgaaaaatattccctggcattgtcactgcgtaacacacgaatagaaatattgaactgggtttggatttcagtatgaaatttctggaaaatagagaataactcagctcgatttttcattaaaaataaccaagtacatcgagaatagtcatcaatgaaagtgacaaaatactgaaatcctaaagtagatgcagtccgacaaggaccccaaacatcagtgtggacaagctcaaaaagagactttgcccgattattctaatgctttgggaacgagacacgagtatgtttcccaagctgacatgactcacacggaagcgacgacaaagtggaaaaacgaggaaccatcttctggaacttggagagactagggtggcccagacgattgtgaatgaggagaggagcatcagtggaaatgcaaactgcaggagatgaatctgaggtgaggtgatagaggccttgagactcacgtcctatgccaatcgtcttccccgtactccggtcctgcaaggtcacaaatttatcagaaaaggtaatagagcaattaagagtacgagtgattttgctgatggaaataagattaaaaggacattcaggagtataaaggacagaagtgagaggtagagaaggcagaggaagggccaaaccaatacctttagccacagtttgagaaccattagctaaggtaacagtaggtaaatcagaggtagtagtgatagaggagaaaagatccttattaccagataggtgatcagatgctccagaatctagaatccagggtccaagagaagatgtgtgggtaaggcaagcagaggcattaccaggctgggcaacagaggcaatagaagcctgagatgtctgagatgcggaggagctcggaggctgaggcagcggagaatcagaggactgggccatatgggcagtgcgaggaggtcttccatgtaactgatagcaacgatcgcgagtgtggccaagtttattgcaataggtgcaatgaggacgttggcctcgacctcgggtaccactgcgtcctcctcgagaggtagtttgagaaactaacacagaagaatctgaagcgctatcagatggcaaagtctgagtggacgagagacggaggaggcgagcaaacacgtcatccaaggacggaactgatgaactaccaagaatctgatcacgaataggctcaagatccggacggaggccaataagagtaaggaccatgaagaacttgtcaagctgcgtttgttgagccccaacatcaggagtaagaggcatcacagtcaagaactgctccttaagagaggcaatctgaccaatataagtagatagatccaagtcctgttggctgagatggacaatagcagaagccaccttatagagacgctggatatcattcatgtataatcctttggcctgagtccaaaatttaaaacaagttttataggcctaaagatgaagaagaatccggggatcaaacgattgccataatacgctacttaactgggcatctatcttcctccactgtacgcggtcaacctcagggatatctgcctcctgggtaaccaagtgatcttcatatccttgacccataaaccaaagttcaacagaggcagaccaggagagataattctcactgccaaccaatttctctgaggtaatcagaggagatccagagagaacagaggtaaagatctgatttttggtggccatattaacgtatttggatcgaagagagccctggagaggaagagaagcagcacccaagcctcggagatggagaggaagccctgtcagatgtggtcggaatggcaagaaagccaaaaacaggaaaaaaagtggagatgcagggctcggggaggactgccggagggctagaaggccaagacggcgccggacgagcctggagaggtgtcggacgtggccggaaagtgagccacgcgccgtcacgcgccggcgcgtgggtgacagtccgacggggaagatcggcgtgtgggggcacgtgagactccggttgccggtggggtttccactggcgtgtagatcagcctccggcggttcgaaatatgtggtcggtgcccggaaaagaggtcgccggaaaaattcgccgaaaagggttgccggcgtggtagagatccgacggcgatgaggttgtccggggtggttcgggaagggaatgaggggaccggagtgaaacacggtcactggacggttcgccggaattgagtacacggctaaaccgaaaaaaaattaggttttctcctttggctctgataccatgttgagagagagagagagagaaaggagaaaaaccttattttcattcatctaatctctacttacagttgagagatatatatatacaaggctaggagtcctaactaccatacatgtgacctatattaacaaggaaagatagtatactatacatacattatattcaacaatctttatgtaggcaattaaaatgggaaatgatatttgtgtgtgtatgaactgttagttaagatgtattagtccaaattttggtctatcaatgaaattatttggatttcttttaaatttttgtgacatctttcattaatgaaatgatgtggttttttattggttgcttatactgtctcctatcctttcatgggagttttttctaataaaaagtagtgagatttgattgaggatgacaaagacactatggcctatgggatcttattcacttccattcctttttttgggactcttgtacatttgcctttaatggcattcctctcaatgttgttcaacttgattggtccttggtgtgtacaacaaaagggcttgaatagcaacgagaggatgattttagctttgaatggatggatgctaactaagaaggggaaacttatagttaaatccttcctcttttttgaggcaggaaagaacggttgttttctctataaaagctatttggaacctaatgatcttgactaaagtaggtttctttgcataggaagcttcttggggaaaggttttgacattgggtaccaattgcaaagaggaggatggtctttggtgaaccattgctttctttgtatggaagagaaagagtccgtagatcacattcttctacattgtgcttgagctcgaggattatggaatgattttctccttgtttggcattgcatgtgtaataccatgttgggtaaaaaagactctgtttaggtgacatggttcctttgtgggtaaaaaccagaagaaagtttggagggttatccccttgtgtgtattttcgacattttggaaggaaaggaaccaaggaacttttgaaagcaaagaaatgtttaatcatgcactaaagttctattttctttgtaatattttgttgtgggttaggatgtgcatggataaaggctccctaaccatcttagattttatagaccgattaggatctccttaaaggagttgttgttaagttgtgtggagcttaaattttttatttgaaatctattttaaatattctacatacgtattagtttgccttaattttctcattatataaggaattattagggtgaggatgtgtgaaaacagaggagtgttattaagcttgatatcaccttgtatttttctttttgatcatagtgaaaattctgtaatggcaaagtggatttagttctcacattgaaagtgaatcactataaatcttgtgtgtgttttatttattttatgtgtctttgctcttgtaaatgaggattttttcttaacaagtggctggagaagatggatctaagcttggaattaactagtttgatggtacaaattttgcattttagagaatgctaatcaaagattatctctacagtaaaaagttgcatcttcctcttcttgaatagaaattagaatcaatgtttgaagccgattacaatctccttaataggcaagtgttgggggtcatcaaattaacattgtgaaagaacgtgacacataacgtggcgaaggagaaaaccataaagggactaatgaaggtcctatctaacatgtatgagaagccctctgcaaataacaaggtttatctcatgaaaaaattatttaatctgaagatgggagaaggtactctagtgatagagcatctgaatgaatttaacatgacaatcaattgtccttggttgaaatcaattttgacgagaaagtttgtgccttaattcttttggtctcactaccaaatagttgggagcccacgagagcaatagttagtaattctacagggaactcaaaattaaagttcaatgatttcaaagatcaaattcttgctgaggaagtacacaagaaagatttgggtgaagcaacaacatcaaattgtgccctaaatattggtaccagaggtaagagttatgataggaatttttaccaggctattgtagatcgaattcaaagaatggaagaggaaaatccaaatcttggcgaaatgtggaatgttggaattgtggcaagcctagtcacataaagaagaattgcagagcattgaaggacctgtacacgacttgtgtgctttggtgcacccttttgataggtagtgttattatattttttgcttgcttattaagaaggccaaatatgaagaagaaaaacctgaagccttagggtgatacttttacacaagctttggtgaagcttaaccattgagactattgccagtaaaaacaaacccttcccttgccctaagtcatccttaaacctttttttgattggaaacgacacagagatatattgatagataaaaagaagtacaaaaagaaggatgaggaatcctctcgccatagaaagctaaactacagtaaattatactgaaaaacaagcgaacactctaaaaagaccattccttatggagtacacaccgctaaccaatcaagttgtatcacattaaggggagtctccataaaaaccttggaacaaaaatcccaaagagaagcaaggaaaacaatagagtcccaaagatactctgaattccttgttttatcctaaaaaatcctcgcatttctttcccaccacacaacccgaataagagcgatgcttgcagcttgccacaaaactatccccctcttagaagaaccaaaaccattaaatttgatggacatcatgtcaaagatgctcctcggggggacccaatccatcttagctaactgaaataacctgtgtcacaactcaatcgtcaaagagcaatgaagaaaaatatgatttgctgattcccatacttcatgcacataatacaaatatcaggactaagggctttgtagggtcttctcacttgtagcatgtcattagtattcaccttcttgtgtgccactaatcagacaaaggacttcactttgaaaggaacttgagaattccaaacgaacttagaagggaaaacctgaggagatccagaaaattgagataatgctagaaagaaggatttaactgaaaaaagccctgaataagataacggccaaaatctggcatctggaaccgaaggagataaatgcaatccattgagagactgcatgaggccttctaagtcctctatctcagaatctgacaggttacgatggaaatttaaattccaagagaaaggacgagtaggaccgagaactgaagaaatagggatgtttttatccaagactactctaaatagtcttggatattgggttcccaaaggttggtccccccaccacaaatcttcccagaaccgaattctttccccatttcctaccacaaaccgagtaaacaaggaaaactcctgaaagacttgtgcaatagccttccaaggatagcaatgtgaccatctgactaaagtgttagcatcccaaccattggagtgtgaaccataaatgcttagtatgacctgatgccatagagctgaaccctctctagggtacctccacagccatttccctaaaagagcgagattcctcagagaaatattcccaaaacccaaaccccctatttcctttggtttacacacaacatcccacctcactaaatgatctcttttgccttccccaatccctgaccataaaaaatccctttgcaacctctcaatttttgtagcgactgaagcgggtaacttaaataaagaaagaaagtaacagggcatatgggtaaggcaagattggataagagttttaaatctgcatattgagtcctacctaatcacatgatgtttaacatttctcccaacctttgaccataagaaatctttctaattttcacaaatgtggaagcaccctaattaggattctaaagatagaggaaataggagggacatgtgcaaggcagaataaacttgaagtgattctgtcatctaacagaagaaggaccttgttctaaccatctgagtttttaggcacttgacgattggattctaagaagtaggatctctcaagttgccatctaaggggatgcttaggtaactcattggccactcaatagtacacaacctagggaagacagtaggcattaaagctggttcttatcatcttttggaaagatatgatacaaagaagctactttgcaacctttgtgatatttgtggtttacgaaagataaactatatgaaattaatcaaaggcaaattgaatagggaagattttctttggtcaagggttggtgaaggaaagagaaaccatctcattagttgtgaacaattgtacaagcctaagttggaaggaggtttgggaatagggaaaatttagttgataaatagcattctactaggaaaatggctttggaagtaccctagggaaagtgatgctctttggaataaggtaatattgagtatctatgagactcatcccaatggttgggatgccaacgttatagctagatggtcacatcaacccccctagaaggccattacgctaatttcccaggatttctcatgtcatacttggtttgaggtgggagatggagcaaggatttgcttttgggaagacttgtgttggtgcaaacctttttgttcttgatttctaaatctttttagagttgtggcaattaaaaatcctcgatttcatctattcttggtccctctcttcctttttcatggaactttatcttttatcataacctcaccaatatggagatagaggacctagaaagactcatgtccttccttttttcatgtactttcgagaccgtccgtccttgataggagagcttggtctttacttcttcatacatattcgttgtgaaatcattcattttagtcttatccaatttgccaactcctatccccttctctctagaaaaactcatttggcaatctaaaaccttatttaaagtcaaggcttttgcatggttagtggtcaataggaaggtcaatactaatgtcaagctacatgtgagaaaacctcattaaacttttagttctgattgttgcattatgtgtatgaggaacagtgaatcagttggtcatctctttttacactttgatgactttggcttcgacatagattattcagcctagccgggctagctttggtctgggctagatttggtctgggccagatttggtccctcctaggtgcatttttgacataaggaccatttcctttagaggttttgggagtacaggtaaaggcaaaactattcgaaaagttgcatgcctcacattgatctagatggtatgatgggaaagaaatggaaggactttttaggataagcggagaagtttagagacaatatgagaattaatatacttctaattcctcttattggggttaaagaacttcaactttcaagagaacttcaacttttaagggaactcctcccactgttattcaactcaattggaatttggtgtgtaattaaggggttagaagtacaaatcttggagcaaagattctgcctttttgtagatgtattgttccttaaagagagcacaaacacatttccttggtatagttttagggtgtatcggtaatatcatattgatctattattttgattacagtttgtatattaaaatcctcccactgttattcaactaaattggaatttggtgtgtaattaaggggttagaaatgcaaatcttggagcaaagattctgcctttttgtagatgtattgttccttaaagaaagcacaaccgcatttcctttgtatagttttggggtatatcggtaatatcatgttgacctattattttgattatagtttgtatatctgtgaaggatttctcatccttcaatgaaatatttcaaatttttattcaatgaatttttgtttctgatcaacaaaaagaaaaaaaaaaaaaagaaggcaaaccgatttttatttttcttcattttgttgaactgatattctagtttatcagttcggtccaactttcaagttatcaataaaatacttgcatttgtcttgattttgggaattttatttatttatttcattaatgagattatataggtcttgtttggttgtttagttagccccttttttttcatctcatatatgctataaattctcctatgaactcaatttttcatttgcatcctttaaatggaatgttagtgtctcctacaattgtctcagattttgtatatggttttatcttttgtatagtgaattccttgacttaattcacttatcagagacattacctgatcatcaatcacattggagctattc

SEQ ID NO: 12252 - DNA, 20086 bp, Vitis vinifera
  Intron number 1 from transcript GSVIVT01004884001 (locus G SVIVG01004884001) derived from phytozome v7.0 (chr-ID chrU n; pos 16392675 to 16412760 reverse strand)
tcgcctaattcacgccataggattgtcaacaaaatgtgagtattttatttcaattaccaaatgcaaatgttttaaggatattgagaaatttctagtgttggaacttaaaactacttttcaataggaattcttggtattggttagggtttgaaactatagttcttaaatacataaattcctttttaacttgtaagcaacaaggaccaataacccacttgcccaattgacatggccttaaaccccaaacaacttgtatcatattactcaaaatctacaagcgtgtttgaccttgtcatttaaaaacatttttttaatattttttaaaaaacttttaaaaattaaaatgaaataaaaaataattttaagaaacacaagtaggaattgttttcacctgttttttttaaaataaaaataaaaatatggctttgtttgattatgctttttaaaacttcttgttaagttaaagaataaaaaattgtttttaaaagcaatgataaatgggtcctaagatttcttaattaggattcttctataaaatacgaaaaagattaaaatttggtttttaaataatataatgatttatttaactataggttaaattttctatcaaaataaaaaattatttaaaattttaatattcttattttggtcaatatgttacaataataaatacttagacattatttttcaaacttatggtaattttaaatcataattaaccaaagtccttaaactactttctaattaaatttccctttaaataataaaaagaaattttctcaaaaaaaaaaatggcagtaacatttatttaatataatattgaaatttctatttataaaagtttatagtaaaatataaacaatttatttaggaggcgttggaatatacttctcaaagaaaacaattttttttttcttttgggtcctttggatgtttaggatgaggttaaaaaaataattggagggcccaactaaaaatacaagcccattgggtcctttcattccacaaaacaaaagactgaaaaggcacaacgaaaatgcaagtccattaggtactttcattcccttggttggatgcctattctgaggaatttaattcttagcccaacctggcccagatatttttaaggggtcacgttcgagcttcatttttatttgaggtgaggccaaaaatttaagttgggcaagccaattggcccaattcaggttaaaaataaatttggcacaacctaatctttgggtacatggtgattaaatttttagcttaaatatgaattacaatactttaacttaaaaaaattgaaggaaaaaaaaatgaaaaaccgatttgggtcccatattaaagttttcaaaaaattatttatattttaaattattatttaatataaaaaataattaaacaacaccaaagatttgttctaaaaaaataatttatttttaaaacaaaattttaaaaataataattaaaaacatttttttatattttttaaacaatttttaaaattaaaatgaaataaaaaaataattttataaacacaagtaggaatttattttagctattttttaaaaataaaaataaaaataaaaatataggtttgtttgattatgttttttaaaacttgtttttaagttaaagaataaaaaatagtttttaaaatcaattttcaaaaaatatgccaaacgggtcctaagattgcttagttagggttcttctataaaagatgaaacatattaaaatttggtgtttaaataatataatgatttatttaactataggttaaattttctatcaaaataaaaaattatttaaaattttaatattcttattctggtcaatatgtcacaatgataaatacttagatattatttttaaaacttatggtaattttaaatcataattaaccaaattccttaaactactttttaattatatttccctttaactaattaaaagcgattttctctataaaaaaaaagaaaaaaaaaaggtagtaatatttatttattataatattgaaatttctatttataaaagtttatagtaaaatattaacaatttatttaggaggtgttgggatatacttctcaaagaaaacaattttttgtttcttttgggtccttgggatgtttaggatgaggttaaaaaaataattgaagggccctactaaaaatacaagcccattgggtcatttcattccacagaacaaaagactgaaaaggcacaacgaatgcaagcccattaggtaccttcattccctttattggatgcctattatgaggaatttaattcttagcccaacctggcccaaatatttttaaggggtcatgttcaggcttcgtttttatttgaggtgaggcccaaaattcaagttgggcaagccaatgggccgaattcaggtttaaaataaatttggcacaaccaaatctttgggtacatggtgattaaaattttagcttaaatatcaatcacaatactttaacttaaaaaaattgaaggaaaaaaaatgaaaaaccaatttgtgtcccatattaaagttttcaaaaaattatttatatttaaaattattatttaatataaaaaataattaaaaaacactaaagacttgttctaaaaataatagtttatttttaaaactaaattttaaaaataataattaaaaacatttttttatatatatttttaaacaatttttaaaattaaaatgaaataaaaaataatttttagaaacagaagtatcaattgttttcagctgttttttaaaaataaaaataaaaatatgggtttgttttattatgtttctaaaaacttgtttttaagttaaagaataaaaaatagtttttaaaagcaatttttagaaaatatgccaaacgagttctaagattgcttagttagggttcttctgaaaaagatgaaacatattaaaatttgatgtttaaataatataatgatttatttaactataggttaaattttctatcaaaataaaaaattatttaaaattttaatattcttattctggtcaatatgttacaatgataaatatttagatattatttttcaaacttatgataattttaaatcataattaaccaaattccttaaactactttctaattaaatttccctttaactacttaaaagagatttctcaaaaaaaaaaaatgtagtaatatttatttattataatattaaaatttctatttatcaaagtttataataaaatattagcaatttatttaggaggcgttggaatatacttctcaaagaatacaatttttttttttcttttgggtccatgggatgtttaggatgaggttaaaaaaataattggagggcccaactaaaaatacaagcccattgggcaattccattccaacaaacaaaagacagaaaaggcctaactaaaatgaaggcccattgggtactttcattcccttggttggatggctattctaaggaatttatttcttagcccaacctggcccagatattttttaagtggttaaggttcgagcttcgcttttatttgaggtgaggcccaaaattcaagttgggaaagccaatgggccgaattcatgttaaaaataaatttggcacaacccaatctttgggtacatggtgattaaatttttagcttaaatatcaattacattaattgtggaccccgtatttcggctcatgcgcttcaactcgatgacgaactcgctttttattttgaaaaatgatttatttattaagaaaatgcttgaagttgtcacttatttttgttttatttttaacgggtaaacaaaataagaaagaaaaccctaagtgtgactccttatttatttattataatattgaaatttctatttataaaagtttatagtaaaatattaacaatttatttaggagacgatgggatatacttctcaaagaaaacaatttttttttttcttttgggtccttggggtgtttaggatgaggttaaaaaaataattggagggtccaactaataatacaagcccattgggtaattccattccaacaaataaaagactgaaaaggccaaactaaaatgaaagcccattgggtactttcattcccttggttggatggctattatgaggaatttatttattagcccaacctagcccaaatatttttaagtggttaaggttcgaccttcgcttttatttgaggtgaggcccaaaattcaagttgggcaagctaatgggccgaatttaggttaaaaataaatttggcacaacccaatctttgggtacatggtgattaaatttttagcttaaatatcaattacattacttgtggaccccgcatttcggctcatgcgcttcaactcgatggtgaactcgctttttattttgaaaaatgatttatttattaagaaaatgacttggagtcgtcacttatttttgttttatttttaaagggtaaacaaaataagaaagaaaaccctaagtgtgactccttatttatttattataatattgaaatttctatttataaaagtttatagtaaaatattaacaatttatttaggagacgatgggatatacttctcgaagaaaacaaatttgttttttcttttgggtccttggggtgtttaggatgaggttaaaaaaataattggagggtccaactaaaaatacaagcccattgggcaattctattccaacaaataaaagactgaaaaggccaaactaaaatgaaagcccattgggtacttccattcctttggttggatggctattatgaggaatttatttatcagcccaagctggcccagatatttttaagtggttaaggttcaagcttcacttttatttgaggtgaggcccaatattcaagttgggcaagccaatgggccgaattcaggttaaaaataaatttggcacaacccaatctttgggtacatggtgattacatttttagcttaaatatcaattacattacttgtggaccccgcatttcggctcatgcacttaacctcaatggcgaactcgctttttattttgaaaaatgatttatttattaagaaaatgcttggagtcgtcacttatttttgttttatttttaaagggtaaacaaaataagaaagaaaacactaagtgtgactccttatttatttattataatattgaaatttctatttataaaattttatagtaaaatatcaacaatttatttaggagacgatggaatatacttctcaaagaaaataatttttttttttcttttgggtccttggggtgtttaggatgaggttaaaaaaataattggagggtccaactaataatacaagcccattgggtaattccattccaataaataaaagactgaaaaggccaaactaaaatgaaagcccattgggtactttcattcccttggtttgatggctattatgaggaatttatttattagcccaacctggcccaaatatttttaagtggttaaggttcgaccttcgcttttatttgaggtgaggcccaaaattcaagttgggcaagctaatgggccgaatttaggttaaaaataaatttggcacaacccaatctttgggtacatggtgattaaatttttagcttaaatatcaattacattacttgtggaccccgcatttcggctcatgcgcttcaactcgatggtgaactcgctttttattttgaaaaatgatttatttattaagaaaatgacttggagtcgtcacttatttttgttttatttttaaagggtaaacaaaataagaaagaaaaccctaagtgtgactccttatttatttattataatattgaaatttctatttataaaagtttatagtaaaatattaacaatttatttaggaggcgttgggatatacttctcaaagaaaacaattttttttttcttttgggtccttggggtgtttaggatgaggttaaaaaaataattggagggtccaactaaaaatacaagcccattgggtaattccattccaacaaacaaaagaccgaaaaagccaaactaaaatgaaagcccattgggtactttcattcccttggttggatggctattatgaggaatttatttcttaccccaacgtagcccaaatatttttaagtggttaaggttcgagcttcgcttttatttgaggtgaggcccaaaatttaagttgggcaagccaatgggccggattcatgttaaaaataaatttggcacaacccaatctttgggtacatggagattaaatttttagcttaaatatcaattacaatacttgtggaccccgcatttcggctcatgcgcttcaactcgatggcaaactagctttttattttgaaaaatgatttatttattaacaaattgacttggagtcgtcacttattttttatttttttttaaagtgtaaacaaaataagaaagaaaacactaagtgtgactccttatttatttatttgtttatttatttataaataactaaatagtaatatttatttattataatattgaaatttctatgtataaaagtttatagtaaaatattaacaatttatttaggagacgttgggatatacttctcaaagaaaacaattttttttttcttttgggttcttgggctgcttaggatgaggttaaaaaaataattggagggtctaactaaaaatacaagcccattgggtaattccattccaacaaacaaaagactgaaaaggccaaactaaaatgaaaacccactgggtactttcattcccttggttagatggctattttgaggaatttatttcttagcccaacctggcccagatatttttaagttgttaaggttcaagcttcgcttttatttgaggtgaggcccaaaattcaagttgggcaagccaatgggccgaattcaacttaaaaataaatttggcacaacccaatctttgggtacatggtgattaaatttttagcttaaatatcaattacaatacttgtggaccccgtatttcggctcatgcgcttcaactcgatggcaaactcgctttttattttgaaaaatgatttatttattaagaaagtgacttggagtcgtcacttattttttttaaagtgtaaacaaaataagaaagaaaaccctaagtgtgactccttatttatttattataatattgaaatttcaatttataaaagtttatagtaaaatattaacaaattatttaggaggcgttgggatatacttctctaagaaaacaaatttttttttttcttttgggtccttggagtgtttaggatgaggttaaaaaaataattggaagatccaactaaaaatacaagcccattgggtcattccattccaacaaacaaatgagtgaaaaggcccaactaaaaaggaagcccattgtgtactttcattgtcttggttggatgtctattctgaggaatttatttattagcccaaccttgcccagatatttttaaggggttaaggtttgagcttcgcttttatttaaggtgaggcccaaaatttatgttgggcaagccaatggatagaatttaggttaaaaataaatttggcacaacccaatctctgggtacatggtgattaaatttttagcttaaatatcaattacaacactttaatttaaaaaaattgaaggaaaaaaaatgaaaaaccaatttgtgtctcatattaaagttttcaaaaacttatttatattttaaattattatttaatataaaaaataattaaaaaacaccaaagattttttctaaaaataataatttatttttaaaacaaaatttaaaaataataattaaaaatatttttttataatattttaaacaatttttaaaattaaaatgaaataaaaaataatttttagaaacacaagtaggaattgttttcaactgttttttttaaaaaataaaaatgaaaatatgggtttgtttgattatgttttttaaaacttgttgttaagttaaagaataaaaaatagtttttaaaagcaattttcagaaaatatgccaaacgggtcctaagattgcttagttagggttcttctataaaagatgaaacatattaaaatttggtttttaaataatataatgattcatttaactataggttaaattttctatcaaaataaagaattatttaaaattttaatattcttattttggtcaatatgttacaatgataaatacttagatattatttttcaaacttacggtaattttaaatcataattaaccaaattccttaaactactttctaattaaatttccctttacctaattaaaagtttttctcaaaaaaaaaaaaaaaagcagtaatatttatttattatgatattgaaatttctatttataaaagtttatagtaaaatattaataatttatttaggaggcgttgggatatacttctcaaagaaaacaatttttttttcttttgggtccttggggtgtttaggatgaggttaaaaaaataattggagggtccaactaaaaatacaagcccattgggtaattccattccaacaaacaaaagactaaaaaggccaaactaaaatgaaagcccattgggtactttcattcccttggttggatggctattctggggaatttatttcttagcccaacctaacccaaatatttttaagtggttaaggttcgagcttcgcttttatttgaggtgaggcccaaaattcaagttgggcaagtcaatgggtcgaattcaggttaaaaataaatttggcacaacccaatctttgggtacatggtgattaaatttttagcttaaatatcaatgacaatacttgtgtaccccacatttcagctcatgcgcttcaattcgatggcgaactcgctttttattttgaaaaatgatttatttattaagaaaatgacttggagtcgtcacttatttttgtttgatttttaaagggtaaacaaaataagaaagaaaatcctaagtgtgacttcttatttggaaaaggtggtatgtgaaaaccatgtcggggctcgggggtcaggttacttatcgggaaggtacggtaagaaccatagcacccctctaagtccctaaaaacgggtctctactaataaaatgaaataatcatggcaattgataaggaaatcaatggatatttggaactatcatgcacaacgtggagatcaaaacacgcataagaattgccagagtgaaaatgggtgcataccttggcaacgagccataatgtgctattaagaaatcgagttagtgcacaattaatgaacataaaatatggctcacatgtcattaaatcgaatacgaaatcaccaatgacacacctggcgcttcactcaagttcatttttattttaaataaaactttttttgatgttgggcccccaccacaggcattttattttgcatgaatccattccaataactccattatccaaaattacgagattaaattcacgcttatttcaaaacattttaaaatcatggaagttgtgaaaaatgcatgccaaagaaaatgacagcaaattttattggaaaactaatttttggagcctaagaaaaatgcgaagtatgaaaaatttggagatttgaaattatttaacaacctgaattttgaaaattatttacaaaagagggtttggggaatcattttcaaaatcaaagatgatggaacaggaggtagcacgtggcccaaaggtggccatgcataaggtgcaccatgcgcagatcatttcattctaggccccagctggaaaagcaccccttcggttaacattagccaattgattcccactatacgccaccagcattgtcaaccctaaacttatcaatggatgaaaatttcgctccctgtaacccatgcccatcaccattatctgcatcaagcttgtcaacaaatgaaacttctgcataacgactttcaatctccaagtcagtatccaccctaggcgatgattcaactttacctttcacatcttcttcacatggtagaggattaatatataatccattaacctgagtgaatctgatggaattcagaaggggagttcaaagggatgactatagggacccctccccacacgtggcacacatctcctgatgacgcgtggcacacattctcatccgggttaacctcattcggatttccccaagagtacacgtggcacgtctctcctatccggaccccctcaaggagaggcacacgacactcacaaacataacatccggacgactgccacagcacatccggacgatcgacatacattatccggatatgtttgtccggatcattgactgaagtaagcaagtcttacacgttatcacaacaacctgccatggcccacgttccgccacttgcagggtgaaaggacaagaatgaagtgacatcaagtcacttcctacgatcacttcccacgatttctgacaatcgcaacaactaccacgatctctgtcagccgcccgtagggtgatgatggccctgccaccacctagtgtcatcatgacaacacaaaatatctccctgccattaaagagagaaacaaagcctctgatactatatatatgaaccttcacacaaagaagaaggtaagcttgctgtacctagtaaaaggccaactgatttatctctctctctaactatggctgacaaaaccatcggagggtgcgtccggacaccctgtccggacgccttttgcaggtagtgcgattgaatcaagaatctatattggttgagatcgtgcgtccatccatttgacaactacatggatcaccagggacgcgaggcctcaacaatgacttctttcgatgaccattgacagtgcctgaattcagtaaggagagtataggcactgaatggagaacgaagagcaggttcctgatttgttagaattctcttggctcacttcggaacgagtgcccaaaagctcagcgagcttatctaaggccattaccttctcggcctaggtagtgcccacaaatggaccctcctctctcgacattgacgagctgtccatcggattatagtgtcggcgccgaagcatagagctcttcttttcgtcgccgctctccgcagccaaaccaccgttgggattgtcgatttgggtgtcaccttcaagcctagatctgaacttttcgatgtcaacgtgtgtgtagaagtgatcgttctcggattctgtttcctcccaacctgcagagggaatgctgaagggaccgaaaacgagatgtaggtttttcgggatccgaaaattgaccttggagcgtgcccgcctttggtgacctcctagatttttgagcaaaggaaatagaaacgatgaacatgtccaaaaaaaatccctaggacctgattacagcctatttgcactgttcaactcagaaatggcattcacataaccttaagagaaagcacgaagtacgaccttggcttgaacgcgaactatttttataccttgatgaattttggataagcgacgtggaggttaaatgctcatgagagataacggaaatggacttgtgggtgttgagtatgaagagtgggaagatggtggtggtcgtgtgcatggggttccatgtacgtgaaaaataataaaaatgagaagagggtggattggatggatggtgaggggtgaagggcatgggagaatatgagcatgggattaatggaatggggagtggaggttaatgtggccatgtatagccatgcaaaggtgggagagaatgggtttaatgggtatgagtgaaaaatgggtacgtggtgtagagagagaaacgggtatgaagatggagttataggtggtggtgggtatttggttgacaagggggcttaggttcatggggaatgaaaggaagaggaccgaaagagggtcatgaagggtatggatataattggtgaaatgggtaagggggtatgatggtggaaagggatggagaaaagtgtgagaagagtgacggatggccatgcacacatggctatgcatgcaggtatgaaatgggtgtggtgattaggaaaggtggtgagatggaggaataagttgtggcaataggtgtggtggataagtgagagaaacaaggatggccatacatggggggaattggtgttgagtagagagcgagtagtgagagagataacggaaatgggttagtgttcttgctcacgggtggcatgggtgatgggagcatggtgtttgaaatgggtaagtggggtggttggaaaatgggtatgagatgggtgtgaggaaacaggcagtgggtgttgatgatgtagagagagaagagggtggtgacatggttagatagagggtggtgagtggtggaacgtacatggatttcacgcacacaggaagtgatggtgaaaagaatgcaggttaatgggtattggaaaagagtgttgatgggtatgggggattgaaaaatgggtatgaaggtggcttcaatgggaaacacacttttgctactggaatggcattcgccttcttgtcgaatctgtatcaaaagctccaacacccaacctccagcattccagcaggaaacatggcagcagttgtatgccatatataaggagcaaactcatatagggcatcaaccatgacttcaggaccccatcaccaacacccataatgacatgaaccccgcttaagataatgcgtcgatcttcatagaaactggtcccaccaacgcgaacatggacctgtaccctagaatcatcgcctaatgctcgcataaccttttccatttgttgggcaaatcaaattgtaatccatatctgagctttgcatatggcagaaatgagcttggtcacacttattgtcttcgtcatcgttgagcaatgtgcattctgccagtagattcaaagctatcatagcatatgggttcagatttattccatagtaggttcatcaactcatccccttgtatacactcctatcctagtaacttggccattgatgaatatcaccccaccatcatcaagaaacagagccacaaacaaaggagaataaaagcgtgaaaacagagttcgaacccagctctatgtcatggactatcaaagagctagaagcaggtagcatcaacaagaaacaaaagcatgatttttacatatcaagttcagggatgaagccatgcatcaactacttgcaataggagtccaggaaaccaaagtaaaatcacacaaagcatatatgcatgcaaacatattcaacaaaacaaaccagtaatctttgatgcccaaaccaatcaatgaaaatcatactccaaaatctgtaaaaaaaatgtcgtaaagcaatgtgaaaatgaggaaaaatgcgaagtttacagaggctttacctggaagtctcctctctaagcaagcctctagttgcctatctcaagcaacctccatcacaaccctactctctgtcacaaacaccgctcttctcaaaacctcaaaagatctccagttttactcctcactcccttccttttctcctaaccccttctttttttcgtttctctcctaatcctctatgtcaactctcccaactgccttcccctaaaaaaaaactcctttttctccttttacccaccgttttctataaccagccacattttgctcagttgtgtcccctctttctttaattgtgcttcttttctactcaactatgtctcctttttcctaagcagctcgttcgtcagctgcttttctttcacttccgtcgtcgtcatcttgcctgctcaagaatagctcactcatcagtcctctttggttgctagtcctgtccagctaccccatgcagctcaatgttggggtggtaagaaggcgtaaggaagaaggaaaaataaaaaataaaaaatcagaaaacaaaaaaaaaggtcccacatctgagggggtctaaaatactttaacttaaacaaattgaaggaaaaaaaggaaaaaccaatttgtgtcccatattaaagttttcaaaaaatatttatattttaaattattatttaatataaaaaataattaaaaacgcttaagatttattctaataattaaaacaaacttttaaaaagaataattaaaaatcatttttaaatattttttaaacaatttttaaaaagaaaatgaaataaaaaataatttttcgaaacacaagtaggaattgttcacttgtttttttttaaaaaataaaaataaaaatatgggtttgttttattatgtttttaaaaatttgtttttcagttaaagaataaaaaatagtttttaaaagcaattttcagaaatatatgccaaacgggtcctaagtttgcttaattaggcatcttctataaaagatgaaagatattaaaatttggtttttaaataatataatgatttatttaactataggtcaaattttctatcaaaataaaaaattatttaaaatctaaatattcttattcttgtcaatatgttacattgataaatattgagatattatttttcaaacttatgttaattttaaatcatacttaaccaaattccttaaactactttctaattaaattttcctttaactaattaaaagcgattttctcaaaaaaaaaatggttgtaatatttatttattataatattgaaatttctatctataaaagtttatagtaaaatataaacaatttatttaggaggcgttgggatatacttctcaaagaaaacaatttttttttttcttttgggtccttgggttgtttaggatgaggttaaaaaaaataattggagggcctaactaaaaatataagcccattgggtcctttcattccaacaaacaatagactgaaaaggcccaactaaaatgcaagtctattgggtactttcattcccttggttggatgcctattttgaggaatttaattcttagcccaatctggcctaaatatttttaaggagtttaggttcgagtttcacttttatttgaggtaaggcccaaaattcaagttgagcaagctaattggccaaattcaggttaaaaataaatttggcacaacctaatctttgggtacatggtgattaaatttttaacttaaatatcaattacaatactttaacttaaaacaaattgaaggaaaaaaaaaaaccgatttgtgtcccatattaaagttttcaaaaaattattcatattttaatttattatttaatataaaacacctaagatttgttctaaaaataatattttttttaaaataataattaaaaacacttttcatatattttttaaaaaaattttaaaattaaaatgaagtaaaaattaatttttagaaacacaagtaggaattgttttcacctttttttttaaataaaaataaaaatatgggtatgtttgattatatttttaaaacttgtttttaagttaaagaataaaaaatagtttttaaaagcaattttcagaaaatatgccaaacgggtcctaagattgcttaattaggattcttctataaacgatgaaaaatattaaaatttggtttttaaattatataatgatttatttaactataggtcaaattttctatcaacaaaaaaaattatttaaaattttaatattcttattctggtcaaaatgttacaatgataaatacttatatattatttttcaaacttatggtaattttaaatcataattaaccaaattcctgaaactactttctaattaaatttccctttaactaattaaaagcgattttctcaaaaaaaaaaaatggcagtaatatatatttattataatattgaaatttctattcataaaagtttatagtaaaatataaacaatttatttaggaggcattggatatacttttcaaagaaaacattttttttttcttttgggtctttgggctgtttaggatgaggttaaaaaaataattggagggtccaactaaaaatacaagcccattgggtccttttattccaacaaacagaagactgaaaaggcccaactaaaatgcaatcccattgggtactttcattcccttggttggatgcctattatgaggaatttaattcttagcccaacctggcctagatatttttaaggggttcaggtttgagcttcgcttttatttgaggtggggcccaaaattctaggtgggcaagccaatgggccgaatttaggttaaaaataaatttggcacaacctaatctttgggtacatggtgattaaatttttagcttaaatatcaattacaatactttaacttaaacaaattgaaggagaaaaaagaaaaaccaatttgtgtcccatattaaagttttcaaaaaatgatttatattttaaattattatttaatataaaaaaataattaaaaacacctaagatttgttctaaaaataataatttatttttaaaacaaattttcaaaaatttatatttgtcgaaagtttgttaaacctattttttaagttagaattttatttttaaaaaaacaatttaataattgaaaactatttttgttgtaaataacaaaaaaaaaccgttttaaaaaatattttaaagttagtttcaaaatttatatattgtaatagattttaacacttactaatttttttttaaaaaggcttgatgatagtgcatttgacagtaattttagaaattatttttaaactaaaaaattagatgtttaacaaaattaaaaaatacttttaaaattttgaaaaatcattattgtaatatttttttttaagaaacattattagattggttcctaaagacactttcagaaatgcttccactaaaaacactttgagtaaaaacacaagcctaatagtgacaataatgacaaagaaatcatacatttgtgatcatcctctcaaattgcaatagtgatagacaaacgtatatcatgttcacacccccctcaaacatgttcctgtacccaccttgggtgtgagagacaaactatggtattagtgacagataaatcacacatttttatcacgcacttgtggccctatacccatgattgacaaatcacacatttgctattgcatgcatgtggccctatacctaccatgagaggcataaatcatggtagtagcagacaaatctcaatcctcccaaatcatagtagtggtagataaatcatacatttgtgattacacataattagacaaataaataaatggaggagtgatttcaactcgagacctctaaataacctaaaatctgattctgttaagtaatcaattttcctcaaagttttaagttatcaagagttggacccatattttgtatatcatattctaacaaaaacaatattagtctaggttaggctagtctacataggtggtctaaaaatattcttggcctctgacctccaaaccggtttctcctattggcaagaaagaaataagtatagtgaccaaagaacttgctgtaatccttggtctaattgaaatgtaagctggcattccatgaattgtttgggggaatataattgtgtcacaccccaattttttttttcttattattattattatttattcttcaactaaacaattgatactcaaatacagtataagtgctctcaaaaacttaaatgttgagttcctacttgaatttgttcaaaaagaggatatggaaaacctgttataaggagtacatcctgtattaaacattgtgactattaagttaacaaaatatgttttgtttcacaaaagaaacttgtacaacattcatttacatataccaaaccccattgtttactacgggtagcccatactacaagtgtatctaacaaatatatacattacatcattccaacaaaaggtgtagtcttgatacaaaaggcatggcctcaaaagactttcaatatgagcaaacagcatccaatcacagtaaagcattgctcaagcattctttcctgcataggtcttctgacctgcatctataggtggaaggaatagggtgagttcacaactcagtaggaaagtttataaccatcctaagtatacccttaaaaaccttgaattaaacgtttaataacatgcatgataaacatttcataacaattaacaaatgtgtaatcatgtcaaacatgtatgcatgtgtttgttggtttcatcattgcttttccccatccatcctttcacaactgataatttgctgactcccaacaatctacacagcagatatcaatgctccataagatactcgatcaatataataatgactattctgggacatcacccaagggcaagtcataccccgtgtcttttgggactcatacccaagggcaggaccaaccccgtgtctttagggactaaaacccaggggcaggaccaaccccatacacccacatcggagtgtcttcctcgagggctttagggactttcacccaaggacccacggtcccacataaacaatataacaaatgataaggcctgtagcatcacataagcacttcgccaccaataaattctctgaatatgatctgtgataattccatgtccttcttgcaatgcaatcacaccataaaccatttcgacaacacaaaaccacgaatcttcataccaatatacgttttggcatcatggtaacatttcaatgcaataaaccgagatgcaatgacactttaaaagattttatgaaatcatagaaacaacataaaattccaacaaataattcaaggaaagaaatcagatacaccatagaatagcataaaattccctaccttacaccgacttcctttttgtgtttcttctaagtaggcgatctttgcctattacgaggaactgaaatgaaacaacataatttaggtttcctaaccatgaaaatttatatagtttattgttgtaaatttttaattctcacgttctctaatctatatcctacatgtttacagatcaaattagaattgaattaaacaatatttgcaatgcatattaatttccctaattaattaccaaacactaattcttttgattttcttaaagcctaacctattaacaaatcccaaatgtccaaataacccaattcatcacatgtttactaatctatttttcaatcaaaccaaattaaacaaagatttatgctgatcttaccattaataaaatacttaactgaaaatactttaatctttaattaattgtgatttttaactaaaacaggtttatagctaattatactcaacttttacacaatttttaccattaattctattcaacatgccattaggaaccaaaataaacgaaaattacaaaattaaacacttgcttacctcaaatctacactttctctctctagtttctctctctaacccaagttgctgcaggtgaaatggagcaaaacgagctgcagccccccttataaagggtctccaagcacccaagcatgaggtggcagcccacatggctgccaccaatccacccaagtaggaggtggcattccactaaccttaattttcaaatattgcactttagtccttcaagttataaaaaaataaaacccataattgcccattagtcctttaggttttcataaccctaattagtccctaagaacctaataagcatgcttaggtcattaactaatcccacttaaccttaatcaaagtttaattcataattaaacatgattagcactaaactagttttaacatctaattaagcaagcttaaagttaagtactaaaatagtcattagtactaggtgttacaaattgaatttcattgattcttgtatttgggagttcaagccaggcaagacacaataagtttttgtgagcatgttaggtacataaaaaatcaatacatgaggaagttcaaatatgatcattaaaaaacaggaactagaaaaaaggtattagaatgtgcagtaaattgcaagagacaatcttttgtgtttgacttgttcaaaggaagggatgtaagcatggaatcctataaatataccagctttctggttgtcttaccctcaaaccccctcttattatgggatgttagttcctttccttttcttaataaaatttttctatttactctaaattcctatttcatgcaatattgttttctggttggaaatttatgtgacatggttagtgcacaactaacatgatttcctattcaagattttttttttaaaccaatgattgcataagaataacccattacaatttaaccttttttttatgtctaga

SEQ ID NO: 12253 - DNA, 6868 bp, Vitis vinifera
  Intron number 10 from transcript GSVIVT01029553001 (locus GSVIVG01029553001) derived from phytozome v7.0 (chr-ID chr 9; pos 21653802 to 21660669 reverse strand)
tctcttgctttttgaaccccaaaaggcaaggtgaatacggccaatagaatttgtgtttgatcatagaaggcacatcttccatgagctgaaaaaccgacattccacccccactctacttacacgacaatcagtataatgatcatcacctagaccattatagttttcctgatgtgttctgttatatgcaacccactaacactgttggtactggcgtagaagccgctgcctccccctactcgtgtcaccacctcctcccccattcagttaccaactcttcctatattgttttaaatatcacccccactgtgtcatgtgccttcgatgtttcagtttggctagttggtttgcaagattggcttgcaatgtgctaagcctgagttcagccataaggcttgtgaaccgagcccaagcctcatgtcaactagtgtagctagtgtaagcttagagcctgtttggaagtcattcttgtaaaagtgtttttaaactgttgtgcttccataggaaacatttttataaagaattagttggtgtttggatatgaattaaaaacgtgcttttgataaataaataaaaaaagagtgagtttggaagtaccatatactaacttccagtttgggagtgattttgagagggttaaaagagttccctaatgtttggaaatgctttcctaaagaaattaggtgtttggtaaagttttaaaaaccggttgtacaaatctagagatatctcttaaagtgattcctagacaatttggtcctgtaactgatttcaaaagcagttttttgttctctagaaccaaaagaataaaaaaaaaacacgtttgataattagaaaacattttttacttgtctttacttgtttttgagtgctattttaaaaaataattatataaatatgaaaaatgatttaaaatgaagcactacatattattgaatataatgaatttatagtgtacaatctttcctttttaatataggttacatgtatggtagttaggactcctggccttgtatatatatattttcttaattgtaagtagacacaatgaatgagaatcaaggttttcttctctctctctcttaacatggtatcagagccaagggagaaaacctaattctttccagtttccccgtgtcatcaattccgggaaaccttcctgtgaccgtgtttcattccggtcaccttccccaaaccccaaagttttccggtcggtcgaatcgtcgtcagaaaacattcaccgtcggcgacttttcgggcgaactttccggcgatgtctttttcccacaccgcaaggagcgcttggaggagatctccaatttttcccaaagcaccggagccagaaaaccacccatgcgtcggccacgtgcgtttttccggtcggcgattgcatctcacgcgccagcgcgtgagggcgcgtgagccactttctggcgacccgcttcctcctccaacttcgcctgacgccgattagccacccttcatacctgtttttaccatccgagccctgcacgtgcctcttttggggttcttttgcctccgccggccctccgaacagtttttccagcatcctccggctattttttctcaaccccaatccctgcacgtgccttgggaagtgttcttctacctttccggtggtgccacagttgtttttcttttccatttggtctctcacatgggcgattcttcgtttttccttcttcagccgcatctaaagtcgtattagggctctcttcgatccaaatatacttcattctccaaataagtggatatggctactaaaacttccattttttcctctgtcatatctggatctcctatgattacttcggagaaattggttggcagtgaaaattatctttcttggtttgcctctgttgaactttggtttatgggacaaggatatgaggatcacttggttacacaggaggcagatatccctgaggttgagcgcgtacagtggagaaagatagatgcccggttatgtagtgtgttatggcaatccgttgatcccaagatccttcttcatcttcgggcctacaaaacttgttttaaattttggactcaagccaaaggattatacacgaatgatattcagcgtctttataaggtggcttctgctattgtccatatcagccaataggacttggatctatctacttatattggctagattgcctctcttaaggaggagttcttgactgtgatgcctcttactcctgatgttggggctcaacaaacacagcttgataagttcttcatggtccttactcttattggcctccgtccggatcttgagtctgtccgcgatcaaattcttggtagttcatcagttccgtccttggatgatgtgtttgctcgcctccttcgtatctcgtccactcagactttgccatctgatagcatttcagattcttctgtgttagtttctaacactacctttcgaggaggacgcagtggtaaccgaggtagaggccaacgtcctcattgtacctattgcaataaacttggccacattcgcgatcgttgctatcagttacatggacggcctcctcgcactgcccatgtggcccagtcctctgattctcagctgcctcagcctccgagctcctccgcatctcaggcatctcaggcttctattgcctctgttgctcagcctggtaatgcttctgcctgccttacccacacatcttctcttggaccctggattctagattctggagcttctgatcacctatctagtaataaggatcttttctcctctattactactacctctaatttacctactattaccttagctaatggttctcaaactatagctaaaggtattggtttggcccttcctctgccttctctacctctcacttatgtcctttatactcctgaatgtccttttaatcttatttccataagcaaaatcactcgtactcttaattgctctattgccttttttgataaatttgtgaccttgcaggaccggagtacggggaagacaattgacataggacgtgagtttcaaggcctctatcacctcacctcggattcatctcctacagtttgcatttccactgatgctcctctcctcattcacagtcgtttgggccaccctagtctctccaagttccagaagagggtccctcgtttttccactttgtcgtcgctttcgtgtgagtcatgtcagcttgggaaacatactcgtgtctcgttcccaaagcgtttaaataatcgggcaaagtcttcttttgagcttatccacactgatgtttgggatccttgtcaaactgcgtctactttaggatttcagtattttgtcactttcattgatgactattctcgatgtacttggttatttttaataaaaaatcgagctgagttattctctattttccagaaattttatgctgaaatttagacccagttcaatatttctattcgtgtgttactcagtgataatgtcagggaatatttttcagctccatttacttcatttatgtctcataatgggattcttcatcagtcttcttgtgctcatactcctcaacaaaatggggtagctgaacgcaagaattgacatcttgttgagacagctcgtactatcctcctctatagtaatgttccttttcgtttttggggggacgttgttcttaccgcttgttatttaattaatcgtatgccctcctctgttttacatgattagattcctcatttccttctcttccctgaccaaccactttatttccttcctcctcgtatttttggttgtacttgttttgttcatattctcactcctagataggacaagctttccgccaaagccatgaagtgcctcttcttgggatattccagacttcagaagggttatcgctgttattcccttgagactcatcgatactttttctccgctgatgtcactttctttgaggacttaccattcttttccaccacttctgagtctcttcctgtttctgaagtcttgccccttcccattgtctccccatctgatgttgtgcctcctcgaccacttcaggtatatcatcgtcgccctcgtgttgctactcctttcccttttgctgaggcacctgctgactcacttcctatccctttgccttctcctgccccggctctgccttctcctgatgatttacctattcctattcggaaaggtactcgttctactcgtaatcctcatcctatttacaattttttgagttatcatcgattatcttcaccctattctacttttgtttctgctatatcctctgtttctcttacaaagagcacccatgaagctttttcccatccaggctggcgacaggcaatggtggatgaaatggatgctctgcactctaatggcacttgggatcttgttgttttaccctttggtaaatctatagttggctgtcgctgggtctatgcagttaaggttggtcctgatggtcaggctgatcgccttaaggcccgcttagttgctaaaggctatactcaggtttatggttttgattatggtgacacattctcccttgttgccaagattgcttctgtccgcttgcttctctccatggttgctatgtgttcttggcctctttatcagttggatattaaaaatgtcttccttcatggagcaacctcctggttttgttgctcagggggagtctggtttagtgtgcaggttacgtcgttctctatatggcttgaaacaatctcctcgagcatggtttgaccgttttagttctgttgttcaagagtttggcatgcttcgcagtacagcagaccattcagttttctatcatcataactccttggggcagtgtatttatctggttgtttatgtggacgacatcgtcattacagacagtgatcaggatggtattcagaaactaaagcaacatctttttacccactttcagaccaaagatttggggaaactcaagtatttcttgggaattgagatagctcaatccagttccggtgtgatcctttcccaaaggaagtatgctttagacatcctggaagaaactggtatgttagactgtaaaccgatagacacacctatggatccgaatgtcaaacttgtaccaggacagggggagcctttaggagaccctgggagatatcgatggctcgtaggaaaattgaactatctcaccattactcgtccagacatttcttttcctgtgagtgttgttagtcaattcctacagtcaccatgtgatagccattgggatgccgtaatccgtattcttcgatatatcaaaagtacactaggccaaggtgtgttgtacgagaacagaagtcatactcaggttgttggttacacagatgcagattgggctgactcacccacagatagacgttccacttcagggtactgtgtttttattggaggtaatctaatatcttggaagagtaagaaacaagatgtagtggccagatctagtgttgaagctgagtatcgagctatgactttggcaacatgtgaactcatatggttaagacatcttcttcgagagttgagatttggaaaggatgaacagatgaaactcatctgtaataactaggccgcattacatattgcatccaatccagtctttcatgaaatgaccaaacatattgaagttgactgtcacttcattagagagaagatcgcatcaggatgtgttgctacaagttttgttaattcaaatgatcaactagtagacatcttcactaaatctctcagaggtcctaggattaaatacatttgtaacaagcttggtgcatatgacgtatatgctccagcttgagggggagtgttgaatataatgaatttatagtgtacaatctttcctttttaatataggtcacatgtatggtagttaggactcctagccttgtatatatatattttcttaattgtaagtagacacaatgaatgagaatcaaggttttcttctctctctctctcttaacacataaaggctttttttcatttaaaaaaataaaaaaaagaagcatgtttaaaagcataaaaaataagttaaaaacattttaggttcccaaacatatttttgctctgcaaaacattagagaacaatttttgaaaacggttctaaaaaactattttaaaaaccgcttcccaaacatggccttagtgggtggatatttctttcaaaaatcacttttttgttatatgacccatgaccaaagatgctattaaagcacctttctagtttatattaaacgttaagtgattctctttggaaacatttctaacggaaatattataaaaaaaaacattacgagtccgtttggtagtgattttaggaaacgcttgtaatatttctaatacttgaaaatttttatcattcaagtgttagaaatggtagaaacgctttgtagaatcacttccaaacgcactctacatattagaaggaactttgccataatcactcctgtacaaactctatgctagtccaaaaaccactttattgattctctagatttttaaaaacaaatttacaaattttgtccgaacatagattttttgtgagagacacttccaaacattggaaaatgtttctaagcacgggaagaatcggtacttatctaactctaaataaattgatgtatttacattaaatagaatagttttggtctttacatatcatgagccggcttttaagaaataggattagtagatggttggtctagtattagccgtctacataccctttaaacaagcaaaaccctaaaccctaaatcttaaattgtaacttgttaacatcctcatgtaacaacatactgataccattcctcttggtctgacactagtcttaatctttgacatgcagaaagcccagccccggaatcataagcgcgcttaaga

SEQ ID NO: 12254 - DNA, 4860 bp, Vitis vinifera
  Intron number 5 from transcript GSVIVT01028367001 (locus G SVIVG01028367001) derived from phytozome v7.0 (chr-ID chr7 ; pos 6696262 to 6701121)
agctcaggcaacagaggaggtaatattttcatgcaaattatgactgtaaatattggacatagctcaagttcagcactgttgggaatcattttattctgtcaggttattatttttcctcttaggtttcagcttgaaaagtatatgctcatataagtttccaactgcaatttgggcttgacaattgaactactggatgatcaagcagtcctgctcttggggggtatgatggcattaaaatatattaagagaaatatattttggggtgtaagctatgtttacttgatgggtttgtggtactaaattgctttaggtaattaccaaaatgatatgcattagatttccttttattttttgtcacagaccatctggtttgttattgctttatttttgtcacagaccagctagttggaccctgtgaactggttaccttaaattgtggcctccagtttgagtttgaaatcatggttgctaaggttgttaaataatgacaaaaccacaaaagggagaacacaaaaaacaactcgccatctctcaacatgatctcaactagtctacaaaatcaatcaaaggcattgagctttctttaatgtatatcacatcccaaactaacaagttacttaagaacaaaaattgcaaatcagactgctcctcatttttaaaagctcttcggttttttttgtctaaaaaataccttcttccattttcttcctacaaacaagctgtgctagcttaatagaatttctttgactgtagaagggagcacctaagcttcaccaaataaggagagcaataactgccataaaatcattaatttggcatagtgaagaagaatgtgattgattgagttccctttatttgtataaaaatcacatctattctctaataccactgtcttctttgaagctgatctaatgtcaaaacttctccctaacaggcttcctaagcaaaaaagcttgctttagtcaacacctatgaattccaaaaaatgcctgatgggaagggtattgtccttcccatctctaatacaaggtagaaacacggattctaatgatcccccactatctcatcccataaatctaccactcgagcatctttggacaaatcaagagtatacaagaaggaaaaggacacacctaaggctccttcccataccacctatccttccaaaactttcaccttgttccattatccacttcaaaagcaaccctactattaacgaggtcccacaccatcctgatggctctccatccttcaacttggtacccatccacctcaatatatttagtgtgctcatgaaacataggattactagcaatgtatgtagtgacttattgtagcaacacataactattggcttcttagtttcaacatctagttttttcataaggttttgtatccacatgagcttacaagtagcatgagccatatcactatactctgaccacaatattttgcttcttacttctccaagttacccgattatgtctcacgatagtgtcataaccactagtagattgcttgttgcatcgaaactgacctaatcaatatatgaataagtgacaatgccaagttcaatgttcatcttacataaaatacccatcctaattattcctttcaaatttctaagaatagggcaaagtgcataaactgcatctcaatgcacttgtttaggactccatatgttgattaacaacacctaaatcaaatgaaatatcaagaagaaatgtagtcaaatatataagttttccaacagaacttttatgcgttattgtattaacaaaatccacactatttactttgtctaactatgcattaggatccatacatacaatttatgggtttaggtcctaacctaccggtctccattaatcttgcacatattttctttgagacaaaaccaatcttttcttgctgcaagcaacctcaatgcccaggaaatatctatgctattgtactttcacctattcaatcccacatatataactatcatatacaaatgtatcgtcaacataaacaattaaaaccaccatacctaaccgtatactctttacaaagagtgagtgatcttagtaaactttaaagaacaacaacgagagattagtactccattaagcttatcaaaccacgcctaaggggattgtttcaacccatatataacttttttcaacctacatacctttcttgactacccctaagctgctggttgctccatatcgatttctccctacaagtcactgtatacaaacgtatttttgacatcaagttggtataaagactagtcaaaatgaacaatcaaggaaactaacaagtgcgctgagttgactctagccataggtgaaaaaaatctcataataattaacactatatgtttgcgtatatcctttggcaaccagtcttgctttcaacctctcaataataccttctgggtggtatttgaaaacaaaaacccacctgcaaccaatgatttcttttttctctggtaaagtagttaaattccatgtgtcatggttatacaaagcattcatctcctcttccatagtagctttccgaccaggatgatagaaagcttcctggtaattcttggaaataacaataattgacaaaaataaagcaaaggattgaaaaggagaagaaaaatgcgcaaaatcaaggcatttataaataggatactgactagtagttctcttatttttctgaacagcaatagggagatcaagattagatgaaatcaaaggatcaataataggagataaacctttgtcagaagttgactattgaatgacaggttgttcaactagaggagcaatctcagtcttggtcactttcatgctcatgtagacctacaaaagtttcttagaccagtgaactttggaaactgatgatgtaaccagttcagacataggagtaataagaagaggaagattattaggtaaagacgagttattcatcaagaatcaacccttcagaagaaaaaaaggggtaaactaaaaagatattacatctacacaagtatccacctgtagtgagataaagcatttgtaaccttttttagttctggaatacccaaggacggcactttgtggcccgaggagaatttatctgaacctaaagcgctataatgcacaaagcaaacacatctgagccatggatgaagagaaaacaatgaaaggtttgaatataaaacagaaaatgaggattgattaccaagtacactggataggaaattattaatgagaaaacaaacagtaaaaataacatcgcttcaacacttttatggaatttacatatgaaaaaaggaagtgaagaaaagacttccaaaatgtgtttttttctcttcgcctctccatcttgttggggagtgtaagagctggatatctaatgaataatctttttttttgataggtgtctaatgaataatcttattattcttacaaaattagtgatagaagaatataagaattccaaagcattatctgaacaaaaatgttttaatggacacattaaactgaatttttgttgtatgaaaaaaggactaaaatatagaagcaatttctgatttatctttttaacaaatgtaacaaagtaactcttgaataatcattaataaaacttaagaaatacttaaatactaaaatactaggaagtaggaacacgatatgaaccctaaatgcctgaatgaaattagatgaaaaggactagaactcgcaggcttggcattctaacttggactttgatacatctggaaattccataaactgaagaatatgaagtggagggtgacccaattgagaatgccactacattgaagaaactaagggtgtaaaaaggtgtgatttgatcagtttttgaagaaaaattaattgaaccgacatggtcagtttatgcttgaatcaattgaaccgactttttagtaatggataaatctaaccaaactaagcttgtttaaggttggtttggttcggtttagatgataggttggatggaatttaatttaggtctgtccaattggtttttaaagtcaacttgagtttgaaatttaaaatacatttaaatttctatgccaaaatataatgaatgcatttaaaaatttagttgatcatagcttgatatcattgaattactttaataaagttaacacagtgtacatagtaataaatataaaaaaaaattcatccaacattgaacaattaaaaatcacaagagatataagtcagaatatcgtcttggtttaatttttatcagttacgaacaggacagacggttccttgtcccaatacttgggatttagaatcgttagcaagaataacaaatgaatttatggacaaattatgaatgtttgaaaaaattgaagacttaccagtcatttgggaagaggctattgaatctataattcaagtggaagaatgggaggtagaagaaaataaaacagtggtagtatatgaatgacccaaaatagcagtctgtgtggaactagatgactgactcactgattgaagacattggttgagaagaagattatactcttcttgtgtaagcatgatgggaaggctagcattactaggtgagaaaaccataggaataggagaagagtaagtgttattaactagaaaagaataaattgaatttgtaaattttatatactgcaccccaataataaccctagtactcagattacagtataccctcacaaataattatcaacagaggtcatgtgagtggcttgccatgctatcctctatgttcttgttgatttatttgtctttgaccttcataattttgcagtgagaactgaaaaccatatgtatatgcataaattgaatttcgattgaatatgttatattgatctttttaggcagcagt

SEQ ID NO: 12255 - DNA, 7100 bp, Vitis vinifera
  Intron number 10 from transcript GSVIVT01027385001 (locus GSVIVG01027385001) derived from phytozome v7.0 (chr-ID chr 13; pos 15450661 to 15457760 reverse strand)
gcttactcggaggtatgtctctcacttagcttcagattctggaatatttcttaatctacagtttctgattgataatggattcacaaaataaatctccagtttggagcccattacttgattgtgtatgttgtccgcatgcatacaaacaattactgaataaatagaatattagacattttttttctttttgatgcgaaaactctccctctggcctaactagaaaatgttgtggaatgagggattggtggagctgctacagctgttggaatactcctttggttgatttgcatgttactcttttcttggataatttcactcaattgaacttggtctatgactaaatagtttgggttgggaggacctttcaccatctacttttcttgtttctatattttcatgcttaggtgaccctatttgggctcgttataatctaaatgtttgcacacatccatccatagatgcttttcctttttctgtaaatttagctgagagttgctctgtgtatgctgccctacaacccatacaggttgaggaatcaaacaagcttgtgttttgattcctgagaacaatgtattactatattgtgcagtatagcccacagctttgcaggcttcatttagctaatatcatattctttaacttcttgttagtccgggcttgtgaagtgagattgggatattttcatttgcttattgtgactgtttggtgaaccctgacacaaaggcgtccaatgtttaccaagccataacgggccaacgtgctgggtcaacacaacccactttaaaatcgtgtcgggccgggccagcccatgcatgctaaataggtggcccaacacggtccataagcttgtgagccaatcgtgccaagctatgttgtgtcgtgccatgccggtgggccattcactttgttaaaatttttaatttaattttttaagtcattttgttatatttcaattggtttttctttttaatcaaaataacaataaatttaaaataatggaatataaaaggaaatgaaatataaaaaaataattcttttattcaatatttcaacaaattacaagaaaaaaataggaagaaaataaaggtgagaattgcatcactatagtttgagtacatcccaactaggttgacacccacccaactatcaattatatgttttactcaacctttaaaaattaactacatttaatagatttaaaagaaacaaacaacatattcaattatcatattcgcttttgtcttattcgatcttcattcttcttttttcatcttcattcttcatcttcaatcgtcatcaatctcttgaacatcattgtttgtgttgagatccaatttcttgaggttttttttaagttcatcttccaaagtttggagtcttatgcatccatcttcccaatccttcaaacatatcaaagtttctagcatctctgttgtgagagttgttctcttgtctcctattatatttgcaactatagaaaaaatatattgcaatgatacagtagacaccgatagggttagtagatcacgtgccattttagatagcacaggaaaagtaaattcatgagatttccaccacttcataatatcaatattttttacttcattaagggataggtatgaacaataaccagtatctaaatattttgaaagatcacacctgcttgaaggaccaacttgttgcttttccttagctaattgcataaagaatgaatcatttccaaatgcagatggagttatagtacttgaagaggcactaccatatttattctcataatatttatataagttgtttaattgtttgtatatcttaccctttggtttagatggttagttcatactagtagctatgaaatttaaaatattttctacgccttcaaccttaacccttggatccatacaatcagctaaacaataaagtggtggaatggttttccaatatttcaaaaaaaaaaaaaaatttccatttgtacgcatatttcactaaaagggggatattccatatattgttgaaacacatcactcgtgttgcaaaacatctaagtgctataaaagatgtaagagtatatacaatagaatatatgttagtagtatcataaaaaacttcaagaatttttaaaaagaaaagcctttgacccaatgatccgaagttattttaatttcacctgtcttactattaacataatctgatagtacattatgatatcctacacaagattttaacattaggtaggtagaattccaacgatgaacgacatcatgatggaattttctcttcttcaaacctattgatttacataaaacataaaatacttgtaatttgctagatgaatcaagaaatcgtaaagtagatcgaatagcctccaatgagggtgatattaattttaaaccatcttgtactattaaattaattatatgacaaacacatctcacatgaaatatttcacttagtggattataaataaatttatgacacttttattgtttgaggcattattaaaggtaatactaaaaattttgctttgtatgccatattctctaaatacacttgtcaaagaatcttatatgataggcccatcacgaggatgaaatatttcacgaaaacctaatattttcttatttaatttccaatttgaatctgtataatgtgctatcacacatgtaaaatggtcattatgttgattagtccatatatctaaggtcacagttacaataccactatgattattaaacttttcaattattattattttttcttttttgtagcatttaattacatcattatgaggagtagtcctaggaattctatgaaaggctggttggacatacttttgcatgaaatgtacaattctaggatcttcaccaaatgtcaatggaaggctcacactagctactattccaactaacccttctctcatgaattcttgattgtatataaaggggacattgaagatgtactagatcctatttcagcttgacttatttaggattgtctagggcctaatgcaccatgttttttggttcattgttcagcatgtcttcgaaggtgacctatgccaccactagctttgtaactatatgtttttttacaatatttattttctgctagattttctacatctccttttgtattttgtctatttattatagtgaagtgattccatactatagatgtgtgtctactaccactaggtcttttacctatgggattggtttggggaaggttagagggagggacactagagggggtggggatctcctcatcttcaaaaggattaaattcattacattcatcaatactaaagtcaaggttttcaagatctaggtgatgaggatctatttttaattttagaagaaaaaaataagataaaaggaagagaacaattaaaagaaattatagaattaaaataaataaatgaaagaattaaatataaatacctcaaccttgtgaattgtgatgatgaccacttgtaaagttcgtagatagcacaaaataacttataactaatcaaaacttgtggatagtagataacttaaagccttgaattggagcacttgtagagaatttaaacttagaagattgtagaaagagagattagagagaatagagatttgtgtgagaaagaaataatatgaggggtatttatagagaattattggtgaatcatttacttttttacccttaaaaccatagttgtgaaaggcgcaacgccaccctctggcgctttgcctgaaggcaggcaacgccccttcacaaaggcgctgcttaggcgcgcaaggtgtgatgtggtccacaggtacgcctcgattccctacctcattcttctcattctcttcttctccagcgtcgggttgtagagagtagagagaagccttaatttattttttgagaccaaaacgatgtcgttttggagcctgttcctttaaaataaaaaaaacaagccaaaatgacgccgttttgaccctgttttctcttccattttctggttgttttcaacccgacaactctcctaaattttgccatagcctcagttgtgtagtggagaagtgaagaagaggaggaaaaataggagaaaaatagaggaaaaatatatgtaaattagggtgcgcctcacttcactaaagcccgcaccttaagtgcgccatacgcctcaggctctaggactactttacgccttgatatgccttgagccttttaaaactatgcctaaaactagtcgttctatagttgttgagaggggtattattgatatttgatataaaatattaataatgagtaatttacttatttatcctttaaactaattgttatatagttgttaagaggggtaatatagacatttgataggacaaaggtaaaaataactattgatttacttttttacccctcaaagtagttgttatatagttgttgagaggggcattatagacatttgacatgtaataaaaaagggaaaagtagaaagtaaaaaagtgataatttgaaagggccaagtgggctggcaaggtggaccagcatgacttgcagcacagtaggctggcacaatggcacgtcgggccatcttcttaggcctaacacaactcgctcatttggactgtgtcgacccatctcactatagtatcccagccgtgccagggcatgagccaaaatgggcggtccgacccattggatatctctaccctgacatgcttataagcatttactttctacgcataatagagaagaaaaagggatattctttttattaaacaattattaaattacataggagtaaataggctaaggtttgaatattaactgtgtaacaaaaaaaactacaaatctaggacctaacaactttaaccttatctgaaattccaaatttgattaataaaatcaattcagatttatttgaaaataaaataagaactttaacaaacaatcctaatatttctacactccccctcaagttggcgcatagatgtttatcatgtttaatttgttaactagagttttgaaccttggtttagaaagactcttagttagaacatctgctatctattgtcatgtggtgatgaatgacatacaaataatgccactttcaagtttctctttaatctcaacatgcttcacatgattgcgttgaataggattgtttgttatgctaatttttgctttgttgtcacaaaacaatttcataagaggttctaaatttaacttaagctcttcaagaattcttttcaaccataatatctcatacactccattgccataaccttgaactttgcctctacactactttttgttgccacattttgctttttgtttctccatatgtaatgagattgcccaaagaaagacacaataaccaaaagttgatcttttattatgactgaacctccctagtctgcatctgtaaatacttctacacttctttggtcactttttttttaacaataaacattttttgggtgtactctttaaatatcttaggatcctgtacacggcttcaagatgttccttgtatggtgagttcataaaatggctcacaacattgattgcaaatgctatgttgggccttgtgtagggaaggtaaattaacttccctacaagccattggtaccttctaatttcaattgggattccctcgattgtttctctaaacttgaggtttggatttgttggggtgttgcttggtttgtaccctcagttgcttggtttctctaacgtaaattaacatactttctttgtgactatgattcccctttttgatcttgcgacttccattcccaaaaaatatcatagggaccccaagcctttaatctcaaattcagttgtaaggcatttcttcaatcttgttatctcgacttcatcacttctaataaggatgatgtcatctacatacacgatctaattggttatcttacctcctccaatatacttcatgaacattgtatgatccatttgtccttgactctagccttgatttttgaccgaccttgtaaatctttcgaaccatgttctcaaagactgctttagaccatataaagacttactcaagttgcatactttggttccaaagctttcctgaaaaaaccaccagagcatccatgaagacttcttttaaatcgccatctaaaaatatattcttaatatttaactagtgtagggaccattccaagtttacaactatagaaagtagtatttggattgtattcaactgggaaactggaggaaaggtctcctgatagtctgtcatataagtttgtggaaaaaccgttagccactaacctaactttatgtcattccaaagatccattagaattaaactttaccatgaatacacatttacaccccatcggcatccttccttcaagcaaattcaccttttcccatgtgttgttcttctctagagccttcatctcctcaaagacagcctccttccattttggaccacttagagcttcctgtgtattcttagggacatccacactagataattgtgaaataaatgcattcttattacacactttgtccagtgttacattctggtcctttttataaacagggaacataaatgcagagcttccttataatctctatgtttgatatctcagaggaatgaatttttttcaattgattcttttcaattttatatgtttaatgataaaaaatgagtgaaaattttaaccaactctggaaaggtatttgaattgaacactgtacatagtttatgtttatatctactttgacaattgttgtgtggtagcttgattccttacaatctcatgctgttcaatcaatggtggagaactcaatctcttttgtatgactaaatcctctaccagattttggattttttgctaccaccatcatcacctcttttgtcatcacattgtctaccaccatatcatggctgccatgatgttatttcggccacccaacccatcctttggctacatgtttttctgtcattggcaccattattccaacaatgaatacagactcggccatctcaaattgtggctcccactttactactgcttattgacattgaatcttaatctaatttgcttatatctgatatgaaactaaaattttcttctgcagatattctcatt

SEQ ID NO: 12256 - DNA, 6657 bp, Vitis vinifera
  Intron number 7 from transcript GSVIVT01027370001 (locus G SVIVG01027370001) derived from phytozome v7.0 (chr-ID chr1 3; pos 15590360 to 15597016)
ttccatcacaggttagcaactgctttcacaatgtgtgcttattgatttgcatatttgatatgaactgttattttcatataccatgtgatgtttgatttgaatctaaagatttgtttgacatatttctgttgtatgtatggctttaatatatttacatggatgaagaatgataaaagaatgtctctgcatgtataacatagaggtacagttttgactattttagcaagctctttggtggaactaaacttcttgtcaccttaacaaatggaaatatgttgaagattaagagaatacatatttccatcataagaactctcgcaatttacccatccaaaaaaaaaaaaaaaaaatatttccatcataagcaaaggagaaatacacactaaatgatgggaaaaatggctagaatcttcctttgaagacttacaaaaaaggaagaaagttccagtgcttggatttaagtttctcttgggacctttcgcgattaatttaggttaaaatatgttttatttgagttagaaagctgctggcttgcttttattaacaatttcttacattgacttcagacaggggtagtttagcaatttctaaattgaaatttgtgttcctatcaggaaaggagatcccataagtctataaacccatgtaatttttcaatcatagaactagtgaagaggttttaacagctaatgaatttcttgtgtgtatttatctttttcctagatgtgatcgtttatgacacttaagtgtgattgcctagtgctttttccttcctttttctttgcctttccaaaaaaaatttattgttagtaaagagaatcatgaaaagattaccgagattacatacaaataatagaaatttatagctatatacaagaaattgaacaaaaaattggaatatgttattctagaagggaaatgctcgttttctcagaagaagagcaatcgaggttttttaaggaggacaaaattctcaaaaagagaccctgacaactatttacattgttgttttatgtgatcaaaatttccatttcagtgaactagaaatgttcaatcattctagcattgatgtaaaaaaaaaaaaacctactttgatcgaaaatagttttggtaaaactgaatcagagatctttgctgcatctagttggatgcctcatccctgcatctctgtttaccagccttgatttcctctttcgtcatgctctgtaccacatccaaacatggtttagatctacaaattttggtttctttctttctttctttctttcgttcttttatttttatttttatttttattttttattttttattttttaatagaaacaaacaacttcattttttctttaagattaaatacaggaaggacaagcaatccttcaaggatgaacagataaaaaggttataaagtaattttcatgccaaatgtatgctgaaaatggagtcaaatctgcttatatagaaatatttgttgtgtgaccattgtaatacatgtaatctgaatgttataatgagttcccaatctaaataagagaaatcatgaaaatttgtgatgcagttgaagtttttcaatagaatgagtttatggctttagaagaaccaaaaatggctcatagcttggttttctgtagtatattataaatcaatcaatcaaactgctaacaagctttctagaagagcatttatactagagctacgaccccagaatctcaaattccaagctctctgttactgttaaaatcatgtattcctagccctcactctacttcgaagagttgcatgactatcatgtgatcatgtaaaagactaaaacgtctaatactggtctataaaagtaacataaaacataagaaagctgctggaactttaagcaaactagcagcccaaactaagccaaatagtgtgactgcttgaccttggtttgcatcttaaattactatgcatcaacttgtgggcctagtccaaattagttttgggtttcatggaaatttgatgtctcataaatgttggtcttagttaatgagatgttggagagcttgagaatggattcacgatgggggtttttccagtagaccattgatagggtgtgaacctgaggattcctctactgcatagattttatagaaagcattcattgaagctagattacactagaggcagatgttggggatttcagagtttgggaagcgtgacactcacattggagcacagggccggtagtaaggtaggtaatgcaagtgatgcgtctgagtgagggagatgcttgctgacaatgttgtttctgtattgggttaaggcccttttattttattttattttttactttttttggatgtaggtgaaatgagagtctctgaagttagttgcatgacaggagacagcttttagtggtggctggggaatctgtggaagaggggatgagctggtgttgccttgtcagcaagtggatttagggggtgtcaagaataggagtgggaatttgcagggggaatttataggttcattggctaggcagtgggttgttaagaatttatcagatgtggaggatactttggctgtggggttgtgagaagttaaggggtggcttgggagtagagctcttgttgataggtggttttgatggttccaaagatgactcattatggcatactgtcactgcatgcatctattggctgcatttcagtcagtaggatgtcaatgttgtggttaagagggtcaatcagtggcttcagaaagctctttcctagggtcatcaggacttaatttgttcaattcattgttggtgatggattgaaatttttatatctttgcttgagtgaccaacccttcgcattatttatggttgcctagatcttgtatatgtgaacaagatgtgctgacttctcttcttttagtttcctcctaggattctccataattgttggtggattgggaaatcgatgacccttctatcattctctatttgcatatctaccattccctatttttgcaatgtgaggtgttggaccttctccccttcatacattttcttatttaatttttttgttatatcattctccattgattctatcttaagaataatgagtgcggtaccttgtgcaaacttgacatagagaagccctgtgatcacgtggactgatctttcttcttacagttatgcagaaaatggggtttggggagaaatgggttaggtggatcaagtagtgcatttccactacaagtttctttgtgttggttaatggcacttctacaggtatttttcaaagctcaaggggaagggggtttaaggcagggcgatcctctttcaccttatttatttgtgattgctatggaggcgtttaattgtcttctaaagagggcaatgcatggaggtttttgtcgggttgtaggatgaagagtaggagtggagaaggggttcagatctcccatttgttgtttgttgatgataccttggtgttctgttaagcctcctaagattaggtatcctaccttggctatgaccctaatttgaagcacgttgtcaaatttgcccatttattttatgtcactgttacacatgccaagctcagttaaatagaggctagagcatatacaaagggatttcctttggagaggcagaaatttggagcaaaaacctcatttagtaagatgagagttggtatgcttaagtaagaagaaagggggtttgggggtcaagtgtctttccaccctcaataaggctcttctttgcaaatggaattggagattcataaatgagagaggggctttatggaatcaagtgattagagggaagtatgaggaagaaagaggggggtggtgctcttgggaagtgagagaggcatatggcattgggttatggaaaggtataaggatggactaggatattgtgagaactagaatttccttctcagtaggtaatgtgcggagggtgagattttggagaaataagtggtgcgggaattctccttcgtgtgtgtcctttttgtcatttttttgctttagttgttgataaggaggtgtgggtggtggatatttgggattccttggctaaggggggtaggggggatggaacccttgcttctctagatcctttaatgattgagaggtggaggaggtggaaagcttcttggtgcggctaaatgggaagagagtgtgtggtgatgtggaaaacatggtgttttggaacaaaacaaagagtgggaagttcttggtcaaatccctctactacgctctagagctaggcagctcatcttcgtttccctcaagttgcatttggaacgtgtgggtgcagctcaagattagtttctttgcttgggaggctacttggggcaagagtttaactttggatttaattcaaaaaagggggtgggccttggtaaatagatgttttttgtgccatgagagggagactatagaccaccttcttcttcattgtactagagcaagggtctcgcgggaattgttcttttctttggttggggtgtcttgggtgcttccttcttcagttagagagactctcctcagttggcatggttcatttgtgggcaaaaagtgtataaaggtgtggagagcaactcctctacatatattttttagatggtttggaaggcaagaaatagattgaccttcgatgatgatgtgcttttgatccagagactcaaatattcttttgtttttttcctttagtcagaggcaaagttgtttatagttaatcgccctctaactttagttagttttgttgattggttggactccagttaaggttgttttttgacctgcttgggtgtttgcttacttttactaagctcagaaccttgcatggtaagtggcaaataaaaaggttatttgctaataatttgctttgggaaacaaagccttataaaactatgagccgtgagtgctgtttctttgtttacaatgtggagaggaccatcttttctttcgtctcagttcgtcttggattgtagcagacgaggattcttttggctgatctttctttggtcctatatagagacacattataagcttgatgggtattgctttctagtgtcttggaaggaaacctaggagagaggatggtagagagctgtgtttgccattgtttaggtgactaataggggaaagaatggcttgaagttttagagtagtgggggcctttaggcttcttgtgggattctattcactatcttctccttcggtagctgattaagaaaagtccttggatgttcccatcatcatgatattatttgatcatacgggtgtgttgtgtctttaggatgagtcatgggataggatttgagtagactccccccattggatgcttaaactcaattttaatggttttttgttgagcaacacaagaaagatggtgattgatggtgtgttcaaagatgatataggctgtgttattatgtatttttatttatttttatttgtttatttatttttcccaaactagctggttttggcttggctattaggcagagacccttgctttcctcaaaagcttgcttgagttgtccttgtaatgagttagcaacatttgggttgagggggggcttagtagtcattctttcctggggatcatgcactaggagggggcttggcagaaaggcaattggattgatttttttagatttgtatagtgtcccttttatgggaaaactagatcagctaacctagtagcgaatcacttggataagcgaagatatttttttgtcttgagtttgttggagactccgtacctattgaggtttgtttctttagcgggtgctctgtatatatggtcatctgccctagagttttcctctttcatactcttttattatttgtgcttctggcctagccttttagttttccttacctttgttctcttcctatctaataaatgctttttatttgctataaaaggctgcagtagtggatggtaaaatattctttatctatgaaactaaataaagaaatcataataaatcagtgatgtttctctactaaactaaaagatatgaagttacaatagtgatttttctcttatcatttccttgcactggttggcatgagtgaagataatagccatgagagaaaaagcaaaaagaaaagaaaagagatattggccttgtgacctgcaaaactatataggagaaagttatattcatgtaaaagtggccataaacaataagaatgtgtacatatctaaaataaaggacggaagaaaaaaccctctagcatagcccagttggttagagcgaacattgagaattgtggttccactaaacgacatatgatcctgggttgaatcctgttattgatgataccctgaatttatttggtgttggttgttgtggagcggtcagcaccccgaggtttggggtccccatggaaagtcttaagggcgtggcctttggaaggttcctcagttatatatatataaaaaaaaagataaaacaaaaagaaataaaaatgatgatttattattattattttaagatttctatacctttgtaatatttttttctcaggatctctccaagaacagatcttaagttatttcatatcttgttcaaatgagataaacttaccctttctgctttgtccatatggagcctgctgctgcagtctttggttaactttgttcctggtacttgtgatcatagattctag

SEQ ID NO: 12257 - DNA, 2589 bp, Vitis vinifera
  Intron number 1 from transcript GSVIVT01021968001 (locus G SVIVG01021968001) derived from phytozome v7.0 (chr-ID chr1 4; pos 4974045 to 4976633 reverse strand)
ttagtttgctcaatctcgcttggtgctcccttcaggtttgtgttttctgattagtttggttgataattcgattatgactggtttggtggcttggaaaatgtgggaaaagaaaatagtagaaataagaaaggattttagcacagaaatgtaagggaagaaaagggggaaagagcatttctttcattcaactaggactgtgggttgaaagctcaaaagtcacaaactattgaacactgacaaaactaatcttgctgaggggtgtaatattctgtgattctgcagacatgcacattttgtcataccagtaagacatgtttcaggcacatgcttagattttctacttttcataatttgtaatagctcatttgttttagtaagtgtgaatatatctgagtacgtcatttattgtaattttacatgtgggctaattttctagagacaggaaagaaaagagagaaagaaaaacaaataaagaaaaaagaaaggtacggaccaatctacaaaaacttttgaataaatgatacttatatttggagtgggttagagtgggcttaagtgatgtgactatgtctatggtagacccattggcttgctgttatgcaagggaaggggctattgctcttgcctttctcttgtattccttttgttcttgcattgggtcccttgtataaaatttccatggacacattactgtagggagcaagctatgtgttcctctggtaagccttacagcatatttgaattgatcaaacatcttgaaaccatgcagtgggcttcatctgtggatgcttcagctcattatatgcattccattctaaaattaatgcaactaaatattaggctgtgctggtgggataggactggacttgatttggaactttgtttatgtagaatttggaaatcttgcttgggtggacttgtttctatgggttggagtcaatggaactacattcaattccaatccattgacatcctgtatacacaatggaaaaccaaaagaataaaaaagcatggagcaatagcaagttgtattaatatgtaaaagaaatgtctgcaatttgctcaatctctgatgtattcttaaacatcctttgatctggtctccttacctgatttagattcaaaggctgtacaagcttatgcttgggcataatatctgaaggccttcttttgatcttctaaatttatgaagattaaagaatgtgtttgattggggatttgtgaagcttgatctcagcatgcaccaatgacatattttccctagtattttctcatggagggcagatctttggcttgtgagcaaaagaatctgcacgtagatattaagtgctcgttggtcttccattgatgggtgatagatgcttagctgtaaaaatatgtacaatgcttgtagaagaccttttgcaatgaataggatctctatttatagacaaggttgggattcttaatttggaattcttacatttgaatttgaacccgtgtagttttgtgcgctttttgtgttattttatacacccttctcttatttataaaaaaataaaaataaaattgaattccaatgacttggagaaaaaaatccatcactcacaagattatagtgatccatgtcttgaactgtcaagctgatctatatacagcagagcccataccaaatgtaagtttaacttgttgaatttttaagatccaatgagaagtcctttgaattgatcattgactgacctgatgttgattcaatgcttgccaaaattttgttgtctgcaattgcatactcaaagcaatcaagcttttgagttcgaattggggcttcaggttcccattctagagcttcagctccaattcgatgcaaatcaaacaaaactttaggataataatcccagtcatatttaaggaaccctcttcctctcagctcttttttaattacgtaaaatcttttcttatgttattccaatacgatgctctcattttatgtaaataatgtcaaccttataggtgagtactgttcattctcttgggtctgttattgttagggtaattcttttgaaactgcccctgcaggaaaatacagtagcatttggatacactttatttatttattttaaatataaactcctatacaaaatacaaataccaaaaagcagaaatttaaattctataggaattgaactttttatttttaaaaagcaaaaaaaaagaaatgtacctaaacatcacctaaattatccttttttttttgtgtgtgaaaatttccatttaccacacataaaatgttatccttagtttcaggttcaactctgctgaggcttgctttatcactcagcttgcaggtggtcaagtgatctgcaaggattggtcttgtgcctcaatcccttgtggaggtgtagggatggggatagcctgtacttagttcctaatttatgaaaattgtcatatatgaaaccatttgctagtttccatgtgttatctaaaatgcagttgggatgctaatgcctgatgttgatgactggaatttcatcacttcgtggattggttacaagatttaaggctttctaatagttgttgcttaattggacttcctctattgttccaggc

SEQ ID NO: 12258 - DNA, 1894 bp, Vitis vinifera
  Intron number 4 from transcript GSVIVT01033353001 (locus G SVIVG01033353001) derived from phytozome v7.0 (chr-ID chr8 ; pos 21263493 to 21265386 reverse strand)
agtttatcagaagaagatctgagacagagtaagttttgattagttttgtaattctgaggaatgtgtattctgctcttgattttattgctatttgaatatattatcaccaaaagaaatagtttattctatttaaaattttaaagaatgagatttgtgtagatgaatcattaaagctattcctgtattccggttttgatatacctcttcagctaacaagaatccatcaagaaatattttcttcaatctaaaattttaaagaatgagattgtgtaggtgaatcagtaaagctgaattgtattcttattttcacatgtatcctcagctaactagaatccatgagttattgactcttgtggatgacttcatcatgaccaaggatgacaatatcgggatatattgtgtatcaaagaggatggatacgatatataggtaaaatatatcggctgacgaaagtatcggtaaatatcaacaatatattagtgattttggatatattggcaatacaagtaaaaaattagtcatagatggaaaaaaatcgccaaaatttccgatatatctttggagatgtattagtgatatatcagtgaaaaaaagggtgatgtctaatacccaaactttttaatcttctctaatgggccaaaagatggatgaagcctaacaacttaatagatgtaaatttttaagtttagtataggccaaagatagacttaggcccaacccacccatctattgtggccaagtgttgtataaggcagcaccttatgctcttattgacgcaataaaaaatctcatacaagataaggacttaaactcaagtgcttaagcttaaaacggatgagttatgtcattaagccaaacttattttatggtatatatgtacttagaattgtttatatatatgattattatacgtatatttgtatatattataatatattttataaattaattaaaataaaattattataaataaattaattttaattatcttataatctattttgtatactaattaaatataagacaaatataaaatcataaataaaattaatatttttaaatacaaatattttatgtcaaaatgtaccaatatttttaaataaaaattataaatacatttgaatcatttaattagtacatttacaattattttattttattttgatattcaagtgtaataatagcccattgattataaattaacttagtacatttttaaattaatataacattgaattaaattagtacatttttacaattaattagtatattttcaataaatgtaagaaaattaacttagcatagtattacatttgaatcacataattagtacatttgcaataatttagcttcataatgagtgtttacttacaaaattcacatttcttattgacagacacaatataattaaatttaatatcgcaaatcatatcatacatgtatcaatttcttcaacaaaacaactttaaaatgtctattatatttctaatttcatttctaagagttttttcttacatttttataagttttgatcaattttttgtccaccgatatcttgtatcaaaatatccgccaatatatcctcgttatatccgtaaaatccaagtatcaatatattcgtaattatcaatatttttatccttggtcatgactaatagctttaggctgccaatcttgctggctgtttccatgtataggacaaacaaatcagatatacacatgaaatctggcttatggtctgtggctgttcctatggagtatatgacatccgtcttatttagaaaagaagctgacagtgatcccatttcaactgatgggaaaattcttgcagattgactttttatttgctaacttaacaatgtggacaggtttattgaaggtgattttgatactt

SEQ ID NO: 12259 - DNA, 2997 bp, Vitis vinifera
  Intron number 1 from transcript GSVIVT01001090001 (locus G SVIVG01001090001) derived from phytozome v7.0 (chr-ID chr1 ; pos 22579989 to 22582985)
gaccgtcgattcctccgacgtccgagaggtactccatcgtcttcttcttctggttttgaatttatgtatttttcgtgctgtttgtatttggaattgacttgttttgcgagcaattactggttaggttttaaccttgggaggttttgagtaatgaatggattgatttctgaaattctagttgttttggatgtaagttgtggataaattttgaggatgattgttgttataaaggtgctatatcccttgaaatctttctctggtttggttatgcagaaaatgaacattcataggatgtaattttacatcaaataaggaccttttcctataagctgttcaaattggacagcattgatctgttttatagttatgtactatgagttggagttaatagaattttcaatatgatttgagcatatttgtcaaagattaaggcatatacttaatttcaaaatgcttcctgggcttgtttcctgcttagatccagtagcatgcactgtaatttttttaacaaaatgaagacatctatgttatgtgctaatttggtgaaacagataagctagtctgactggtatggatagcattactggaaacgatatatgatcattatgataggatacaatcttttattgtgaaatgatataatgttaccatacaggaacattgactattgttgatggtttttaaaaatttattgacatcatcatatgaggaagagttaatttgaacatgatcgctcttgtaatgaatactggggacctgatatttgaataatttgaatgttgagcttgacgatgatggtgaatgactacttttacttaatatattagtttttcctttctctatgttttcccctttttcctttgtagaataaggaatgatgatgaatttggaaagttggtgcttgaaaatagcatatcaacatatggcaacatgatgatagtttctttttttggtagattggtggaagacctccagcaacttggaatgtttgatataattgtatttattagtaacactagttggaatttgaaacaaaaaagttcaaaaagtgtatgttgcaactatatgtgtaatattgatgcatgcatatatttacctattttaaccctactatccttcatgaaattagttctatatatgctcacatatttgtttccatttatctttcattatgtaaaaggaatttatgatgcatacaagaaaaatagtaacactacaatttgacaactataggtcctttttttttttttttccatatgtttgttttaaaatgttatggatctgtatatgttgtggatccatattgaatttaaacaaactttcggtaacatttccaatgtcaaatattagagaaccaaagggtatattaggaaattgttttcaaaaacagttttctgtttttaaaaaaaaaatagaaaaacatgtttggccaccaaaatacataaaatagttttttgtttttacaaacttatacaaggtcaaatctgataacatatttagttgtttcacttgttttctaaagagtgttctaaaaaatagacaaatataaagaatgattgaaaatgaagtattacagataaaagttatttttagaaaatatttgaaaacatagaaaacaggttaaaaatatttaaagttctcaaacaaacttttgttctacaacacatcatagaacaaacagttttcaaaagaagttctcaaaaaccatttttcaaaattgttttttaaaacacttctcaaacaatgtctaaattttccaacctgagcatgcatacaagcattatagagcggctcacaaactgaattcttctatctttggatttgcaatattgttgtatttagaacttgagtacttggagtttgctgtgaactattgtttcaagttataagatatcttatgcggtggaaaatatagataaccccattttggaagtctgtgaatttattaatcaatccatgtcatttgatgcccttattattcattaatcatgcaattgattggatatttaagataatatgagaattagtttgaggttcgccaactttcggaaagtaggaagttcaattaaagtgagagtgtcaactaggttaacctttttatgatgctaatacaattaaacttttgtaagtccaagctgattaataactattacctgggatacgagaagtttgtgttttttttaaacaatagaagacaattggacttttccaatcatggaccttactgtatggccattggtgtcctagtgagtatttagactggcctagtgagcattttgcacactcacatcagccttatgatttgctggaaagttctttatctggggacagcccctaaaatagctgcctacaatcaaaataagtgtgggatagctggctgaggtttttggtcaaataatgattaaaaatgttatgattgtatgtgatttgtggtctggaattaaaaggcaaaaccaatttatgagagtttatggacattaacataagctcaaaatgtgtaaaattaataatattatcttggatgaactcaaatgcttctaccatgatttgattatcttgttatgaaatgtgcatatggcctcagatgcaaaaatttcccagaatctaagacagtcagagacagctatttgtctttaagtttgtgtatgtatatcaaagaatgcggggtaaaaggtcttaacttgagaacaggttaaattcccattttgacattaaaaaatgaataaatgcaactcattttttatgtatccgagcaagtattggacccaggtgcagatagagccattatggtgtcaaaaactgtgatggtggtttttctcttctttttttttttccagtcttctaagattttttttatcatgtcccacatttcatggaaattatccagatagatgctgttatacatttcacaatcattgaactcagatactgatgtatcatggtactttgctgtatgtggcaggtgattttatacaggtcagggctagtgactgctgc

SEQ ID NO: 12260 - DNA, 2525 bp, Vitis vinifera
  Intron number 2 from transcript GSVIVT01021385001 (locus G SVIVG01021385001) derived from phytozome v7.0 (chr-ID chr1 0; pos 4777690 to 4780214)
ggtctgcactgtgtcatctgcgtaatgccctcgctctcttttgtttctgttttttctatttttcgttcggcttctttacctaattttttagataatctctacatatgtgaagttcatgcatatattaagtagtgctagaagacttgcgatcaaggctggtccactacgcttattttggcaaaattgaatttgatttgatttgatatatatatatatatatatatatatatatatatatatatatatatatatattcagaattgggtttgagtcgattttgaatttattctgcagaattggatttgatttgaaacttagattagatggaattcaaagcttatggggcaaaatgatagttcaataaaatatgcatgccacctaagaccaccttttctcacttggtggttttccaccagtttctcattcataatgatcttgatgatgtttgtatatatcattatatccggttagggctcctggtaatgtatcataagcaaggggtcatttatgccgcatgactcgggctataggttgttagtttgggttgtgataatatcttgtacccagcgcatttatatttggacaaactcttgacaacttcaagttcaagtttgatttagttgcattgcttcttgctaatatcgtgggtcccttttgtacttgcttgtgctgagaatttctgcaattagggagtggaacatggtttaaatttctgtaaacataaaaaatacttatgcagtgaccaaattgtaacctgaactacttgaagtctaaagcttggaacattttatcagtcaagctggtgctttggttttaacttatttgaatatagtggctaaatttaatctgtagtcaaaatttaaaaccatgcatttgaattgcttatgccctctgcattctcataactattgccatttttgtttgtttgttcttgaagatgagctagccatgaaagtggtgtttttgtaagatcactccacctctatgaaagcaaactgtgcttcttgagattgtggatgattcattttatccattacttccctagaaggatgtggtagtttgttctgttgcagcaagggaattctttacgcaaaagtagccttgttcctcaattctcttctattacatccatgtttatgaaaccatataaaaacaaggtgaaatgaactttccagctcttattggaacttgatattagccttggacttggttttggttgatgaacaaagtttaaaaggttcaccctcctatcaattagagtacatggtgagcaatattgtaacttcccatcataccagtttttggtatttgtttttaactccacatactgagagcagagttttcttcttataccaaaacccgtgccttgagcatgcttgctatgacaattatgaactttttcctaaggacaaaggttatcatcacctttgagttctatttcatcatcatgaacattgcttgtgatacatttccttcagcattctcattattaactcctttacaggaacatggttcaaaatcttatttgtaagtcttcatgtttggggtaaatctttgattaaaaaaacatgttaaacaacaaacatactaaaattaaactactgcataatatgcttcttctactatttcaggtttccattataatcaaatccaaatgctcaactcctgcatcaaaaaacccaaccaacatcataaccaataacaatcaatacacccacatgaagcacaacctccatgaatgccaacaccaggagtgcatccacaaatctcaaattagtcattttgaaattaggagtgaaaataaatatcagtacttggcgagatgaagattagatatccattgcaagtgagaaatcatagatttggactgttatgccatattagtctacctttggtggagcttctactgagatctccaatgaaagcaatgaagcttctccatttcccccctgtttgtatggagatttgcaatgaaagaaaggacagctgttgtgggaacttttgctctctttgattaagaatgagacaattgaagagatgaaacctaaccaagtgaaaaacctgaaagaaaaaaaaaaaacatggttttattgcctcatctggtttgacccaaaaattttcatttgaccacatcagccatcctgatgatcttacatctcatttgacatactgctttggggaagcagtctggaacatccaggattacttttgtgagatacttgacattggaagttgatatagaatgcatctgctaaaggcattattttagtttccctatactgatcaaaatgctcattttcacccttgattgtgtttaaaaaattaatagacagtgatcaactagccccttgaacaggaaagttaataatgaattattatgccctttctaattggcttataactgttgtaaaaatttgaaatccaaatgggaagccaatggttaagtcattaatattgttgtttgaaaattagttgaatcttcagtattgtctgatgggcttttgaattacttttccagggtttta

SEQ ID NO: 12261 - DNA, 1426 bp, Vitis vinifera
  Intron number 9 from transcript GSVIVT01038252001 (locus G SVIVG01038252001) derived from phytozome v7.0 (chr-ID chr5 ; pos 24705018 to 24706443 reverse strand)
ctcacagtgtattgcttttattccccgtcattttcccaattctggttttaagtgtttgagtttttcatgttgttgacgtccaaactagttgagtaacttcaatcaattgtgagttttatttgctttgacatagagcctgtttgggagtgatttaaagagggctaaaagcactttctaatgcttgaaagtgtttctttacagaaattaggtatttgacaaacttttaaaaatctaaaaatttagagaatcatgtaaagtgatttatggacaatcacctggtaggtacttcttccaaaaatcacttttttgttatgtaacacattatcaaaaacatttttttttcccatatccaaattctaagtgattctccttataaacatttctaattgaagtactattgacaagagttctacagacaaactgtttttacaagaatcactcccaaaccgactaataatatcaagactttttttcctaacttctgattgacctcaccagcaaaatgtatgcttttattgtttaagctatcaagtttcttttttaaatggtcaaagcaattgcatatgctgctaaagggttttgcttaaatagtataagaaggtgggttatttatcaggatagaatggtatgtgtattaacaactatggatgcattgatcatacttataatattagtcattgttgggccttcattttgacttcttcatgttctcttgctcataatgtttgtaagcctaacacttaggttccttatgtcaagttgagcctgttttgatgtatacaagttgttttactggtcttgacataccagtgtaataaggtagtcatagtccttttgggttgtgttgcactctaacattttttatttggtagtttatttttagtgtgttgagaggaagctaagattttactttttgttgagctcaaaattggccttttgaccttgtttaatcagcaaaattaaacagaaaaattagtctattgaccttgtttaatgtcaacgtaattggcctgatgaaaagttattatttgaatttttgtggagctagtatgatagcttgagcataggtgatgtttctttcatatgcaaagtctttttctcccaaacacgaaataggcaacttgttgggtttctgaggtcctcagcaaggaagtaggcagaaaactaggtccatgggctttattaggcatttttgtaacaataggtttaatgttcatctgtggacattgtttgtgggtcaatacatggaaactaaagaaatccaaattattattattatttttttttgctttgagacaatgcaaattccttatcttagttgttttctctgatttacaaaccttttttttttataggtttctctgatttaaaaacattaccttgcttgtcaggcaattgtgtttagagttgaagattataaggattt

SEQ ID NO: 12262 - DNA, 2224 bp, Vitis vinifera
  Intron number 1 from transcript GSVIVT01038142001 (locus G SVIVG01038142001) derived from phytozome v7.0 (chr-ID chr5 ; pos 23815778 to 23818001)
cagaaaatatattctgggtgagttttttctcatcttcatttttgagaaatttttttctcgtatatggctttgattctcagaaattcattctaaggtttggattatgttgatgagattaccttgaagaactatgcttaattactgaatatttttatgaatttaggttgtaaatatataaatatatcagtgattaattaattaattaattaattgattgattgaatgattaattgactgattgattaggggctagttgttagattgtgtattcaatgggtggattcatgcatgatttaaatttatgaaaaatgggcccaccaaagtcatttctttaattcttagttttcaatcacattcaccattgattatgatcattttaatatcatatatgcattgcatacccaaaattttctatccaattctacccatttacaattatgttaatggaatctaatgaaattgatgtatttgttcatgaaaatgagctcatttggtctgatttgattccgggtcatggcattgcagtgagtttaggtgtgttattggtatgattatgttaatcaaagattcgaaatggctgatttcttcatgaaaatgagctcatttggtgtgatttgattttgggtcatggcagtgcagtgagtttagatgtagtaatcaaacaatttgtttgtgaaaatgaactcattttatttggtttgattccgggtcatggcattgcaatgagtttaggtgtattattgattatttgaatgagggcgatttgttaggggaaaatgagctcatttggtgtgattatgtgaatcaaaggatctgaaaatgctcagattgttcatgaaaatgagctcatttggtccgatttgattccgggtcctggcagtgcagtgagttttggtgtattagcatgattgtaatttatatcaatcaaactattagaaacactagatttcttcacgaaaatgagctcattttatgtgattaggtttcgggtcactgcaatgcagtgagatttggtgtattagcatgcgattggaaaaatgatctcatttcatttgattgatctccggccatgatatcacaatgagtctaggtctactactgtgattatatcaatcaaacgactagaaatgctcgatttattcatgaaaatgagctcaatccatgtgattcaattttgggtcatgacaatgcagtcagtttaggtgtaccgttcatgcattgtgtaattagtaggtgatcgggtttttgattaattaatcaagcttgtgtcattcgtaaaacctacttacaatacattgtgatattgttttttaatcacgcaaccatattaacattttttaagctcattttttattgtttcatcgggttgttgatgaggggttaggctctgactacaaacgttgcatgtcttttttcgggatttattatacaataagaattatcaatgtgtatatattttgtgcatgttgtcatctagggtttatcgtatttgattattataagtcagaccgtgaatccttcttgaccgacacatgtttcttaattaagaaactgatctcattgtagtatcaactataattgtttttagggtgtttccacacgggctgtatgccagaacttataccagcagcccgtgaatggttgcttgactctgaggtgagcgacctgcatcatcttgaagcaggcttcaaactttcgaccttaatcatatctgtttgtttttccagaaaatttaggatcagagtgatagagaatggttatgaattttcggttctttttaatgtgtttcggatggcagtagcttccaagaaggaggaccttcaatggtaggtgaagccgtgtaggccctgctcttgtatgtccttattctagacccttgattgctgtgattaaagatcccgataaacctagaataaattaaaaaattccatcctttattaaagtaagttatagatatcgtcgatctggtgtttttcatatgtcatggtcgttgtcttcccgggccacctgccaaaaacccgataaaaaaaataaaaaaataaaaaaagtctgaaccaaagaagttcttaaatattatttgtcatgctggttatttggctctgaggcaggaatgaattagtattatggacaattgacatattgattttgtgttgattagttgttttattaagttgatttcttgttttcttttttactagtgagaataagggataaggagcgaaaa

SEQ ID NO: 12263 - DNA, 7948 bp, Vitis vinifera
  Intron number 2 from transcript GSVIVT01009421001 (locus G SVIVG01009421001) derived from phytozome v7.0 (chr-ID chr1 8; pos 8206212 to 8214159)
tcttgctcttcctcacgtttctatcatctccaacggtttcatcgtcaaccattcatattttgagttcattcaaataatacaaggaagttacaaaattctcttaaacttggaagggggttaaattatattttatattataattaaaatataatgtaaaatgttatattatattaatgttactagtttaaaaaaaatactaagaaaaaaaaaacattaatgaaaatgattttttaaatatttattttaatatggaaagaaaacatatataattaaaaaaattatatatttctaaattatttaatattttatataaaaaaaattataataagtttaaagtagtatataaaataatttatcaattttaaatttattttttcatttttattttctgtttttacaccatatttgatcctaaaaaagtatacaatgatggaaaaatatactaaataaaataattttctcatatttagtttattaaaaattgtaaatatatataatataatataattaaataattatgtattttcaaattaggtaaaaaaaaaaattttataaaacaattaaaataagttagacgagtttgaaactccatataaaaataatttattgatttaaaatctatttttatttcctttaacatttttcccttttttttttatatattttctttcatattttccaaatacttcaaatagcactctattctctattttcaagtttgtatctttgtgaaactcatgtaatcctgttccatgataaccttcccatgactacaaaggaaggtggcaacatatcattgggagagtgtcttagaagccaaaatttggcccacagttgaaaggaaaatgcacaattattgaagtggatgaagacttttaacctcatttgtggaagttaggtcgtttttctaagggaaacttgtgtttccatgtagctatttgaaagtaatattatattcaaaccccactcaattggaatatgaaatttgactgtcaaagggacaactatgttttggatccacttgaacttaaaaattaagttttaatccatataagttcatcatttaagccaaagacccagaaaaaatgtgaaaattgaaaaaaaagatatggtttttttatcttcctagaaatgacctttactcactatgaaaaaaaaaagagtaaaaaagtattaatttaaattttattcattttgtaaaccttaataaattttaatgtaatttagtgatttggaaaaaatacaccattttccaaaaaaataaaaataaattattattattatttaaaaatcaaacatcttagaaaatatatatttttaaaattgtgtatataaaatataactaaaaatatgtcaattttttttttaaatgacatttttagaatatattttttaaaaaattagttttctaaaaataataatttttcagaataattatttaaaaaatatttaacataaaaaagtttgtcaagcattatggtagaaaatagttttgaaggatatattcgtctcttcatattttatatcttttccatcaattatgcaatttatatggacaaaaacttaatttttgggcctaactcgtccaaaacacaattgtccttttttttttttcttatattttccaaatacttcaaatgcactccattccctattttcaagtttgtatctttgtgaaactcatgtaatcctgtcccatgcgaaccttcccataactacaaaggaaggtggcaacatatcattgggagagtgtcttaggagccaaaatttggcccacggttgaaaggaaaatgcacaattattgaagtggacaaagacttttaacctcatttgtggaagttaggccatttttccaagggaaacttgttatattcaaatcccaatcagttggaatatgagatttgactgtcaaagaaataattgtttggatccacttggattcaaaaattaagttttggtccatataagttcatcatttaagctcaagacctagagaaattgtgaaaattaagaagaataatataaattttttattttttcagaaatgacctttattcactatgaaaaaaaaagtattaatttaaattttattccttttgtaaacctcaataaaatttaatgtaatttagtgatttggaaaaaaatacaccattttccaaaaaataaaaataaattattattattattatttaaaaatcaaatatcttggaaaatatatatttttaaaattgtgtatataaaaaataactaaaaatatgtcttttttttttaaatgatatatttttagaatatatttttaaaaaaattagttttctaaaaataataaattttcagaataatcatttaaaaaatatttaatataaaaaagtttgtcaaacattatggtagaaaatagttttgaagggaatattcatctctttcatattttatatcattttcatcaattatgcaatttatatggaccaaaacttaatttttaggatcagttaggtccaaaacacaattgtcccttttttttatatatatattttctttcatattttccaaatacttcaaatagcactccattccctattttcaagtttgtatatttgtgaaactcatgtaatcctgtcccataagaatcttcccataactacaaaggaatgtggcaacatatcattgggtgagtgtcttaggagccaaaatttggcccacggttgaaaggaaaatgcacaattattgaagtggacaaagacttttaacctcatttgtggaagttaggccatttttccaagggaaacttgttatattcaaatcccaataagttggaatatgagatttgactgtcaaatgaacaactgtattttggatccacttggattcaaaaattaagttttagtccatataagttcatcatttaagcccaagacatagagaaattgtgaaaattgagaagaatgatataaattttttatctttccagaaatgacctttattcactatgaaaaaaaaataaaaaaatattaatttaaattttattccttttgtaaacctcaataaaatctaatgtaatttagtgatttggaaaaaaatacaccattttccaaaaaaataaaaataaattattattattattatttaaaaatcaaacatcttggaaaatgtatatatttttaaaattgtgtatataaaaaataactaaaaatatgtcaatttttttatgatatatttttagaatatatttttaaaaaaattagttttctaaaaataataaattttcagaataattatttaaaaaatatttaacataaaaaagtttgtcaaacattatggtagaaaataggtttgaagggaatattcgtttcttcatattttatatcattcccatcaattatgcaatttatatggatcaaaacttaatttttgggcccagttggatccaaaacacaattgtcccttttttttttctttcatattttccaaatacttcaaatagcactccattccctattttcaagtttttatatttgtgaaactcatgtaatcctgtcccatgagaatcttcccataactacaaaggaatgtggcatcatatcattgggagagtgtcttaggagccaaaatttggcccacggttgaaaggaaaatgcacaattattgaagtggacaaagacttttaacctcatttgtggaagttaggtcgtttttccaagggaaacttgtgtttccaagtagttatttgaaagtaatattatattcaaaccccaataagttgaaatatgagatttgactgtcaaagggaaaaatattattatttttgtgcactttgagccaactccatcttctgtgtccaaattgcccttccgtttctctagctcaaaatcatcccaacctccatgaaaagcttcaccatatctaccattccctatttgatcctctacttggttttgtttgctcatttcaaatgcaagaagacacacacgtgcttccaaattatgaggatttttttttctttttttttttggctttaatattatttggaatatcattcatacttttattagaaaaatgggttactcatgatctttaacaaaataaagttgaccaattagatttcaagaaaagtacaaaaataaatgaaagtgtttctgattgtccaataggatgagtttgggatagatcattcatatcttaatttcatctcatttatttatatctatatcatatttgtcaaaagaatgaaaatttaaacaacataggacagttcttatacttgcttgacgttcccattttatttatttattttaaaattttttattttaatttaaatcatattaaatgtaaatataatgtataaataaataaataaatattataaatttataatttatttttatgaaaagtaaatttctaattttatatatgtaaaaaaatcaattaaaataaatttttatttaatattatatataattgaggtgaagtcgacaaaattatactaaaacccaacccactaaaattaagaaaaaaatactaaattttaaatctttaacttctaaaaaaaaaaaacacctgacccaaccacccaatctaaatgttttttttctcttatttggaagttttctctcatcttccttcattcccaacaacccaaaatttctctcatttcaattcaaaaacctaaatctaaaactccaaggcggtgtcaaaatgcattttttggtgtgcctctggctaagacgcctcaactaggcatttgcccttagccctaatcatagttaactctcgtctaggagccatgaaagtccaagagaatccgagaaaaacgaaatggagctcgactggaaagagtaggtacccaaaaattgaaaccctaacctccaaatgcattctaaactcgcaaatccatgtccaagatagctttatcagtaacaaatagcatcaaacatctctcttagaccactgaatcgacgaagcccttgaagaactaaaggaaatgatgcaaaaaatgaagtgtgggagactcttaaagcattgggtcccaacaaacccatcgaccgaacctcgatcggatctcgaccggtactcaatcaaacctcgatcgatcacctttggtattttggtgactgtaccttaggtactaccttaactaatcttcggtactactttagttaaacttgggtactacttgtgtgaagcctcaaaacttcatttgtggatattacttacttcatttgtgacctttagaatatgtcattttgtaattaattagtgtggtcaattggttcacatttggtattttggtgatcgtaccttaggtactaccttaaccaaccttagatactaccttagttaagctcattcaactgtctaggagtgagttggtgtccttttcaattttatacataaaactggtcaactagttactctttatcggtcgaggttcgatcgagaatgaagtaaataatatccacaaatgaaattttgaggcttcagataggtagtatccaagttttagtaaggtagtacttaaggttggttaagatagtacctaaggtagattaagatagtacctaaggtatagtcaccaaaatacctaaggtatattcaccaaaataccaaaggtgaaccaattgaccacactaattaatcttataatggcatgttctaagggttacaaataaagtaagtaatatccataaatgaagtttcgagccttcacataggtagtacacaagtttaactaagttagtacctaaggtcaattaaggtagtacctaaagtagattaagatagtacctaaggactattaaggtagtacctaaggtacagtcaccaaaataccaaaggtgaaccaactgaccacactaattaatcacaaaatggcacgctctaaatgtcacaaataaagtaagtaatatccataaatgcaattctgaggcttcacacaagtagtacccaagtttaactaaggagtacctaaagttagttaatgtagtacctaaagtagattaaagtcgtacctaaggactattaaggtaatacctaagttacaatcaccaaaatgccaaaggtgaccaattgagtcaaggaccggtcgagttgggacccaatactttaagagtctctcgtgcttcattttttgcattgtttcctctggttcttcaagggtttcgttgattcattggtctagaagagatgtttggtgttatttgttgttgataaagctatcttggacatagatttgcaagtctaagacgcatttggaggttagggtttcagtttttgggtacctactctctccacccaagctccatttcgtttttcccggattctcttggactcccatggcttctagatgagagtcaactgtgactagggctcagggcaaacgcccaattggggcatctcagtcagagacatgctgaaatgagcattttgacaccaccttggagttttagatttgggtttttgaacttaaatgagagaaattttgagttttcgggaatgaagaaagatgatagaaagcttccaaatgagaacagaaaacattcagattaggtggtcaggtcaggtgtttttttttttttttttagaagttaaaaattcagaattcagtattttttttttcttaatttgagtgatcctgctaacatggaggttagaatgatgttgaggatcctgaactggagaaatagaagggcaatttgggcatagaagatggagtcggcttagaatgcacaaaaacgataatactttcctctttgatagtcaaatctcatattccaactaattggggtttgaatataatattattttcaaatagctagctggaaacacaagcttccctttttccaaaatgaggctgcaacttggaactcggggcattcatattccatcatcatcactattaatattattccagctagctttcatctttgcatgagaatttctacccttgcccgcacaagtcaagaacgactttgtcttttccataaatattaatattattccaagtgccccataaaaagggaaaaggagtgtataaagaaaaaattgaattcaaacctgatacattcaatttaaaataattaatattttacatagttttacataaactatatatatataattttatataaaaaaatattatcaaaatattatcttttaatgatataaacctatgtttaatataagattatataaattttaaattatttttaaatatatatatatatatatatatattttctcctaaaaatttctatcaaaatacatttttctaaacataagaatcaagaaaggagacaagttgaccaagcagcgacacaagtgataatgacatataaataggtttggttgtaactctcttctcttctaaacgttaagagtgaagttttgataaaatgactttcaataaaacaatagatttattttaggtatattttgaaatttttgttagaaatgactttttttctcatatttatttttaaattttatttataaaaaaaaaattgtttaaaaccattgtaaagtgcagattcggcataatttagaaaccacactttcaaaatatggtttctaaataagaataaaaaatgtaaaaactagaggattagtttaaataataatttgaaaacatgtttgaaacatgtattttgttttattgaattagccaatttggcacaaaaatggataaagtgaggaaattgtttaggttttaagtgtctttattaagttaaagtgttaaattcaaccatctcttaatacttggataaaatacatttaattaaaattagttaaattttttattaaatattgattttagttggagtaaatgtttgaaaaaccgagattttttattgaaaaattggttatcgataatggccaaaatccaccatcatataatccgtcgggaaaaaaaatcatagaaagtcggtaatttcacagaaaaatcaacgaaatctcg

SEQ ID NO: 12264 - DNA, 1781 bp, Vitis vinifera
  Intron number 6 from transcript GSVIVT01017096001 (locus G SVIVG01017096001) derived from phytozome v7.0 (chr-ID chr9 ; pos 4128305 to 4130085 reverse strand)
ccaccagcaggtcagaaaattgttctcttaataatgtatcaatttcagtgcttgaagccagatgaagatatcaagggtttgtttaatctatgaagattttctagttctataagccaattccaagaattttatgtgtaattaaataggtgtttcacaaatgttgagattaatggtattgtgttgtaggatgcaaaaataaataaataaataaattcttatctttcatgttgtatctatatattggcttcatttacttaagtttttaacttggggttatgacttgatgagtcacaacaaaatggtaaatacactagaacaaaaaaaatcagctattatataaggaagtagtggatgtctctgataaatgctctagagatacactctagttgtgctcatgccacatgagaagactcagagtactggaaggtaggtctcacacaataacttataatttgaaagaatatttctaactgtttgagcatgctaaagagcataaaagaagctagaggtaaagcatataaactttataaatcacactctaatcaattcaaacaaattaacaaaaaagcttgaaagagataggaagaagagccattgtatatatctcatatcgaatatggaaaaaagttcttaacgttgtatatgtatgaactcttcttaaccttggagacgtgttttaagatattgaaggctccttggtcccataggacacaatatctacatagtttggaatgaatcattataaataatatcaaagtcgacttcctatcccaatttaggggtttgtttggtcttgtaaggaatatatctctgtttttccctacaatctcatgagacacaacaaggatgttgtgtttacacattatatatgtatgcgttatttttaactttgtagatatattttaaagttttaaaagtcatttaggctcataacggataatatctatatggtttgaagtggactattatagatggtatcagagtcgattctcgacttcagtttagggttttgttttgccttataaggtgtatttatatttttaatctcacaatcctattaaatgcaatgagaacattatatctacattgaaagaggagaggggtgattatgatttcttacattagggtttatttagcctcaaaaggtgtctgtttatttgatttcacaatctcataagacacaacaagacccttaccattacttcactaaagataaaattttaaaaatactaattaacaaattactattttacttttataattaaattaataatcttaaaaaataatttaaataataaaaatttatatgaataatgtacaaagacaaaatcaaattcaaacctataatagttcatatttatttatttttctatgattattcataattttcaaattaaaaataaaataaaaaatcataaaaagatgcaaaatgtgtattagcataaattccaccttcatttgaaaagtctaaatgaaattcaagtgttctaccagtgaaattcaacttcatttgaaaaagtctggtccatatgaagttccattccaccaagaaacaaagtagcagccccccaaattccattattcaagactcatatgatagtcagcgcgctacctaacattcatcgatcatttcatatgaatacatcgctccctcacgtctgcactatccgctaatggctagcataggaagaaaccttctccttctcagtttctcatggtgcttcctcacctgcccttcttattcagacacagacacagacacaatcctacaaggccaggag

SEQ ID NO: 12265 - DNA, 4446 bp, Vitis vinifera
  Intron number 27 from transcript GSVIVT01035957001 (locus GSVIVG01035957001) derived from phytozome v7.0 (chr-ID chr 4; pos 6448989 to 6453434 reverse strand)
tggagaagatccagctcgttgcccatttgagcaaggtattttgggtcagttggtttttattttgaaataccctcgtcataactacgcagaaaaaaataaaaaataactataacaataaaggacaggagaaaagaaaagaattgaaagaactaattatgtttttcttctccttaattgttttattacttattaattctcaaatttcctagaaatttttatgatttttatttcattgaagaccatgggcatttccccgctttctatgatttatccatggagtggcatgctgcaattatatgttgccaagttcccatgctcttctagattggtttgacagcttgtgttgctagatacctttttttatttacaagagggtggtcatagatcaggctgatcgaagatcaaaagtggttgtagatcaagagaagccaatacatagggccattgaagaagaaagctaacctatattgtaacttattaggactcttatttctttcctaaaacttccaaatactgaaattagaaagaaaatagatactttctttttagaattagaaacttcaaactttatattaacttcgtttttttttggtcatcaaaacttctaataaagaatctttctaaattataaaaaataaaaataagactcaaatagaaattttagaaaatgtttttttttggtgaatagaaagttagaaatatgggaaattctttttaaggagaagtttccaatgaaaaaaaaaaaaaaaaaacttcccaagctctaaatgagactgaaataccaattttttttattaattataagtctaaagcaactaaaattctcgatttttttgtcttttgttccttttcttcttttttcttgaatagaccatggagattcattcccataaatttgtttaaggtttagttctaatgaaaactgaaaaactaatatagttactatccaagtagaccacaaccaaattactccaaaaattgtcagagcaaagatttcttagaggagaaatctagaccctttgcatgaactgaaacaaaaaaattttggacaatcatttagtacatttctttttgaaaaaataataaaagttcttataataagtaggttcctcccttttataatgctagtcctcaattacctttttgtggtttccaagatacaattagtagcatttgtatgttcatttactatagttctagtaaaataaaaataaaaaaggacggaccttttgacttctaatttaataacaaactttttccatgcaaacctttgacaaacttgctatcaattctctattaatgattgcatcattctctccttagaagaaactcatccttgagtttggtgctgctagagacctcttttactttcttactagtgtacgaatataaatctgaaatattgaatgttgaatctattcccatatgttttagcaaatcaaccacaaaagcattctccccaatctgcttgatgattctatagagttctatctttctttttcttatcttagaataagagccaattggaaatctttccttatgtaggtacaccatcaccatgttgccttcttggaagctttggttgcacctcttctaatttgcatatttcttattctttgcattcaactctttaatcttcaatctgatttcttcatgtagttttttcattaagtcagctatgttttcaccctttaaactcgttcttcccatttctgctaaaggagctaaatcgtagagatgcattgaatgcctcccataaatgacttccaaaggacttttgcctgcaattcgattcctagaatagttaataggcaaattctgcttgtgcaaccacaacttcccattgcttaggaatttctccaaccaatcacctcaataaatctctcaaacttctattgataatctttgtttgcccatccgtttgagaatgagaggaagtattgtattacagcctaattccaagcttcttccataaagttctctaaaaatgaaagaaacttgtagtctttatctaatatgattgattttggaactccatgcaatcacacaatctctcgaaagtagagatttgccatatttgatgcatccatagtcttgcaacaaatgtaatgagctatttttgaaaatctatctaccaccatagatggaatccatgaccccttgacttcttggtagccccaccacaaagtccatgcttaaatcttcccaaggagctagagaaattggcactggagtatacaaacctacattctaaacttttttttattcttagcatgtttgaaaccttttaacaaatttgtacacatctctcctcatttttggcctaaagaaattctattcaatcatggcatatgtcttaccttgccttggcacaaatgtccgcctaagcctccaccatgcacgtcttggatgatcttttccttcaaagagcaatctagaacacaaagttaatttcctttgaataggaagccatcatgcaacaaatactttcctagcattccaaatcgaaccaaagaaggggtcatcaggataaagatctttgaaggaatcgaagccttcaacagtaacagtcatactagtcaacaacaaacttcttcgactaagtgcatctaccactaattttaacttgacatctccttgctacctattatcctctaattgattaggcccccttacacttttaattgtgtggttgttggaccatctttgttaactttcaacattcattgccaactaaacgaccctggctagtgtccaacaaagctgtagctccaccaaatttctaatgtttggcctcaatcccatcaaataaggatgaatgacctgcacttccatttcagttagttgtactctaatccgcattttgcaaaactcatttgtgtattctcacatagaacgttggccttgctgaagtgcttggtattgctgaaacaaaattcctttatagttcaatgaaaggaattaactttggatttgctgctgcattttagtccaactctggattttctcctttccatattagactcttgttgtctacacttgctgctaccaagaggaagcataccccttcaattttatagccactagcttcacctgtttgttttatggaagatttagaaactcaaaaactctttcaacttcactcagccaatctaagacctcctctacttgctcctctccaataaagtgtgaaatgcctaccttaatattttagattttgatcagaatctgtagtacgatgaaatgttggttgcctctctccataggtaaaacttcatccaaaaagtcccctacaatttgctagaattcctcaatagcaggctgatttctcaaattcctccataggtaagttcaaatattctgccttgtttggcctccaatggtggaatttgaagcaccaaaaataccagcttgctctaacctggcacatagttgatcaagctgctgcaagtttgcaaactcttctctagttggactgtttcctgctggttgtgaagatgccgtattaaaatgatctcccagacccaaccattgattcaaaataaccacaaatctaaaatagaggctgtgatgccaattgatgaaagctgaaaagctaatattgctactatccaagtagactacaaccaagttactccaatcacacttggagccaagatttcttaaaggagaaatctaggaaaaagcctttccataaattgaaaccagagatttatcctttccttttaaatagtagaagtccttacaataagtagttctttccttttaaaatgctagccgtcaaccactttcagatggtttccaagatataacgagtagtgtttatatattcatttaccatagtcctaacaaaaaaagaaaaaagaaaaaaagattggccttttgacttctaatttaataacaaacttttcccatgcaaaacttttactatttaaacttgctatcaattctctattaatgtctgcattgagttccttttgggtaaataggcacttacagctcttatggccaataaatacctcacatggccctcagtaaaggtaaatacctggaagctctgtatcttcagtgtggagatgataatgacaagttctagattatgtgtgagatatgtccttcatatggcttcaaccaaatgatgcataaaccattaccttgtcatgctgcataagaacaaagcccatcctctcagtgatgcatattagttttcaaatatttcctttattgtatttcatttccttcatatttaccattgcaaccaagactagaaattcatattttatctcatatttatcttttcattacgaattttgacatccaaacagagcttcagatgatgctgtttaccattgggactgcttgattatacgctgttttgtttaaagtgtttcattttctctccacttgatttttgcagttgtttctactcttctcaactttgtgaga

SEQ ID NO: 12266 - DNA, 8738 bp, Vitis vinifera
  Intron number 21 from transcript GSVIVT01001043001 (locus GSVIVG01001043001) derived from phytozome v7.0 (chr-ID chr 11; pos 6900605 to 6909342)
caagcatagtggtggatcttgcaattttaatagaggtttgtgccttcttgctttcagtactttgtgaaagaagccctgttcttctggtatggacctgtgctctcttgtatggacttgagattgtggatggtttttgagctttatttgatccttctagtggaggtttctgccttttgctgtcattattttgtggaagcactattcttctggtatgagcttgtgttcttcttgcagtatgtacttgagcttttgatagtttaaataggcattttaactgtgtcagggtgttgctttttgttcaagtactactgtctcattttgttgctttttcttattcttcattttagagatgaacattttgagaaattttagaccttttttcttataggcaaataaatggatgagattagtgcgtaggtctcatagcttctgagaatatattaaaatagcctagcaggaagaagggatgcaactcgcatgcactagaagtatgcaaggcacccagaggccaaaaagaagaaagataatggcaaaattcacagatgaaccacttttcttaacccaaactatccacaaaatcaaggaaagactgggagaccctatgaccctactacagttcataagtaacgtcttcaaagaagaatttcattgctagaggtgagcatttaacatgttccaaagttctatgttgctccttccatatcatccaaaacaaacataaaggagttagtcttgaagctttgcagacctaggaagcaaccagaacatgttgaataaagaaaacaccaaggatcaaagatgaagagtccatttgcaatggacaagaatatcctcagctgattttatgccctgtttgcagaagcaacacctattagccaaagtccaacttcttttcataagttaatctaacaagaaacctcaccttggagggtttccttggtatgcaaatctctttatatatctcacttgacaacaaagacttgtagcatatgattttactggaaatatacccttctcagaaacattccaaatcaatttatcctctaacccacctatcaccttgaaaggaatcaataaatgcaaggactccataacctcctcctgattagagaaatctcttctgaagctgagattccatcttccatcccataatccaccactcaagcacctttacgaactcctaaatcatacaagaatgggcatctatctttcaaaggccctcctccctacaccaacttttagttcagaatattgcaatgcaattcctcaatgagaagtcatccaccccccaatgccctgcacatactcaacctgtaagtttctttgcctgcactagagcttcatcctcctactcaaatgatttagaccccacactccaagaaattatttggagctttcttcatcaacattaacaatggaccaaccattagcttcatcctcattagccagaaccaaatctctaccactatcataattcacaaaacaaaccagcttccaaactccgtctcctttgtgaacttgctctctttcttttccttttcatggaaggggacagagcttgctgaacccttatctattatcacttttaaggccataatttccttcttgaattttttcagtcatcccaaaggattttctgaaggtttgatatttggagtttgcctagattgagatttcttgactgtctatagtttctagtaagggtgtaagtaaaaccgaaaaactgatccaaaccaactaaaactgatcgtatcgattcagttttcaataaccataaagtacagtttggtttgagaatcttgaaaaccaactttgtcagtttggttttcagttacattatcttaaaaccaataaaaatcaaaccaaaccgacattctgaactttctatataattgttcaatattctatgacctcttttacgttagactctatgaaaataattcattgtttttggactatgatcaaattaatttttaaatgcattcattatattttgggctaaaaaatttaaatggtattttgaatttcatatccaagttgatttttattagttttaaaaacaaattagacttaaggtctaaattaacttgtatccaacggttcatctaaactagaccaaactgaccttaatcaagtttggtttgatttgaattttccatcactaaaaggtcggttcagttttgattcaaacataaattgatgatgttggtttgactaatttttttcttcaaaaacagacccaaccacacctgtttacacccctagtttctggacctgaacccttttctctaagggccaactggtgcaacactaaaacagggaccacactttctagagattcttcaagattaacaacagaataagagcccccctgtgttcattaggcaggcggggattgtccaacctgttttggactgtaacaaacattataatcttctcttggattgcccataccatgattgctaactttttttatgttaactctattataccctaccaaaaataaatctgtttcagtagaaaataaaagcatcatacttatgatttgtggatgtagacacaagaatgactttagatgaggatacacattgtctaacatggaaaaacccaaaggaaacaactggacagatacacatgtgtagacatgtttatttgttaattttcaaacaatttcttttattttaattttcaaatatttggttgggacaaaatctagtaaagttctattgtttgaccaggtaactcaaaaggcttttactaatgtggggtgaaacatggaaaagtagaagaaatttgggattatttagaggtatagcataatattatagtatttaaagaattctaagtcgggaatataaaatataagggttggttaaaagttttacaaataaaaagggagggccttagaacttcatgctctttcattctccatttcaattgatctctaggttgttctccatcaatcttcctcctattctacttcttaaacacttcctcaacaaggcagtactgctagtctttttctctgcaagtattacaattctcagattcaaaggccaaaagtgccttatatattgaacaatcccatcaaatatggcatgattgtgtgtatgctgcatctatgatacctacttggttattacaatcaggatatgccttttaggctctagaattgatggatttgtagatagtgtcattttcggtttattataatatggatgcttttagtaattgatatttggggcaatagaaaggcttttagaatggataagtgtggaagaatgtaattaggaaagattatagttgtatatttttgtaattaaggagaggattaggacaatcccataatcaaggggatttgatagaattagactgggaaagttcctattttttttgtgttaggaatatttgtataaatatgtgggtatgtacatattgaaatcaaggaataaatttattctcttacctttgaattcttctttaaattctacatggtatcatagccttgggctcctaagtttaggaagagaagaaaaattttttttggccttcattgccaagttgaagaccagaagagtcaactttaaggtttcatcttgtctgagtcaagccatcgcaacaaacctagatcgcaaacgtcgttgtcatcacgccatcatcatcactactataagacatttctatctctgcctcacacctttgtcgcaccacggagatcacgtcgcaactcgtctcagcctcgccatcacccttgggccttccttccatcggccttctctttccctcaaacttccaccctcacaccgtcacaaactcatcacaaaaaaaggaattgtgccatcatcgttgctaaaaaagaaaaaactcctcctacaggcattccttacattgtagatatcattggaaatcaagagtgttggacctccaatgtacttaagagtgctggacctttgatgccactattgcgaccacctagcacccatatcaagctctaacacaattccctgagccttatgggcaagagagttatttaactaagagctcttgtatatttttcaagaaaaaataaaagaaaggaaaaataatttttgacttgtattccttccatcactcttcttctacatggtatcaaagccatttgccctacttgctaagatgaacactatcagaattttgtgttattattggcagcaaattataactgggatctataacagttcaatgtcaaaaatgcatttcttaacggaaatctagaaaaaaagatttatatggaagtccctcctagatttggaaattatctagctgctaaaaaagtgtgtaaactgaagaaagctctatacggcctaaaacggtctccaaaggcatggtttggaaggtttgttaaagtaatgaaaaatatgggatacagacaaagtcagggagatcattcattgttcatcaaacatttagattcagggagagttacaacatcattgtgacaggaaataatgaaaaggagagagaaactttgaggcaatgcttgaccaaggagtttgagattgaagagttattactcatcctaagtagggaatttttatttctcagcagaaatatataacggaccttctcaagaaaacaaggaagttggtgtgtaaactagtaagcacacctatatatcctaatcataagcttggagaggttgaggaagatgttgtggtagatagagagatgtaacaacgtctagtaggaagactcatttatctctctcacacaagactagatatagcatatgttgtgagtgtgattagtcagttcatgcacaatccaaaagaggttcatctacaagctactaaccgagtgctataataccttaaggggtctctaggaaagagcattccatttaaacgaaactcgagactagtatttgaagtttacatagatgcagattatgttggatttgtggttgacagaagatcaactactaggtatttcatttttcttggtgggatttggtaacttggagaagtaagaaacagagtttggtggcaacgtccagtgcaaaagcaaaattttgcgcaatggcccaaagagtttgtgaactactatgtttgaagattattttagaagatttgaagattaaatggaatggcacaatgagactttactacaataataaatttgtaatcagtattgcacataatccaatgcgacatgatcgaatgaagcacatagagatagacagacattttattaaggaaaaactagatagtgagttgatttgtactccttatgtatctactaaccatcaaattgtagatatactcaccaaaggtttaagcaatagaacatttcaagcaaatatatccaagttgggaatgaaaaacatctgttcactagcttgaagggaagtgtggaagaatgtaataaggaaatattataattgtatatttttgtcattaaggagaggattaggacaatcccgtaaccaaggggatttgatagaattaggttgggaaagtttatattttttagtgctaagaatatttgtataaatatgtgggtatgtacaaactgaaatcaagaaatttattctcttagagttggaaatctcccttggttgcatattagaacattttgaggcaacattgggtttgaaagtggacatgtagaagagtaagctaattcctacgacttggggtgggaccatggaaatggatgtccaagctttcactttatgttgtttttggatttcttttcttagctttccattgagattatcttccattgcatgcacaatgacttattgtgtagcattttcaatctctaatccaatggtaagagggttggaatgcttcaaaggaatcttttatgggatggtttagaatgaaaaggaaaatacccgattgagtgaaatgagttgtgccctattgtggagaaagtgaagatcggatatagtagtttggcatctattagtgaaaccttttatgttaatgagagttgtgattttggggtggaaattagtaacttgtgtagggatatggtggcatggaattatgggaggagaagcaaagtcgatattctaatcatgctaggaggcttttcgaggtagatgtcttttgatgttgagaataggcagcatacccatttggtatcgtgtgtagtttggaaaaatgtgaagtataagtttccaaactcattccagatagcagcaacaaggaggctatggtagcatattttcagggatatttttatgattactcataaattcaagggtgttttaacaattactcataattgtagggattttttgcaattgctcatgattccaagagtttttctaattacttatatttctagggggttttgtgctgttattcagtatttgcgaggaggtttggggtcctataatgtcttaaaaatttactttctactcggaaaacgagtgaagagaggattctttcaatttattctctctcctaggagaggcactgtccctccctaattggtaaaatctaaagagagtcggtcatcttcaattgtgttatgacctagcttgggagatgtgatttttagaattttctgtctttgggttcagcaggttaaatcaaggtcagttactgtacagttttaatggcagcatggctgcttcgtgggaaggaggcaacatccagttaggagatcagcctcaaacagtattaaattagaacttatggaaagaacaacacaggataaagtttgagggatgaacttctgattctgagctaaaattatgtgcattgaactctttgtatgtatctgttggtcaagactgagcaggcaagaaagatctgtgattcctggattttgtagatgagtaagctgtaggtgaccttaagtcatcttccccttttttgttgcttttcttgtatattttgggtgcagttggattgcaatctcattttttggaaacatttagtgattttaatcttgcctgaaaaaataacctctttaagtcaattttggtgcatttgaaaggaaaggaacagtgaaatctttgagggggttggagctgttggagttagcactgaaataactgcttcttaactgttctttttgtctaaggaatctcctcagaaatcttgttcgtcctttcttcattttattggttgggtagagctggtcttgaggccaatgctggggtccctgttgtttcttttcttttactgaagggttctatgtataaacttttgtatactacactttgctgctgttttggcagtcttatttattaaacttgcttattaaaaatataaaaatgatgaataataaatgtctttgaaataaataaaatattaatggtataataaatagaaatatataaatgtaaataaaatagaatcacaagtactcatttaattaaaactactttggaaatatattctaaaatcaaaataaaattcaagaaaagagaagagaaagcggacttcttgttcttctccttaattccattccttgtgctagggattaatatggaactgaactatttttatttatttgaatcaatataatttgtcttgtcaatcaagtgtgttcatgtaataacttgtgacacatggtttaagaaacttgaaataaaaactataaaggaacatttttgttaaaatatcttacaatgggaatgcacacagataaaaattactagctgaaattccctatacatcttagttggcagcccatctcatcaatttaatctcctaactttctagaccttgtaaggcaaataagaaagagacccttgctaccacccataacatcattagttatgagtagatgaagatttgggtgttaaggcactcaaactattagttgtcgggaaattgaagtccaggtgtttcaacaaagtgttagcccaaaaatgaggttcaggcaaaacatatcttttacttgacagaaagaactgctgtcatttgtatggctgtagatgtatgaaaaaaattgtctgattatagaagcagaaaaacaaagaacaatgataatatatagaacatttccaaaacataatcctataggagacagtgatatcagattgcaatttagtctttgatcttctattaatacatggaacatgcttcatggaattcatcccttcatatcttgtttaaacacatagaatttaaaagcacatttaaatattccaataatatagaacttaactacagtacagtactcaatttcatgaaatattttggggcatgttctccctattgatagtggtaaagagaccacttgttgatacaagggcatgtcaacccatgtctacatgtttctagaaagaatctacctttattttactccgaaataagtgtggaaaaatagtttctgtcactagatggttcttttgcatgcagacacaaactcgagcagtgtatacgttcaacacacaacatttgtacatgaacacacgcattcacttgtccatattgatagattttggctagttgccacatcagatatctagtgtccagtctacatgttataatcccagcaatggcaattaggtggagctgttttggatttctttatttctaatcatggagtttccattgttgtttcctattcatggaaaagatgtactcatgcttgtgttaatgtattgatatacttaaatttgagtcctttctactttttgaccatgacaacctcatgtcatacacttcttggtgttgatggccattgtgtttgcaggcaaaagaagagacagaactacctgagtacattct

SEQ ID NO: 12267 - DNA, 2874 bp, Vitis vinifera
  Intron number 2 from transcript GSVIVT01032128001 (locus G SVIVG01032128001) derived from phytozome v7.0 (chr-ID chr1 3; pos 22384366 to 22387239)
tggaggcgaaggcggcaaggaactcccttttccgggtaaaccctaatcaccgttctctgaatttctttttactctttccatatgtttggtttcctagaaaacgcaggaaagtaaaagaggcgtcgagaaagtttttgctcctatttatttatctcgatttgcttttgcttactcctaagaaaagaaaagcaaaaaggaaagtggattcagctgagcctgttggttgcattttctgagcaaccagacaggagatttgtttttattggtacttcaaccttttgaaatgatattcttaagatgggttggttttgtttcgtgttttctttttgggtttctgtgcgtgttgggattgaatttttcacatactgtgattcgactggggtttttcctgaaaatttgggtttgtttgtttttgtccaaactgtttgggtaattattctcggactatgttttctttctctccgtttctagcactggaaatattttccccagagaagaacaaaactgaatttgttagttgtcagtgcttcaaccttttgaagcgatgctcttagcattggttcattccatttcatgttctcttttggatttgagtgcgtggtaagattaaagctcctgcattttgtgatcggactggtgattttccctggttgggctgtgtttgctttgatccaaactgtttgggaaaaagactttccagaaaagatttattttctgtttcttgctatggaaatatttcatcagaaaagaaagcaagggaaaaagagacaagaagagaatattatcaactatagatgcgcaaaagttgtagaacttaaattacatttggaacaagttcttgctttttatcacgttggtttaggatcaaattggttaaatagttaacgaatcaagccctttttcttaatttgaaacaaaggagtcttcctgtttcatctatcttggatgaatattttgttgcattttgggttaagatgcaacttaagttagcctagcctactctaatccatttgttaacctgcccatagattagccccaccctgccctcagatttgagttgcttaatacatgctcgggttaggttgggttaattgggtttctaggttagcataagataattatatttatcatatcacttctgtgctttttcataaaaataattaccatttctagtgatgtcccttagaggttgctttaggaataatgtcaaaggaagtagaattgaaacaatatgtttcaattcatagccatgtataaattgggaagaataaaatcttcatagcaagagcaaattagcatattggaaataactataataagataaatagttattagttcgaactaattagagttagatttcttatattaactacacttgttacaatcagtaaacattatatttagaatttaaaaattagtattatttgttagacaatgatcacaatgtaatcacaccgcttacctccaacatttgatcattgactctctgtctgaaagtcttagtcaattcctgcatttggattggatgtgtctttagagacctgatatttattcatttcatgtgaaaattttttgtcgaaatatttttccatcaaaccaaatggagtctttcttttatatttaatttttattcttttgttaatagaagtgatcaaacagtagaccaacttgtttaaatacaacaaagttacggggcaattatgctgaaattactgaaggataaagtactgaattgttatcatttcatgttttttgtatattgagggtagttacatgtgtgatggggctgctcaattatttatttcttacttgatgttccagcaccaaagttttagtgatgttcttttgataggacaaaatctagtgaagttctcttgataggacaaaatcttagtaaattaatgggagttttcatgatttttaaaataaagccccaattgctatatggggtaggaactttatatttgggccaaacattggtcaacttagaagaggaaggcagcccctttgtgtattttttgggcggtttggaaggaaagaaacatgattgcttttgataatgaggagctttcgattcataggttgaaaaattattttgtatgtaacctttggttgtggactaagtcggttgtaaatgatggtcctcttcctttactcagtttttttgattggctaggtgctagttgagggctggttttgtatttcctcttctttttgtgcctcttgtatactccctgtatgcttttgggtcagcctcaaggtgcccttttctaatatatgctttttgtgtgtttgcctatcaaaaaaaaaaaaaaaaacttagaagaggaagtatgatctcaggatcatctgataaggtcaaagagtctttcttagtagctttcatagagcgtgtatggtggttagtatggaaacaattggatacactgtggttgacctatttactaatatttgtaatgctattattggattgaatgaacaagggtcattaaaaaagaatgcattttaataggtagggtctaattttttttccatgtttttctagtgctttctaccatttttttccaatcaataccaacatctgaattctgaattgatacctctgtattttcagaatcttgatataatggtgaactttcgccattttattcttgcttgtagacatcaaggcaattaccttgtttgtctatgttctcatgtatattgtagtttcatttaatggataggtacctaagagagcaggctatgttctgatttcaaggatgatgaagtctgctggatatactttgactgcttcctttaatcctattcattctattatcctaaaaaaccatcgcagattgtcattaaatatattatacgggaattcagcta

SEQ ID NO: 12268 - DNA, 7299 bp, Vitis vinifera
  Intron number 14 from transcript GSVIVT01029148001 (locus GSVIVG01029148001) derived from phytozome v7.0 (chr-ID chr 11; pos 19161127 to 19168425)
ggaacaatcttacagttactattccactttcattggtaataattctaagttggaatggcattcatggaaacattcctaatgcgataggcaatcttcataatttgaaggaacttctattcagattctattgaaaatcttttaagttctcttaaatttttttgcacattcatgtaaaataaagggtccaattccaaagggaattggttccttgagaaatatcccatcaacaattaagggaataaatgccacccccctttctattcattcaaaaggcccaccctccctttttatcgttaaaaggcccaaggcccaaataaacaattttcatttaaatgtttaaaattttcattaaacaatttgaactctgggcctcaaactcattaaatgagttgagacaccactccactacatcttaacttattgtttcatacgacgaacaaaataaatacattttttactaaaaaaatataatattaatatatatatatataaaatattttttaaaattataaaattagttaaaataaaataattaattttgctttcattttcaatatattcacatttaaatattatataaattttatttaataaaatttaaaatattaatacatttatacttatgcataagaaaaaaatgaaatataattgatttttaatttatatatatattttaaaatttttataataatatataattatatatttatgatgttatcagtttgatcaggttcaactattgatttgactagtgaaccgtaaacctataactttttcgatttaatgatcggtctaattctaaaaacattgaaaatttaacttatcaatgacttggggaactgaacctaaagaatgataaactatctccaaatcaattccaagatgcataggaaatctcaatggttgttctaccatgttttttggaacttgtttttaagttcaaaaataataattctctagtctttaataaaaataagagtgttggacaagtcatttttaaaataaaaaataaaaaataaaaaataaaaaacttgtttaaaaaagtttttaattaatttatcttttgttttggttttgtaaaaacattacaaattgaatttatattatataaatttaatttaatttcagtcttattaaaaatgaaagtattttctaattataaataaatagttttttttttagtaaacacaaatactaatattataacacaatcataagttatatatattttttattaaaaaaatataccattttagtataagttaaaaacataaggatattaacatcatatttttttagattaaaaatgaataataataatcttaataatattttattttaaatgaatagtgaatacatgtttaattttttaagatataaataagtcaaaattttcatttcaactgaattaatataatattctaaaatgttttttttacttaaactataattaattaaattagttttttttgaattcaaaattattctaaaaatttgaaaaatctattaaagaatttaaattattatttatgtcttagttaatttataatttatttacctaaatttaaaaaatatagttctttatatgggagaaatagtaaaatcatgacttataatctatcagttttgatttattattttttttaatgattaaatctatttttttgagttccaaattatttttaaaaattattaaatacgttaataagtcaatataaagtgtcacttgatttgaaattcatttttatagagagaaaatttataaaaatataattatgtatataaaaaaataatagagacattatgaactaatttttatctataaatttttggtattagtgagtttattatttgagatttaaattatttttaaaaattactagacttgttaatgaatctaacacattaagtcttgtttaatttatatttcattttcttgggaaaaaagaatagaaaataatgactttatgtggaaaagaaacaatagagtcattctagactaatttttgtccacaaatttctaatattgattggttcattatttgaattttaagttatttttaaaaattattaaactcattaatgaatccaatacattaagttttgtttaatttgaagttcatttgtctaataaaaaaataaaaaaataatgattctatatagaggagaaacaataaagttgttttatatcaatttttgtccataaatttctaatattaatcgaattcttattgaagttttaagttatttttgaaaattactttaataataataataataataataataatgattattattattattatttgttttggttatgtaaaaacattgtaaattcaattcatataattaatatatctatatgtattaaatttaattcaagtgttattaaaaatgaaaatagttttgtaattacaaataaatttaaaaataaatagtttttggtaaaacatgaataataatattataataaaatcataaatatattattttattaaaaaaaatactattttagtatatgcatgctagaaagataaggatatcacatctttgtaagtttttttttccaagtgaataataataataatttttaataatattttatttaaggtgtgtaatgaataaagtttaaattttttaaaaggtaaataagtcaagtttttcatttcatgtacacatttagtactttacgaatataatattctagaatgttttgatttaatctacaattaattagatcaattttttgaattgaaaattattcttaaaaattaaataatcaattaaagaatttaaattattatttatgtcttacttaatttataatttatttatctaaattcaaaaaatataattgtgtgtaaaggaggtttaatttgaatttcatttgcctagtgaaaaaattggaaaataatgattctatataaaaaagaaacaataaggttgttctataccaatttttgtctataaattttcggtattaattgtttaattatttaagttttaaatttcttttaaaaattactatattcattaatgaatccaacatattaagttttgtttaatttgaaatttatttcccttgtgaaaaaaatagaaaataatgattctatatagaagagaaacaatagagttattttaaactatttttttttcataaatttctagtatcgaatgagctattatttaagtttgaagttatttttaaaaattagtagagtggttaatgaatccaaagcattaagttttgcttaatttggagtttattttcctaatattttttttttacaaaaatatgatatatatatattttactaaccttgcatatataataaattttggtctatgactatctaatgttattaagttccatgacttttttaattgaatcggtttttgagttttacattatttttgaaaattaataaattttacgtataaagtacaatttgatttgaaatttatttgcttaatgaaaatttttagtgaagttaaaagaaattttaaaaacacctataatttaaaggaatatcatatttgaagatttttcatatcagtattagattgtgtaaaaaaaaaaaagggaatgatatcatgttcaattttatttgttttttaatagttttttattttttatttttactttttaatgctttcctttgttttaaaaaaaaaaaatgatgaaagcaactcctatttgttaattatctaaaaactattttttatttcactttgtttttaaaaactatttttatagaacattgaccaaacaatgtcagtatttttttataaaagttttctatttttaaaaacaaaaaaagtttttaaatcacacggccaagaggatcaaagttcaatcccatgaaaatgctgctctttaataaaactttatgcctaacttatcaattttaacctgtaaactacttggaattaatcatgatttacaattttttattggtaaccatatcagattcatgggctaacagaatgttatcaaatggcccactgcgtgggaattattattggatataaaaggagcctcatttgactctccataggaaatagcattaagacaatcacatatcaataatttcaagagtttatttgataataattttaagaaatgctttcgatatttgaatttttttatcttttcaattataaaaaatattagaagcattttttaaaatcactaacaaatgcactctaaattgactgatagtgtttctgcttcttaggacccttttacctatattgaaaagaaggaaaaaggtattttaccgggagtgataactacagtcaatcaaaaatgctaaggctttagataatttgaattcagttttcctttcccatctaccaaacatggccaatctaatacctaaatttagattgaacatgacccagaagacagataaaaaatagtttgaaatttagtactcaataagccaaattgtattacttgcattaatcattgatacacacctatcaccagatattgaatgtatatattacaaagtgaacaattcaaaagtttcatttcatgcgtctgcatgtttctgaaatctatacgacatatgcaagaacaagaataatggaaagaagcagcaaacatcccagttgatccgcatcaaacaatcctaagaccatgccatggaaaaaaaaacctagaatccaaattgctaaaaacccgctctgataccaattgaaaatgtgaatctcaataatggactacacttaggggggagcgctggtgaataggtgttgtagaacaatttaaaaattctcctaacaaagattacctaaccttagactttcttaatgtcaagaaatttctcttccaacaactattcaacaaagtataacatacacaagtaagaatatatgcaacaacactctcccaacaatttataaatgcaaaccacatgcaaatgcttcaacaatcctcaaaaataaatcaaaagaacaattatctcttcaactcacatcaattcacttcatgatatcattaaccaaaatgagcaaaaagattattaaggatattccatagatcatcacacttatataacctcatatttcttccattcaacatgtatacccaagtaatcaatgatatcaaaaacagaaattaaatcaaagtgtagagtaagagaaagagacaattagcacaggattttaacatggaaaacctccgaagagatcaaaaaccacgggcctaccaccgattgaaaaactccactatgaaaaataaaaaccgagtacaaggttttacctagctcaagccaaccaatccttcttggactacttgactactgccttcactttcagcttctcaccttcatcttccggagcacacttggagtccacaccaagttcaatctcggcctctttttgaatccacacaagaagaaaatgagtttttgcacaaacccaaatagaatgagagattgagatatgaatgaaggaatgaatgaacccatttattactcaagaaaatccattaaaaacttgtttggaaaatattaaaagaagtggattttctttgcaataaaaaacgtcaaattaggaaaacaatatgagaaaatgaagaacacatggggtggctgctctctccacgttttctgcagtcattctctagaaatatgagagaaaattgctttttaaagagttaagagaaggccttaatctaatggttgagatttgatttttaaaaaaaatagttggattgatccccccacacctggatcgatctagaaacaggggaataaaagtcttgcaccaaaaaccatttctcccaactttctaacacatttaaagattaaaaatcggattaattcacattcaatcaccacacactcgactacatacctcggcttcttagcaaagtcttagtcttcaaagtcaagtggttcgaagaggaattggaaagtagagttaggggacacttaggaattttgttcggaattgccaacctagctaaacactcatagggttcacgcatccaagttgcatctaagccgaggcaacatgctcttgtattgctactacatacacctatgtaggcggcccttgtgtgtgccaagacctacccttggcttgcatgttgtgtacgtccccatgcgaccagctctacgccccatgcatgctgcctgagtgctttcccccatgtgtggtctgtgtgcaacccgtgtgtgtggcttcatgcacccgcccaagtcctacttcttttcatccaatttgatgtcataaacctttcgtcaccttagtccttctctaggggctccctcatgggtgcaagatacccacttatgatgcccccttagtgtctcatggtctatgtcaagggtctaacacttgtcttttatgtcttttctctttttctacgtacttccctatgttgagttttactaattttccaatttttattattgttagattctgttgaactgtcaattttcttgaaaatataaacttataggatttaggctcgtaatatatatatcattcactctaacaataatatctccaatcccaagaatgtgaattgtccttttggttgattatacagtggtgagaaaaagaaaaatttcaagttgagtttaatttcgaagtatttagtgttgtgccttacacttatactgctacctgaattcatgtttgaatatggaaactgatttagaaatgtccacaaatattaatctagaattaaaacaaaaataaagtttacatatatatttttgggagagagctccatatccaccacatctacataatttcataagagcaagagccagttctagtcctaaagttgtacagagcctgaattccttgaatgtcatcctcattcaaacccttagtcactccaaaggcaatggtgggaaaaatgatagcgccttcaactgaactatgaccaagtccaagaagatgacctatctcatgcaaggcaacagtctccacgtcaaatgcaccagcaacagcacctactacccatgattcatccccatcaaaatgaagccttccatcagttggggaaaaagaatgagctatggttccaccggggccatcaaacgggaatccatctccatgatcacccctctgaaaaccaattttcatgtcagcattcgtgtagtcttgagtctctgcaaaggtgaagtccgttgcagaagcccactggccaaaagctctcgtcacagcgctcatggtcgtacttgaggtgccggaaagaaatgcataggtgagatgggtattggaaggtggccatcttggggatcctgcgaagaaggaataatgagctactgt

SEQ ID NO: 12269 - DNA, 8582 bp, Vitis vinifera
  Intron number 13 from transcript GSVIVT01012941001 (locus GSVIVG01012941001) derived from phytozome v7.0 (chr-ID chr 17; pos 14048531 to 14057112)
aactaaggctccacattggcctgttggtgttggtcagtgattgtgttggaacatgtggttttctctctaatatcactttgtttcagtaaagcttctcagtagaatcatgcagtgatggtctatagtattcttgtatcaaaatacttatcaactttttagagtaatgaccggccatctttacatcttaatacagtgatagaaatgaagtttgtaaatagaggctagaaaataaatgaaatacctcctttaatttatttgaatgaccaaccaatacatttatataggaaaacctaacaactagataggaactgaaaaagcttcctaatcacctacaacaactatattttaaattttagaaaaagaatattaataaaactaatataacaaacttgatcctaatcaatattctctccactccccctcaagttgggaaaaaatgtctagtattcccaacttgtatgttagatcctcaaagctttgtcttgggaagccttctgtcaacatgtctgcagtctgttgcttcataggaatggtgatgcatattagctcttcttctatttcctctttgataaaatgacgatcaatttccacgtgctttgttctatagtgatggattgggttgtaagctatacttatggtagttttgttgctgcaattgaggttcataggattgtgtgagggcatcctcaactcctttagtagtaacttcaaccaaatcatttcacaaatccttagccatagaccttaacttggccttaacgctgcttttagcaactactctttgcttttttacttcaccagatcactgaatttccctaaagaaatgtgcaatatcttgaggtaggcctcctatcttctactaagttagcccaattaggatcggtgaaagcttaaatcttcttctctactctcttccctaaaaacaatccctttcttggagtacctcaatattctattcattgcctataaatattcctcacatggtgcatgcatatactgaattgccacacttaaaatgaatgctaagtcgggtctagtttgtgctaagtagataagcttaccaactagcctttggtacctgcccttattcacgggtgtccctcctttattctatccaaatatatacacctcttcatccaattctccatttaaaaaagcattcttgacatctaactggtgtagtggccattctagatttgctgtaagagatagtagaacccttaaaggattgagttttgcaataggagcaaaggtcttatgataatctactccataagtttgagtaaatccctttgccaccagcctcaccttgtatcactcaattatgtcctgtaaattgtactttatagtgaataccaacttgtagcccactatgctcttccctatgggcaaactcatcaactcctaagtgccattcttttctaatgtactcatttcctcttgagcaaccttcttttgctccaaaatagctagtcttttgtatggaccttaggatttctacattagagagattagtagtaaaagcatgaatggaaggtgatagttttttcataagacacgacctaagagatgggatgaagtgtacatgacgtgactcccttacaaagggcaatgggcaaatttaacactgtaagatcatgttcaatagatgaaattgagatgggaatggaattgagattacatgaattattctagtttgccacttctggttcaaattcttgaccatgaggagacatgaggtgttgtccactttgaggtttgaatctccttaaatagacatgaggccctggttggttttgcctttgaaaatctctccttgcttctaagttttcttgatttggtgattacatagtaggttcgaccatgacataaggagaagaaacaaaagggattgaagcaggattgagcaatgataattcccaaaaacaatcttcacttggtataaggagaagaaataggaggggttgaagcaggatcgagcaatgataattcctaaaaacaatcttcacttggttatgtctccccttgaagtggctagtaaattgggttgagactcagagaaggtaacatctttggacgttaagaatttttttttttgtaattgtacaatagcatctataacccttttgattaggtgaataaccaagaaagacacatttagtggctcgaggctcaagcttactttggttagctgaatgattctgaacaaactttggacaactaaagattcaaaggtgtagagaattaacaaacttgaaatgatgataggatttaatgagggttgaaattagagtttggtagtttaggatcctagatggcattctctttatcaagtaagaggtagtaaggacgacctcttcccataggcacttgggaatatgcatagtgaacattaaagcccttgcaacctctagtaaatgtctattttttctttcaaaagccccattctattgtggagtgtccacacatgaactctagtgaattatcccttgttttgctagctactctcccaagatataatggaaatattctcaaccatcatctattcttagaacttgaattagtgtttggaactgattttggactatggaatgagagttttgaaagatatggcaagtttcaaaattttcctttaagagataaacccaacatacttgtgtatgtccatctgtaaatgttaaaaaccatttttactagagatctttgttactctagaaggccctcaaatgtcactatgaattacaaaaaatggctttgaagatttttaaggttgagcaagaaacattgcacaattgtgttcggcaagtttgacatacttcacattggaataaacatggattttaatttctgaataacaatggaaatagttttttcaaacaaataaagttaggatggcctaacctacgaaaccatgacattatttcttgatcactaaaaacagaaatagatttacaactagaaactagattttgttcactctcgggttcttcctctttaaagtagtataaccctcatgttctctaccattgccaatcgtcctcccccaaaagtggttcctgaattcatagtaagatggagagaatgtagcaacacatttttgctaatcgagaaaagtttgcaagacaactttggaacatggagaattgaatgaaatgttaagttttttgagatttttattgaaccttttcaagcaacaatgaaaagtaacccatcgactatcttaaccttgtagttatgagagcatggagaatgagaaacaaaggattgtggactacaggtcatgtgatttgaagctcccaaattaatgatccaagtctcccttttattttgaccagcatgaagagcagtaacaaatgtacttgtttaggctagagtgcatgaggaaatatggaccattggctgtgattaagattgggactgatttgggagcttatacaggttgtctggctgctctttaatttgttccctgttgagtgaattctcccttgtagtactctcagatttggtggcagcatgatcatctactattgcttggaaacctcttgcattagttggtttacttggtttctagtttggtggcttgccatgcagcttccaaccggtttccttggtgtggtgaagcctatgacaatggtcacacaagatggtcgcccttttgtagaatactacaatgcgttaaacttgatattcatggagcttgattattggagacccaattatatgacgtgtatagctgatattgagaaacgaaggaagcgtattgctgaggatcgggtttatatattttttgtaggtcttgatcatagtttggatcaagttaatgatagtgttttggcacctctcctttaccaagtctagatgaagcctattcactagtcaattgtgaagcgcagaggtaggtcaccatgggaacaaaagattacttgaaacttttgcaatggttgtctataagaataacacatgaccaacatcttttattcctattgactgttcttctcgcttctgcactcactgcaatagcatcaaacatacgacaaatgtttgttggaagaagcatggttatccagagtggtacaagcttaaacaagctaaaaggaagtagaagaaatcaactcaggttgctcttactgatgttacttctctagcttttggttctcaggtttcttgattatcttctcaagaaggtaattttggtttagcctttatttctattgcctctaatacttgggttattgattcaagtatgactaggcattcttccttactttactttctaatgccctcacttgttaagtctgctcaagttgctaatgagactcctatactgatttcaggagccaagaatgtctcactttcccccacactctccatgtcctttgtcttacttgcgccaagtctctctaatagtgttctttctattagcaagattaccaaacatctaagctgttttgtaaccttccattctactcattgtgtatttcgtgacagttttatgaagatgacgattggcattggtaaggagacgggaggtctttactacttagagggggtaatagagttacaatctgaatttgatcatatttttcaagtagctagagaaacgtttgatagagaaaagattcttttgtggcattgctaattaggtcactgatctttttcttatttggaacgtttatatccttggttgtttcgaaatatttcaatttctagtttaaggtgtgaacaatgcatttatgctaaaaatcattgtgcgctgtttaaaataagtctcaataaaagcccggttctttttactcatgtttttacaaatgtttaaggtcctttttttattccttctgctttgagtcatatatactttgtgtcttttattgatgactgtactagggtgaggtgggtatatttgctttagtctaagaatgatgttttacatgtcaatcctcaattttttaaaatgactgccacacaatttaatactcaggttagggtttttcactctaacaatggttgtgagtttgtgaattagtttttgttgatttattcaaagaaaatggaatcctccatcaaacaatgtgtacatacacaccacaatagaatgacatagtagagcgtaaaaatttaggtggcctaagctttaggcttgaagctttaccatgtgtgttccaaaacgtttttaggctaagcctgtcatgagtattgtctttctcatcaaccgaatggctgcttgtgccattgattatcaaactcctttgcaaatgttatcacagtttcactttattcgttctactttgaatatttgtcctaaagtttttggttgtgtatgttatattcatctacactctcattaaatggataagcttggtcctcatgcttttaactgtgtctttcttggttactttaattccaaaaagggttataaatgctttcatcctcctacaagcaaatactatgtctccattgatgttcaattctacgaaggggagtcttatttttctaggaatgtgtctttggttcctcttcaaagagagattagtagtaaggaagaggaaaggttatggttagaagagaagaggttatggatttcaggtcgagaaggattcaattgatttgggaaagggggagtctttagatactcccaaccctatgacaattgagtttgaatttgaggaaagaagggatggaagaccagccaaattatttcaacaaagtcatacaaggaagaacaaagattctattgttatgcccccttcaagctctaatactcctcttgatggtactaccatgcgaccggatgactcttttgagacaaactgaggtacgtgttccttcacctttaacttctgaaaatgctaccttgaatccacaagttggtgaacaaggtaagggatatcctcttcatgatcgtaaagaacttgataggttaggtttctcaaaatcatcctctaatgttgtctatcccatttctgattttgtctcttatcatcacctatatacgactcaccttgcttttgctcttcagttatcctctgcgtctatttcaagtcatcacctatctaagtggaagtttgttatggtagaagagatgaagactctttagaagaagtctacttgggagatggttgagctcccttaggaaaagaagatagtgggatgtaagtgagtgtttttagtaaagtagaagttagatgggacaattgtagatacaaagttagattggttgctaagggatatacctagacttacagaattgactatcaagagacttttgcccatgtggccaagatgaacacagttaagagtcatactctctcttagggtcaatctgaattggccattaagatagtttgatgtaaagaatgcctttctccatggtgatttgttagaggaggtgtacatgatccccctttagggtttacaccaaaaagaagcaaggtatgcaaactaaaaaggctttgtatggattgaagcagtcgtccagggtatggtttgataggttgagttagtcgatggagtatggttttaagcaagtgatgacatatcaaactttgttttataagagagatggtgatgacattactttgcttattgtttatgttgatgacatgattgttataggtagtgattttacaaaaatagagaagcttcagagctatttggtcaaggaatttgaaatgaaggacttgggtgctctaaaatacctcttaggcattgagatgtctcggtccaagcaaggactcttcctctcattacagaagtatacattagatgtcttggttgaaactggtaactctgcttgcgaacctataaatactccaattgagataaatcatagcttgttcatttgccctgatcagattccaatgaacaaagaaatatatcaaggactagtgggaaaatcaatctatttgacccacattagacttgacttgtcatatgtagttagtgttttaatgcataattcaagtgattgacatatgaagtaaatcgtatcctgacctatctaaagcattctctaggcaaaggcattatgttctccaaacatggataactagatgttgagggctacataagctcttaactttattggatcccatattggatagaaagtctacttcagggtatgtgtcatttgtaggagggaatttggtaatcggaggagtaagaaacaaaatgtggtctcgttatctagtatagaaattaaatattgtgcgttccatcatacgactatggaactttcttggctaagaattcccttaagctagcttgggtttagtcctaagaaacctatggtgctcttttgtgatgatacaacaactattgagattgctaataatatggtacaacatgatcgaactaagcatattgaacttgacaggaactacatcaaggataacctagattctatcatgataaagtttccttacatcaagagtgcaaatcaattggcggatatgatgactcatgctgttactagtggtccattctatgcattattatccaagttggacatgtacaatatctatgcaccaacttgagggggagagttaacatatacaattgtgatgtatagttgtgtataattgtgtacaactgtgtatataaccataattgattgcgtagttgtgctttatacaacagttcattattctgtataattgtctattattttgtatagttggctatcctaaaatagccttgtgtaccttatataaatacccttgagatatatgaaaatattcattcaacaatttaccaagtaacctcataaaataaatcaagctcttgccataagttcttcaatgcattatagtattgagtcacagattgactaccttgttttatatcccatagctttgatttgatgtcaaatacttgtgtagaattccccaaatttgagtaagtcatttttatagcttccctaacatcctttgcagttcgcaaaaaaaggtatgtttggccaattttagtctccataaaattaatcagccacacaattactattcaattttctacatcccatccttaaaaagtaggatcattcgcctttggttgatctagtcaagtgtctgaattttcctcgctctcgaataaccaatttgacccactacgaccattgcaagtaatttttgttgttcaacttgtgggctgtgatttggagagacgtgttgtctcctccttgcaatatgcttgtcccaaccatgatgattgttttagccattaaactcttagactaggggtacaattctgataccatgtaaatagagattagaaaataaatgaaataactatcttaatttatttaaatgaacaaccgatacatttatagagaaaaacctaacaaccggatagaatctaggctaagcaaaatccctagaaaataggaattgaaacttcagagagataaactttcctagtcacctacaactttattttaaatttttaaaaataatattaataaaactaacataacaaatttgatcctaatcaatattctctacaaggttgaacatgcatttcacttttcctggattcggggattattgttacttgcaggtaatcgcccagctgccaagattcctgttcca

SEQ ID NO: 12270 - DNA, 11375 bp, Vitis vinifera
  Intron number 1 from transcript GSVIVT01004878001 (locus G SVIVG01004878001) derived from phytozome v7.0 (chr-ID chrU n; pos 16343953 to 16355327 reverse strand)
ggagtgttttatttcaattaccaaatgcaaatgttttgaagatcttgagaaatttcttggaacttaaaactgcttttcaataggaattcttggtattggtgagggtttgaaactactgttcttaaatatataaatccctttttacttgtaagcaacaaggaccgataacccacttggccaattggcattgccttaaacccaaacaacttgtatcatattactcaaaatctacaaacgtgtttgactttgtcatttaaaaacatttttttaatattttttaaacaatttttaaaattaaaatgaaataaaaaataatttttagaaacacaagaaggaattattttcacctgttttttttaaaataaaaaaaaaatatgggtctgtttgattatgttttttaaaacttgtttttaagttaaagaataaaaaatagtttttaaaagcaattttcagaaaatatgccaaacgggtcctaagattggttaattagggttcttctataaaatatgaaaaatattaaaatttggtttttaaataatataatgatttatttaactataggttaaatttctttcaaaataaaaaattatttaaaattttaatattcttattctggtcaataatttacaatgataaatacttagatattatttttcaaacttacggtaattttaaatcataattaaccaaattccttcaactactttctaattaaatttccctttaactaattaaacgcaattttctcaaaataaaaaataaaaaatggttgtaatatttatttattataatattgaaatttctatttataaaagtttgtagtaaaatataaacaatttatttaggaggcattgggatatacttctcaaagaaaaccattttttttttcatttgggtccttgggctgtttaggatgaggttaaaaaaataattggagggttcaactaaaaatacaagcccactgggtcctttcatttcaacaaacaaaagattgaaaaggcctaactaaaatgcaagcccattgggtactttcatttccttggtttgatgcctattatgaggaatttcattcttagcccaacctggcccaaatatttttttaaggggttcaggttcaagcttcgcttttatttcaggtgaggcccaaaattcaagttgggcaagccacattggccgaattcaggttaaaaataaatttggcacaacccaatctttgggtacatggtgattaaacttttagcttaaatatcaattacaatactttaacttaaacaaattgaaggaaaaaagaaaaaaaaaaaccgatttgtgtcccatattaaagttttcaaaaaattatttatattttaaattattatttaatataaaaataattaaaaacacctaagatttgttctaaaaataataatttatttttaaaaacaaatttttaaaaataataattaaaaactttttttaaacaatttttaaaattaaaataatttttagaaacacgagtaggaattgttttcacctatttaaaaaaaaaattaaaatattggtttgtttgattatgttttttaaaacttgtttttaagttaaaaaaataaaaaatagtttttaaaagcaatttccagaaaatatgccaaacgggccctaacattgcttaattagggttcttctataaaagatgaaaaaaaaaaaaaattggtttttaaatcatataatgatttatttaactataggttaaattttctttcaaaataaaaaattatttaaatttttcatattcttattccagccaatatgttacaatgataaatacttaatttttcaaacttacggtaattttaaattataattatccaaattccttcaactacttttgtggaccccgcatttcggcttaatgcgttttccactcgatggctagctcgattttgatttcgaaaaattgatctttattgattaagaaaaattgacttggagtcgccacttatttttgttttatttttaaagggtaaacaaaataagaaaaaaaaaccctaagtgtgactccttgttttggaaaaggtggtctgtgaaaaaccggatcgagttcgggggtcaggttacttatcgggaaggtacggtgaagaccatagcacccctctaagtccctaaagtcgggtctctactaataaaaggaagctgatgtggcaatcgaataagaaagtcaatgaacactcacgtcaatcatgcacatacgagaaccagaatacgtatagtgaatgatcagaatgagtgaatgcgtacctgggcagcaaacaacaacgcgctatcatggaatggggttagtgaataaacatagaatgattatatgtatatcaagaacagagtaaatcaatcacgcatgacaaataaataaataaatcaatcaatcgatcataaaatcatatgtgtcgggcccccaccaaagcccaatctatcttgcatgaattagtctcacaaattccattcatgcttatgtagaaccaagaaaaacagaaggtttatttgagagccgaagtagaattaaaactgtttgagtgaaaattggattctttggaatttatttgaaaattggagttttgggaattagatttaagaattggaattttgggaactaaatttgaaagaaattagaattttgaaaattggaaattaagttcagaagtcgaaaaattggaattgtctaatgatggaattttaaaataaatagaataataataataacgaaaataatgattaaataaataaaacatgaattttggaatttttgaaattggaagttttaaagaattgattaaaaatggagttttaaaataaatgaatgaaatattagtgattaaataaattgaagtgagtatgagaattttcgggatttaattcggaaatcggaaattttatagaattgattaaaaatggagttttaaaataactgaatgaaatattagtgattaaataaattgaagtgagcatgggaattttcggaaattggaattttgataaaataagttgatatgaaaaacaaaatttcagaaattgtaattaaatttaagcactggaattttgatggcttattcaaagattgaattttaaaataaataaataaaataatgatcattaaaccaattgatgtgagaattaaaatttcagaaattagaatttaaattaagaaattgaaattttggagattattaaaaggttgaattttaaataaataaataaaataatgataattaaataaactgatatgagaattaaaatttcggaaattggaatttaaatttaggaattggaaattttgaagattcttaaaaggttgaattttaaaaatgaataaataaataaaataataatggagaattaaattttgatattgaaaattaaaatttcggaaattggagtttaaatttagaaatcggaattttgaggagtagtttaaagattgaattttaaagataagcaagtgaataaataatgatgattaaataaatggatgtgagaattaaaatttcggaagttgggatcgaattcggaagtcaaaaaattaagattgtttaaagaaggaaaacttgaaataaataaatacaataataataacgaatataatgattaaatgaaagaacgagaattttggaatttcttcaaatcggaaattgaatttaaaggttggaaagttggaattgtataaggaaggatattttgaaataactaaatggaataatattaataataatgatagttgaagtttttgaatactaggttttaaagattggagctttggcaactagattaaaattttgaatcttgacaattaactttggaaattaataataataatagcaataataataattaataatgatgatatccgttaataataataataataataataataataatcgttaataataataatgataataatccgttaataataataataataataataatatctgttaacaataataataatatccgttaataataataataataataataataatatccgctaataataataataatactagttaataacgataataataataataattgaaattaataataatgatatgaattaaaagggccttgggctccatctccatcataagcccaagcccacttggcaaatattaccctccatctccatcacataattgggcctagtgccccaactaaagcccaagccccagcttcatcttcctccttcccaccctcgcgcctagctccagcaccgacagccacctcctcgcggcgacagtgcccggggtcatggattctccgggcttggtggacagctcctggacctcggtggcgcgagaacagctcctggaggatctcgcccttccaagcgaagacggcggtgctgtcgcgggctatggcagcggcggcgtggtcccggagcagtaacagcggcagcgtggtcccggagcaatagtgcgacgcattgcattggggaatcagtgtcacagaaagcaataattggagtgtttcctagtgcagcttccttaataggctggtaatggagagtgatcttgatggaggggttgggaaaaggctggagagatgggtgagcgtgagggttagaaaaaaaaaagggatatgggcagttgataaatgggtatgaaagtctagagagaaatgggtgattgaatgatgggtatgaaggtgtggttcagaggtgacgaaatggagtgggctggtgggtattaaaggaaatggcaatgagatcagcagcaacagggcataaaagaaaggtccgaaaatcaacaacatacagcatataatccatattttcccaacccaaatcgacgagcaacgtggagcaaaccaaataggaaataaatgagaaatatataaatcaaaataagtaaggaatttacctcaaactcacctgcagccactctctttttctccgttatctccttgtaatcgactgtcacaccctgaagaacgggctcctcaagcaactgaataaactccctttttgactctcagaagaagaatccccatccaaagctgcccctcctttttgctctggtcccgcctgctacagaaaaaaaaaggccccccagatccctcttttctttttagcttctcctccaagccgtctgctgcctctcccatcagccgcacttctctgcccgagccaacctcccatcagccgcctgaaagcagcccacttgagagccgtccgaaaaaacagcaaagaaataataaaagaaaagtcccccagctccttgggggggtctacagctttctaattaaatttccctttaactaattaaaagcgattttctaaaaataaaaataaaaaaattggccgtaatatttatttattataatattgaaatttctatttataaaagtttatagtaaaatataaacaatttatttaggaggctttgggatatacttctgaaataaaacaattttttttctttagggtccttcggctgtttaggatgagattagaaaaataattggagggcccaactaaaaatacaagcccattgggtcctttcattccaacaaacaagactgaaaaggcccaactaaaatgcaaacccattgggtactttcattcccttggttggatgcctattttgaggaatttcattcttaacccaacctggtccaaatatttttaaggggttcaggttcaatctttgcttttatttgaggtgaggcccaaaattcaagttgggcaagtcacattggccgaattcaagttaaaataaatttgacataacataatctttgggtacatggtgatcaaatttttagcttaaatagcaattacaatactttaacttaaacaaattgaaggaaaaaacaaaaaaaaaaaaagcaaaaccaatttgtgacccatattaaagttttcaaaaaattatttatattttaaattattatttaatataaaaaaatcattaaaaacagctaagatttgttctaaaaataataatttatttttaaaacaaaattttaaaacaaatatttaaaaataataattcaaaactttttttaaacaatttttaaaattaaaatgaaataaaaaataatttttagaaacataagtaggaattgttttcacctttttttttttttaaagaaaaattaaaatatgggtttgtttgattatgtgttttaaaacttgtttttaacttaaaaaataaaaaatagtttttaaatgcaatttccaaaaaatttgccaaacgggtccaaagattgcttaattagggctcttctataaaagatgaaaatgattaaaatttggtttttaaataatataatcatttatttaactataggttaaattttctttcaaaataaaaaattgtttaaaattttaatattcttattccggtcaatatgttacaatgataaacacatagatattatttctcaaacttacggtatttttaaatcataattatccaaattccttaaactactttcttattaaatttccctttaactaattaaaagcgattttcacaaaaaaaaaaagaaaaaaagaaaaaaagaaaaaattggctgtaatatttatttattataatattgaaatttctatttataaaagtttatagtaaaatataaacaatttatttaagaggtgttgggatatacttctcaaagaaaaccattttttttttctttcgggttcgtggtttgtttaggatgaggttaaaaaaataattggagggcccaactaaatatacaagtccactgggtcctttcatttcaataaacaaaagactgaaaaggcccaactaaaatgcaagcccattgggtactttcattcccttggttggatgcctattatgaggaatttcattcttagcccaacctgacccaaatatttttaaagggttcaggttcaagcttcgcttttatttgaggtgagacccaaaaattcaagttgtgcaagccacattagccgaatttaggttacaaataaatttgtcacaacccaatctttggatacatggtgattaaatttttagcttaaatatcaattacaatgctttaacttaaacaaattaaaggaaaaaaaaaaaagcaaaaccaatttgtgtcctatattaaagttttcaaaaaattatttatattttaaattattatttaatataaaaaatcattaaaaacacctaaaatttgttctaaaactaagaatttatttttaaaacaaatttttaaaaataataattaaaaactctttttaaacaatttttaaaattaaaatgaaacaaaaaatttagaaacacaagtaggaattgttttcacctttttttttaaaaaaaaaaaaattaaaatatgggtctatttgattatgttttttaaaacttgtttgtaagttaaagaataaaaaatagctttgaaagcaattttcagaaattatgccaaccgggtcctaagattgcttaattagggttcttcaataaaagatgaaaattattaaaatttggtttttaaatattataatgatttatttaactataggttaaattttctttcaaaataaaaaattatttaaaattttcatattcttattccggtcaatatgttacaatgataaatacttagatattctttttcaaacttacggcaattttaaatcataattatccaaattcctaaaactactttctaattaaatttccctttaactaattaaaagcgattttctaaaaaaaaaaatggttgtaatatttgtttattataatattgaaatttctatttataaaagttaatagtaaaatataaacaatttatttaggaggtgttgggatatacttctcaaagaaaacaattttttttttctttagggtccttgggctgtttaggatgaggttaaaaaaataattagagggcccaactaaaaatacaagcccattgggtcctttcattccaataaacaaaagattgaaaaggcccaactaaaatgcaagcccattgggtactttcattcccttggttggatacctattctgatgaatttcattcttagcccaacctggcccaaatatttttaaagggttcaggttctagcttcgcttttatttgaggtgaggcccaaaattcaacagtaagccatattggctgaattcaggttaaaaataaatttgtcacaacccaatctttgggtacatggtgattaaatttttagcttaaatatcaattacaatactttaccttaaacaaattgaaggaaaaaaaaaaaaaaaaaccaatttgtgtcccatattaaagttttcaaaaaattatttatattttaaattattatttaatataaaaaaatcattaaaaacaactaagatttgttctaaaaataataatttatttttaaaacaattttttaagacaaaattttaaaaataataattaaaaaccttttttaaacaattttttaaattaaaatgaaataaaaaataatttttagaaacacaaatcagaattgttttcacctatttttttataaaaaaaaaaattaaaatatgggtttgtttgattatgttttttaaaacttgtttttaagttaaaaaaaaataaaaaatagtttttaaaagcaatttccagaaaatatgccaaacgggtccaaagattgcttaattagggttcttctataaaagataaaaattattaaaatttggtttttaaataatacaatgatttatttaattataggttaaattttctttcaaaataaaaaattatttaaagttttaatagtcttattctggtcaatatgttacaatgataaatacttagatattatttttcaaacatacggtaattttaaatcataattaaccaaatttcttaaacaaatttctaattaaatttccctttaactaattaaaaacaattttctcaaacaaaaaataacaaattggctataatatttatttattataatattgaaatttctatttataaaagtttatagtaaaatataaacaatttatttaggaggcgttgggatatacgtttcaaagaaaacaattttttttttcttctgggtccttaggctgtttaggatgaggttaaaaaaataattgtagggcccaactaaaaatacaagcccattgggtcctttcattccaataaacaaaagactgaaaagacccaactaaaatgcaagcccattgggtactttcattcccttggttggatgtctattatgaggaattacattcttagcccaacctggcccaaatatttttaagggatttaggttcaagcttcgcttttatttgaggtgagacccaaaattcaagttgggcaagccacattggccaaattcaggttaaaaatacaagcccattgggtcctttcattccaacaaacaaaagactgaaaaggcccaactaaaatgcaagcccattgggtactttcattcccttggttgtgcctgttatgaggaatttcattcttagcccaccctgacctagagatttttaaggggttcaggttcgagctttgcttttatttgaaatgaggctcaaaattcaagttgggcaagccaatgggccgaattcaggttaaaaataaatttggcacaacctaatctttgggtacatggtgattaaatttttaacttaaatatcaattacaatactttaacttaaacaaattgaaggaaaaaagaaaaaagaaaaactaatttgtgtcccatattaaagttttcgaaaaattatttatattttaaattattatttaatattaaaaataattaaaaacacctaagatttgttctgaaaataaaaatttatttttaaaacaaattttcaaaaatttatatttgtcgaaagtttgttaaacctgtgtttcaagttagaatttaaaaaaaaaaaaaaaattattggaaacaattttgttgtaaataacaaaaaaaaaaaccgtttaaaaaaatattttcaagttagtttcaaaatttatatattgtaatagattttaacacttaataatttttttttaaaaaaaaggctcgataatagtgcatttgatagtaattttagaaattatttttaacctaatgtttaacaaaatttaaaaatacttttaaaattttgaaaaatcattattgtaatttttttttacgaaacattagattggtaattctcctaaagacactttcagaaatgcttccactaaaaacacgagcccaatagtgacaatagtgacaaagaaatcatacatttgtgatcatcctcttaaattgcaatagtaatagacaaacgcatatcatgttcacacccccctcaaacatgttcctgtacccaccttgggtgtgagagacaaagtatagtatttagtgacagatagataaatcacacatttttatcacgcacctatggccctatacccatgattgacaaatcacacatttgctattgcatgcatgtggccctatacctgccatgagaggcataaatcatggtagtagcagacaaatctcaatcttcccaaatcatagtagtggtagataaatcatgcatttgtgattacacataattagacataaataaatgggggagtgatttcaactcgagacctctaaataacctaaaatcttattctgttaagtaatcaattttcctcaaagttttaagttatcaagaattggacccatattttgtatatcatattctaacaaaagcaatattagtctaggttaggctagtctacataggtggtctaaaaatattcttggcctatgacctccaaaccgatttctcctactggcaagaaataagtatagtgaccaaagaacttgctataatccttggtctaattgaaatgtaagttggcattccatgaattgtttgggggaatataattgaatttcattgattcttgtgtttgggagttcaagctaggcaagacacaataagtttttgtgagcatgttaggtacattaaaaatcaatacatgaagaagttcaaatatgataattaaaaaacaggaactagaaaaaaggtattagaatgtgcagtaaattgcaagagacaatgcatatcaataaattgcaagagacaatcttttgtgtttgacttgttcaaaggaagggatgtaagcatggaatcctataaatataccagctttctagttgtcttaccctcaaaccccctcttattatgggatgttagttcctttcctttcctttcctttcctaaataaaaattttctatttactctaaattcccatttcagcaatattgttttctggttggaagtttatgtgacatggtcaatgcacaactaacatgattttctatttaagattttttttttcaaaccaatgattgcataagaataacccattacaatttaaccgtttttttatgtctagc

SEQ ID NO: 12271 - DNA, 1515 bp, Vitis vinifera
  Intron number 2 from transcript GSVIVT01015360001 (locus G SVIVG01015360001) derived from phytozome v7.0 (chr-ID chr1 1; pos 2977254 to 2978768)
agactggcgttcttaaattggcggattttgggcaggtaatgctttaaatttgatgaatttcacttttcataactcttggtttggtagccgagaacattcaggaaaataaactatagttcttattttgtttagtcttcgtcaaatcttgcattttttaacgtactcttcttttatcaattaatggtggaaagtttgtgaatttcctgctacctaactgttagtttggttgcagagaaaacataggaaaaatggattgaagtgttacacttatattactttctcttttttaggttttaatataaagcggtgactcttttcttttgatttgttcactgaagttagaacatcctaactaatattttctacagaattaattagtgctgcgttgagtatcttcatttttatgtcatttatgtttctgtactttttatccaaaagttttatgtttcctgatgaattcaaggttttttgctaaatctatgtaaaaccacgatatattgatattttcgtattgatttcaatgaacattttaatggaagatttactccatcttctagtggattggagaaaaatgtgtcgttatgtttggaatttattttgattctgagatttgattcctttctatggaaggattaattcaaatatatctttcttcatcttggaagtcttgaattagaaaactgattttgattaaattgttgtatcgacatgcatggaatttctcataatgcattggaagaatttttaacttttttataattaataaaaatgattttgattttaaatcatgtgccaaggtgggtactaaaaatgagaaatgtgtaggccaaggtgggtactaaaaatgagaaatgtgtaggcttgccactagggctgcaatttgggtaggttgtgaagtaactgagttcaacccaaattaagaaacaatcaacctgcaattatgattagactaagatttctcgaattgatctacttgtcactacaattagactgtcaatactgcagcatgcacattgtcatgtgattggcttaatgccctaattttgtgaagttaattcaaattgttctctttctccctcttgcttttgcattctcaagaggtattatagaaatccctgatacaagtactcataatcttgtagtggaacagggaaaaagtagacatatgctttttgtgaactgaaacccaggaccacaaattttgtgtgttcatggatttatgttgtgaaacaaacttaacctaactatgagttgatgcatcaaaacacttctcaattgtttgtactataatattagttgttttcgagatgatattagtgagatgaattcctgatggctgtgacagctttagagttggggtttgaaatctttattttgatgaaatcattcctttgtataaatattgaaatttatgatctaaaactattgtttatttttcatccaagaggtgaaggtgtttaatctggctgttgattttcaggcaaggatacttatagaacctggatttgataaccc

SEQ ID NO: 12272 - DNA, 2072 bp, Vitis vinifera
  Intron number 1 from transcript GSVIVT01032663001 (locus G SVIVG01032663001) derived from phytozome v7.0 (chr-ID chr1 3; pos 1709985 to 1712056 reverse strand)
ggggctcctggactcactctcgtggcacctctaaggtcatttttccgagctctctatctcttatcagttttcatttctgctgatatacgatgttttggtggtttgatttggttgttttatgggttggaactcgtaattgcgtgattctaggctcgatctggtgtaggtttgggaggatcaggcaatttgagtagccagggattgtttgatctttttcttgagttttagatttggatgagtttggttgcgattgatgattgggattctgttagaagtgtgattgaggagtttgttttgttgtggaagggagtagaattgaggattcgtgcattttagaatcattaatatttaatgaaattggtgttcatctcgggactaatgtggtaggaagagagtgaaaatgacactgccagagacacggtaggataagttggtatagtgaatggtagggagcatggaccagttccacataattctgaaaatattaggaggtgagttcttgagaatatgagtagttagggcttgttgatcctgtgaatttaatgtgatctttttgaggtttgggttgtttggattgtcttggaggcgtagcttctttgaaatgtggttgaatttgattgatttggatgagtttggtggtgatgaaattagaaattgttgtgcaattagtaatttgaatcctagtggtagtgtggatagatcttggatgaaagttctgcatacagttaagaatttgtgcattttacaattaccagagattaaaagcagtttgtccttcactctcataatttgtatcatatttttttgataaataagaggatatattaaaagtgccaaaagaattagcacatgagagtacacatgatgtatacgacaggtgctaagaggcaaaacaaaaaagagggaaaaccttgtgtgtaccgtgctacgcctccacttaggtgcttttaatatatgttttctctttttcctaccaagagaaaaagaggagggaaaccaaaaagctaccctcaacaggaacccatccaatatggaaaatcaattaaaagcatagagcctacatctgtgccatagatagaaattatcgaggaaagtgcttttgagtctttgatttgacatctcctcattttcaaatgatctttgatttattttagatctttgaaaatgcataaaacaagccttattttgccttcttcccacaaaggagctatgccaccttaagggagagtacctaactgaggcactactgaaatttagaagagagtgaaaactatgccacagaaatttaaacttaattaagaaccaaaaccatttgaaccattctgggaggtgaaggcagttgttttttctacctaataaaaaatttacaaaccttttttattggaccttttataaaatcagattatctggtcctctccctttgttccaagatgtaggaattaaacaaatctgacacttagataaagactgacaccccacacttaaaacccaaattgatgagtctaagttcacttacaatgaaataggaatttgtgctgtatttcttactaaatatttggactaggatttagctaagaaccgagaaccatgtataccattttcatggtgaaggcagttgtttttcttctattagttgcaaaatttgcattatagttttgttctgatagaaacttttgcaaaatttcattttattgttgttctggtgtcaaattgtgagcttgagagaatttatacctagacttgataatcagggttatagatatttatttcgcaacttctttttcccacttctttatagttttgaactacttaagaaaaatgattcctcagaatctgtaaggcttgatgccaatatatttcaactagggggttttatgtcattacctatcaaaaaaaaaaaaaaactagggaattttatatcattgattgattgtgtttctactagaacatttgttgtatgagtttggggacacatttttctggttccttttggaactgcttttctcccattttctccatcttttttgttttcatgtaagttgattcgcttttcattggtttgtttttccagg

SEQ ID NO: 12273 - DNA, 5971 bp, Vitis vinifera
  Intron number 1 from transcript GSVIVT01015983001 (locus G SVIVG01015983001) derived from phytozome v7.0 (chr-ID chr9 ; pos 16786499 to 16792469)
acccgaggttcgtcattttcctgctttgtgtaattgcatagaaactctcggaacgtgaaagaaaaaagaaaagagtctgcaatttagtcatcggttttgctttatttgattaaaattcctccgtttaagcccaatctggatgataatcccgaaatgtgcttgtttggttgctgagaaaattttgtagcatcggaagaagtttcaaatgtcagttatggggtttgctttgtttgattgaaactccattctgtaacgcctgatacagctacttggctctattgtatgaaatcaaattttgttttcctttctcttcccgggctttcttggcccaaaaagaggtttgacttgaaaaacccttagtttcggccaaattatttgttgatacaaaagttagtttatttaaagaatattggaaatatgcttggttattccagtagggatttgatcttttaattttgtggagttcagttgttgatggtttttcttggggttatgccccttgtacgcttgttatttttctgttttagcttctgaaaatgcatttggtgagatttgatggtatataacgatcaactcaatgagagatggtgcaaagctgtctggataagctcaggatggcgtttggcaagggtaaagaacgtgggttctagaactgtgagcatgtattgaatctaggatgctggatttgatccttggttaggataaattgaggaaggcaagaggaaaaagtgcaagcaggtatcaacaaaaggacttagatataccctgtgaaaaacagtgggtttgcattgtgatgtatgccatgctgggattggtggatttctagataaaagtggctttaccttcttgagacttgttcagaatggctttggcctttgctgttgaagctgagcttagaacccttctgcaacttttacacaatgcagagaagtttgtgtatggagaggaatacttctgtcatttcttggatgacaaacgtgttggcaattccttggtggtttgtgtatctttccagagagatttggtacatttctaggtagttatattgtggggattgttaaagagagcaattaggaagctgacttcctagaaaagaggggtgctttgactggggaaacttccgtggggagattgtgaattttcactgttaaagagagcaacggtaagctgacttcctagcaaagaagggtgctttgactccaaacttttttggagagttattttcctcgattttggctttttgtccagtttttttttttttttttttttctgtgtagctatttggttacttatttattttcatttctttccttgaatcttgaaagataattcattcttcaaatttggttatactttttctattcctaattatattcttgtttttttttgttttgctttgttttttttttttttaaataaaaaggttaacgaagcccagtccttctgttcacttcacaaaagagaagcaccgtgaaaacataccttagttttatcatattgtttgtagtcaaggattatgaagtgacatacttggcttttttttttttctctttttttgattggaaacaatttcactgactgtaaatacaaagaaggacaaacaatctttccaagatgtacaattaatgatcaaaaagttgaaacatatattgcacacacctggcttatgtaattacttttgcttggaaatcagtttgcctgtgataaatccaagatgatgtaattaattttttcattgatttgaagttgaatgtctgaagagattttctgctcaaatttgttttagttttttcttgccattagttttgaacaactcgccctacataatacttgttagtttattatgtcattttcaaaaggcaatttccccaacatgtttaataaatttgattatgccatttgtttgggtatggtaggcattagagatcataaaaagattcattcaaaatgatttgtggttgtaatagaggtgcacttatatctgaggaacattgctctactggtttgataaaatttttatggaataacattggcctgaagcccttggattgtgagaggctttctaagtgattttgaaggagtttccattggaaggacccttgatgaacaagggtcttgttcgtgcattttgatgaataaggattttcagttcaatcaccagtttggttttaaaacattgcattttggtgataaatttgaacaaaattatgaccaaagtttcatcatgtcgcattggaaaatgcaatattagtggcaaataaagcaatacatgagaaaacacaaaaggcatatgatcatgtggatagggctagttcacatatcagaaataaataggtgttgtaaaagatggaggacttggattagggaatgtttatcttctgatagttttgcagttttaggaaatcgaagtgccaaagtttgggttaaagcaactaaataggttaatacaaggcaatccactttccccttttcttttatcattgctgttgattttttggacacttctgccaagagttgaagagtggcattttggaagactttatgttaggaataagtagaattagtgtgttgcactcatagtttgtagatgataccatttttttttttcaagcgctggtacaaaagatttgaaaatactaaaatcatttatcagttctttggcatatatcgggtctgaagataaatctagataactgcgcactatcaagaatcaaaactagccatgatcaaataataagtttagctaccttgctagaatgtaagggctctcattagcccttgtcatatttaggtctcccactagagggaatctaaaggatactcttttttggacttggtgatagataggatttcttggacattatatggttgaaaaaaagtcttcttgtccttaggtagtaaaataacccttgtgtagtcttatttgtcccacattactagttatttattttttttgttttcaagattccaatctgtgtcttctaagatcaagaaattgtgaagggattttcttttgtcaagaatgaggagggtaaaagagacctccttattagttgagactaagtgtgcaatcctaaagaggaggaggaacctgggttagtaagatctctttgagagttaagctctcttcgggtagtgactgtagaagtttcccaaagaaagtaatgcttcatgacataaggttgtgtcgagtatctacaagttacactctaatggttggggtgccaacattacaatcaggtagtcacactgttgccattggaagactatttcactggttttcttatatttttctactcatactcattttcagtggggaatggtgctaagttcatttttagaaagacttgtggtataaagattgaacattttgttctcgattttcaaaccttttcaaagtaatgaaagctagaatttccctattgctctattctcagtttctcttcttcttcgtatttctggaactctaatttttgtcctttaacttattgattcaaaaattgagaatcttgaaattttcatgtcttctgttatttttgtgtgcatgtcactatccttcccaaatacgaaaatttggtcattgatgttctcatatatttaccgtaaaatctttcttctcatgtctatctataccattgactttgacctcttctttttgagctaatttgattggaagatctgaagttccatctcagattaaggtccttgcataggtggggtaataagaagatcaataccgatgatttgctacaagtgagaaggcattacaaagcccttaatctagactggtactgtgtttcagggtgcagagttgatcgatagtcattttttaccatctccaataactttggggttttggtcattaagagtagttgggttatattaggttccctttagaaatgtgactaatgtgatgactatttcttttagggtgtccgggagtgttgcttgtctcatattcatctggatagtttggcaggagaaaaatacaaggatttttttaagacaaatggaggaccttgaagactgtttgagacttgatttacttttattcctctttctaggcctctactaccgtagcttttgaggttacccctacaagtgttttacaacttgattagtacttgtcatgcagtcaaagaggttgcatagagagttgcttccaatttggattctgcctccaatgggttcatttaaattaaattttgatgaatgcactttaggtaacctagctcaattggcaattgcaagtgtgattagagaccatagtcatagagtgttggcagctttcccaaaaccagatgatgagagggcttcaacaccgaggcagagattttggcttctttttagagagtttactatatgccaaggttttttatctctctaacttacgggtggaacaagattatgctaattgtaatatcttggttgtctaaatcggaaagaggtccttggaaatatgctgggtggcttcaccaaattctagatgctgcgagcaacttgggttgtgctctctcttcgtctcctcactttgctaatcatgctgcaggtcatttggcaaaactagggaccaagtttcttttcttagggatcttttacccccttaagaagagtagagtttctctaacttgtactacatgttcatgttatattttcgagatgtatgtttgtcttattattttcaacaagttaattctccctattcttttgatcagcttttgtacattttggaagaatttcctatcccttttttgtacttaaaattcatactagtagttagttttttccttgtatatatacaattcattggttaatttgccttctgccaaaataatgcattatatttctctccctgtttgcatatgaccaatgtgagtagattggatgcatgtacgaatggcaagggtgccatagtttctcatttaggagcagttacctttagtttgagtctcgagatgccaatttgattttagagaatttttctatagcaatcaccaacgttgatagtatttctttcctaacccttttttactagagatgaccggcccactggctttaccaaatggctgacagtgtgtgtaaagggtgaggtaaagggggtcgttattccaaaatcaagactcatttatttttagtctcctttcttccctactgcatataaattattttactttctgatccacctttttcctcttctcataacttcaatatctttttggaaacatccatcatcatcagttttttctttaaatttcaaattttttttttttttttttcaaggaagagccccatgaatttgtcataactttcagtagaaggcacaacatccttctctttgagaactaggtactatgtttggataacaccatggcagtatacattcacacaatagtttcatttcagattattctgtatatccgttctcttgtagctgtatgatgttcccacatacaatcgatgcctttctttcttctctttctccatcattttttagataagagaagaaagaaactccagatgcaaaacctaaaatatataaaagaaaggcccacatgcaaatcaccgagtctctgaaccatttcaaactcattcaaatctggtcatcctctgacaaagtatggttcagatgagaaaagaaatgcattccaattcttgtttactgggggggaaacaataagaaattgtttttttttgtttatttatttttcagtttttggattgactggttctcaaatataaatagtaaggcctgtaagatgtgatacagttctagtgttgtagaacactaacagctctattttgagtgttttactccatatgattgtgtgcttctgcattttacttacaactggtagtttgcctatctggtagttttcatatacagaattgtgcgacttttagttcctacctgaatctaataaaatggttttctccttgtgaaggaacaaagcaagattctcatcaagattac

SEQ ID NO: 12274 - DNA, 619 bp, Vitis vinifera
  Intron number 2 from transcript GSVIVT01028445001 (locus G SVIVG01028445001) derived from phytozome v7.0 (chr-ID chr7 ; pos 7698235 to 7698853 reverse strand)
ggggccttcaattccaacactagagcctcaggttgattgcttgattaagtgaattcttttcttgtataggttgatgctttgattctttcaaagtcaccctcatctactatgatgcaaatatacattaagttggttttttacttttttagagttttccttatgggtctccctcatctatttgtttgttatttctctttagagttttcttaattaatatttcaatagattttagtttgcttccaaatctctatttaactataaaatttatggatgattcacttttgattgaaaataaaggctctactatattgtagtagggaaggtttttctttcatatttttttgttccaaattttagtgatattttgacttagagcattggtagagtgctcgtgtgtttgcttcactagacttgtggattatgcatcaatagatttacttaaagttcccttgttttcttggttgagattgataatgttataaatatttttcttcttttgtggtcctcttttatgtggcttctacattattgttattgattttttattttttatttttgtttcctttcttttttcccatctacagatactttttaaatatcctcctgggaagaagttagc

SEQ ID NO: 12275 - DNA, 2170 bp, Vitis vinifera
  Intron number 4 from transcript GSVIVT01012669001 (locus G SVIVG01012669001) derived from phytozome v7.0 (chr-ID chr1 0; pos 490057 to 492226)
ccagcaaatcagagatttgttctcctctctgacaggttggtgaatctataaactgaaggaggttcctttatttatctgttctctgttagttgttttttttttatacatatttttgtccccattgggacttgaacctggaacctcccacaaaccctcccaatcccttttaacttgaaccaggcctcaagggtatctgtactctgttacttgttagaaaaattatttcaagacatgatgaaattgtcaaagctaggtttcatgggtatttaaatgtgtccaattccaacatgattagttatgggtgttgcccatcacactgtaaggtgctcagaaagtgaagcaaaatgatttattggttggctttatcaaattttgctctacttaagaaatgaaagccttaggtcttatttggaaattggtttttatacaatttccctttctctagaataaaaaaataagaaaacatgtttgacaatcgaaaaacaaaaatatatggtgttttaagataatatcttttagttggtttcaattgttttcacttgttttttatggttgttttaaaaaataattatacacatatggagaatgattaaaaataaagcactacacataaaagttatttaaaaaaaatatatttagaataatagaaaataggttaagaacatttcaaatttccaaataaatttttgttttatgaaacattagagaatagtttgtaaaaattgtttttaagatttgtttttgaaaacacttccaaatagggccttaagccctttttgataattgttttcaaaaacagtttttgaaaattgttatctagggcctgtttggaaatttttttttagaatagttttatgttcacaagaacaaaaaaaaaaaaggaaaacatgtttgacaaccagagaattgttttttgttttttgtttttaaaaatagaaattaaggtgtgttttcaaagaacatcttttaattgctttcagttattttctaagagttattttaaaaaataattatacaaatatgtagaataattaaaaataaagcactaaatgtaaaaattattttaaaaattattaaaatcaaattaaaaacattctaggttcctaaatagacttttgttttataaaccatcagagaacaattttcaaaaactattcttaaaaatcattttttagaactgttttttaaaatagttatcaaatagagatgttttgtagaacaaaagtatgttaggaaatctgaaatatttttaacctgttttaaaatttttaaatatgcttttaaaataattttaatgtgtagttctttatttttaatcattctacatgttcatataatgattttttaaaacaacccttagaaaataagtaaaaattgaaaataattaaaagatgttctctgaaaatattttattttctattcttaagaataaaaaacagaaaataattttttgtttgtcaaacgtgtttgtctgttttttttattttgaaaaatagaaaactgttattgagaatagttatcaaacagacccttagtttttctattttttcacaatagtcgaaaccacaaactgaataattgtaacttttttttaggcttaagttctatggatgagagtgcctggctcaaccttgaaaacaaaggccctatctttctaatcagctataattcacaaatcatttgtggctgttttcgtaaagcaagaagttagcctagaaataattttagatgtctcatgctattcttctataaacttgtgtggaaaatgctattggcctatatatcccgagcacaagggtagccaagaatttttgtagatggtatcatcccaaaactgttcttaatttttttcccctcttgttttctgtttttttggttttttttctttctttgatgtatccagttgatggacatattgtattgattcagaatttcaaatttggttttctcaaatcaactctatttaactcaaatggtactgcatccaaacatttgggtccgctcaactacatgtatccttttccacagtgatacactttcagaccatgcccatttattaaattgtggcccatatttctcttcttacagccttaaccgaaagtattttctaattttttttcttttccattttgcagctgtgttcctttatataactttagctacatataca

SEQ ID NO: 12276 - DNA, 5611 bp, Vitis vinifera
  Intron number 11 from transcript GSVIVT01035727001 (locus GSVIVG01035727001) derived from phytozome v7.0 (chr-ID chr 4; pos 3715832 to 3721442 reverse strand)
gatttgcccagaggtagttaactgcctgtcagataatctgttttggtcataaatgaattaggctgaatgctaaagattcatgttactttatcttgttagattcatgcttttcttaagttttatcctttagttacttgaaagaattgttaagttattcctaaatcatctttgcagtgtcttgttttaatttattggtaatcagattgctgccactccattactaaatatcaagatcttcatttttagttgaattatgactttgacataccagattttggtaaatgtcgagaggtgtcagataccatgtgctgggactttctagcagagagtacccaataatgtgaggctggtgtcaatgtttttgtattagcaatgacactgttgttaacatttttctttattactggctcattgacttgcataaatcttggaggcaccaagcacagtgtgcctgacactgttaatttcttgttaatgtcaggcaccttaccacatgggagaaaatggattgttacatatatgtgtttgtgtagatatataattccttgtcaggaatgggctactacttagctttggggatttagggtatgtgcagaaactgtcattgaaaacaattttttgttctaaataagaaaccagttttcaaacttaaaaactaggtttgacaaagttttaactgaaaatagttttttaggaatctgttctgaaaatggtttgtttttagaatgaatttgaggtgttttttttgttttgtttttaagaaataataataaaaaatggagaatacctcgggaacttttgcattattcattagagtaaataccttcacggagaataagccaagaaaaccatttttcatacttgagttcttaaacagaattttatttctaaaaataattgagaaccatttttaagatctgttttcaagaactgttttttgagaattttgccaaataggccctaagtaattccaaaatctacccttgtacccacctagaatccaaatatatttggaaacagatgtacagttgtcctgatttcctctcatttagtagatatctcttgcattttctttttagcttttttttattgattggttggaattttgatgtgttatgtcatttttaagaaacgaataatttctagctcttaattctcaacaaggatgagtacaacttatatagatacatggctgactaggctacagctaatttaggactaagtcatggaacctaattacatgcagatttctaggaaagagataatgaaagaaataaaatgtacaaccatacaaatcaattacaatatttacaaatttggacataatttgtcaaatcttcccaccttcctcctcaagcaggtgcaaagatgtcttacattcctagcttttctaagatttgatgaaaacccagatttggtaaacctttggtgaggatgtctgccgactgcctagttgaggagacatatagtgtacaaatctctccagaatccactttctctttaatgaagtgtcgatccacttccacatatttggtccgatcctgataaactgggttatgagctatatttataactaccttattgtcacagtacaacatcattggctcctttactcaatcttaagatctgtgagtataattttcagccatagtagctcacaaataccctgagtcatagttctaaattcagcttatgcactagatctagtcacaacaggttgttttttgcttctccaaataactaaatttcctcctagaaatgtgttataccctgtagttttatcttctatccaccaattgaacttgcccaatccacataggtataggcttccaacttgaaatcaccgttcctttgaaacattattcccttgcccagggttgtctttagatgtatgataattctatacatagcctccataaaagacttaagtggagaatgcataaattgactcaccatacttgtagcatatgctatattaggtctagtgtgtgataagcaaattagttccctcactattctttggtagatgcctcagtcagccataggttcttcattattttcccctaacttatggtttgactctataggggtattagcaggtttgcaccctagcatgccagtttctttgaatagatcttgtacatattttcattaagaaataaaaatcccatttttgatcttgcaacttctatccccaaaaagtacctgagactacccaagtctttgatcttgaattcctttgctaggtatgactataattttctaatttcttccaagttgtgaccagtaataatgatatcatctacgtagacaatcaaaatagttaccataccaagaggggaatgtttgaagaacagtgtgtgatcaccttggctttgatgatagcctttctacaccattgacttcgtgaatcttccaaaccaagttcttagggattgcttgagcccatagagtgatttttttcttgagcccatggagtgattttccttctcatgttttttctcaattaatacaattgtttgtttctgataaaaaaaaaagagtgattttctaagccagcacactttgtttgtccaagatttgtgtatgaatccagggggaacatccatgtatacttcatcctctagatctccatgaaggaaggcattctttacatcaaattgttgcaaaggccaatcaaagctagcaaccaaagataataaaactctgatggtattttatcttttctaccattgcaaaggttttttggtaatctattccgtatatttgagtgtaccttttagcaaccaactttgctttgtacctttctatggttccatcaaccttgtatttgatctgataaaaaaaaaaaaaaaaatcaaccttgtatttgatggtataaatccacctatatcccactgttttcttccctttaggcagctcgacaacctcggaagttttattcttttccaaggcttgtagttcttcattcatggcatctttccatggtttactatttgaggcctcttggactgttttgggagtttcattagaggagaactgagtaataaaggcatggtattttgatgacatctctgtaaggatatggaatgttgggtgcatgttctaattcctttcctaagagcaataggcaaatccaaatcactattagtatcaagattaggtttaacatctccattacctgtcatggtttcagagattggagcatgtgcaggtattgtagatatttttatccttgaatacacattgaaattaggtgctttaggtctcttgtgctcagtcttaagtgaataaattttcaatataggttttgaggaattcaagctcttttcaagacttgaggaagttatacttttgttcagtttcaatagacatacattcaggttgattttcttggactggttcactctcaaaaagagtaggatgagaaagagactgatcatagagattagacgaatgatcagatatagcacttggcaaaaccttatctaaaaagtgaccagaatcatgctctgcaaccttatcagaattcaaattctgctataaaacctgaccaaaatcccaacatccatcttccataatcttgttgctctccccttgaagataggtttcagagaaataaggtttgttttcaataaaggtaacatccatggtgatgtatttccttttggtgggaggatggtagcatttataccccttttgtgtgtgagaataccccaagaaaatgcatttgagagcctttggatcaagcttgcttcttaagtgggtatgaataaaaacaaatgaaacacacccaaagatttttggaggaagagaaccaatgccttgaaaatttggaaagaactctaaaagagtatatataagagatttgaatgcaagaacttgagatggcatacagttgatcaagtaggtgactgttagaatggcttcatcctaataaattttaggaactttcatttggaataaaagagacctagcaacctctagtaaatgcctatttttttctctcagcaaccccattttgttggggagtatcaaaacatgatgactggtgaacaatgctttcattttgcagatatgtaatcaagtcattactaaagtattccttcccattgttagatctgagtgtctatattttgactccaaattatgtactaatgagtttatgaaagataagaaagataatggagatcttagactttgattttaagagataaacccaagtggatcgggtgcaattgtcgataaatgtaacaaaccatcaagaacctgaatgtatcaaactaaatggagaaacacatttagaattttttattggaaatgaaactcgatggtgccttagcaagaagacacacttcagaatgaaaatcgagacaatcaaagtttttaaacaaagattgaaacacctttttcaaaaatggaaatggaggatgtcctaaatgtctatgccaaagccaaatctgatcaacttttgaagaagaggtatagtccaacccttgagaccttaaaatactcgtcttccaattggtatctaggtagtatagtctatctttttccttaccatgtccaatcgtcctccctgttaccgagtcttgaaaagtgcaaccagaagaagtgagtataaccaaacaattcaaagctttagtgatttttcctatggacaaaaggttataagaaatattgggaatgtgcaacatggattttagagatgaagcggggttgatgttgactgtgccttgactggctatagaggaaaagatccatcagcaatatttattttttgctctccagaatgtgtggaggaagtggaaaataattttgaaaaactggtcatatcatctgatgcacctgaatcaatgatccaggtgctggaaaaacagtccttagagacatacattgcatggatattacctgactgattcatagagcaaaaacctgaagttggtgtagaactttgattgtgatatcgaagttgattcgacagtgaaggctaagcactcttgattttcaagctgacagatttaaatgggactgatataaggctcagcaatgaaggctatgcacaaccgttggcaaaaaaatggcaatggaggcttagaagaggatgacacaaactgcaaaattgttacctgctctgataccatgaagaagcgaataatttttcgctcttaattctcaacaaggatgagtacaacttatatagatacaaggttgactaggctatatctaatttaggactaaatcatggaacctaattacatgtagatttctaggaaaaaataaggaaagaaataaaatatacaaccatacaaatcttccagcacattttttttttgtaggaattgcattgttgcttgaaatcttctttccacagggttgttcttcctcatgatgttgtatctttgaatgtttgctatgactctttttatctgcatatacacataattaattctgttgttcaaagactgataagcaaggcaggtcacttgcctaacttctaaattgggaatagaatagaagtcagaaaggttgtggaatgatatgcaaaattctttatgaagttttttctttttctagtcaaaagtttattattttcattttgcagggtgag

SEQ ID NO: 12277 - DNA, 7534 bp, Vitis vinifera
  Intron number 12 from transcript GSVIVT01026059001 (locus GSVIVG01026059001) derived from phytozome v7.0 (chr-ID chr 18; pos 25121911 to 25129444 reverse strand)
ggctacttgctggagtcactgcaataggattggctgtctacatgtttttcgccaagtcttacatttataatagtacaacatgagtgcacttaattttgttattattgcacccaatactagaagcattttcttcaacattttaccttaagtgcgtatcgctgtagtgtaatgttaatgacgtggatgttatgttcgggtttatctccataaagttcctcctatctaaaaggattacgttgtttttttttttcttttgctttttgtgtgacaattccctacgaccagaaaaagagaagatgatagggagaccagtcatctttcaccaaagatatccgttctaaatggtgatcgcctttcttgcaatcatcctttgggagtcttttgtcgaccattttcacatgccaacaatgactttctgtattggtcatcttctcttaatcatagctactttccactttcatctgtcttttataatgactacttttcataatcattttgatgcaattatgactaattttcaataagcattttcttatatatatatggtcacattcaaagcatttaatgttccactagtagtccatccatcaaattggagttcaaccggttaagggcgttttgtattttttgggttcccaagttgaaaacctataaattgaagagacctactacatttattaacatgagaataattgcaatcaattgaaaaacctttcttttctcacattcaaagtacatttatttcccactgtcatattcttgagtgcacctcaaaatccatctaagctttctcttgtattgtgagctatgtttgttctaagattggatgcattaaaaacttccttatctattcattttgagtgaatagacttcaagtaggtggagtacttgaagggattgtaagtgcccactataaatagagtttgcacttttcttctgcctatcctttacttaactattatcttgcttattaattactcttctttttgtgtttggttgaatattttcaaaaagtttataacacccaattcaacaacccctcccccaccccctttcttgggtgattcacttaatttaattagtcatttttcacaattgtagttttaaatgtcatctatatatatatatatatatatattatcatgtgcatttcctgaagatgaaaacatatcaaatattcaaattttaaggtggacccattgtcaaatgtgattatatttttatattttaaatattaacaaaaaactagaatataatgaaattaaaatatatcattctataagaggagattaaaaaaaataatgaacataagctaaatttcaatgcatgaaacatttcataatttgtgattataacaaagcatatcccaaacatggaaaaatgatctatcgataattttttttgtcaatatcccatgaagatctattgctcaatatcttgctagatagaaatctactttgtagaatgtgtgaaatctgtctttccatgacttcgagaattttttaattaatcattgcccttgttgataagagttcaatgaagtcttgatcctagagttggatttgtaacaaataatacacaaacaaaatgaacacaattaattaatgatataaaaataagaagttaaaaacttaccaactagtcctatttgacaagggaatgaataaactctcataacaatcttcaagacagataaaaagggtgagagagtgaaaaaaggaaaatacaaaaaggccatatgaattggtgtatatgatccatcaagtcctaaagcataccaaagtttgttttaccaaagttgttgtgttagctttatatgaagcaaaatttatgttaaaatatgaatgtttcttaagatactactattggaacctctaattcttctattccctgtccttgaatctcgtaaggtgcatgctatctatccttagggctttctaaatctaatgcaatggaaaataatggctatcaaaaccataatagaatataaatctagaggttaaaagtttcatacttgtgatctagatgttcccaagttaaatctcatgatgtgaggatttagcgggatgatgagatcaagggtaaggaaatcagacatttcattccaaacttgtcaacctaagacagatatacctattgaggagacttttaccgaggtgcctacacctcctattgttaagttttccacttcctatgagtctctatgagttgagtagcatattgggtagatttttttttttttgctagattagttctcttggtacacagatggagttgactatgattattgattctcaattctattctattgaggattgcatggacaactacttagcttgattagtttaagaaagccttcacaataaagctagatcaacaccaagtagcctctagcctttgctacttagaatgaggagatgatggcacacctctactccctctttcaacctccaccttctttcaacctccaccttcctagcgttaagcttaccctatagtgtttgccccattttattttttattttttattttttatgtttccaaaaagggagatatatttacatacataggcatatttagggagttaggagtgttttgaacatgcttagtcaatcccctattggttgtttttttttattttatggatatatatgtttagatatgcttcattttcaagttcactcatggatattttggatatttctttggattttatgattatctctaatatacttcatgctattcatatgtaatttatgttatttatatccattggtacttgatctccttagttggatgaatgttgaatggatgatcttgcacttatgtagatttcttttaattttccatttattttgagtatatctgagctttatttacttgttcttcatgcatttattgagaaagagtcacctccttagatagcctacttttgtcatcataaaaaagggaaagcttgttagcctaaaggttcttgtacccaagtttcaatgattataaaacaaggttaagtttactaatgactcaaatcgaagtggtattttcaggttcaaatgaaaaaatctaaagaaagctcaagcattaactatcaaagaaagtcaatatcatgaagacttagaactcttgaagacttaaagtgacatagggcaatctgtaagatggtatttgttggtgcacttaggtttaaaatgtttttcatgcatttaaaagtttgtttgcatcctcatataagcttaaaagctttgtttttatcaagaaaatggatgaatctttgttttaattcaaaaccttaagccaaactctttctaaacttactctaaaggttttaagaaggattacactagtaattgggagtttgagacctcaaatcaagtccttttaggcactttaaagtacaactaattaagggagcctagcaccagttgaactggtagggaaactagctcaatcggttaagctcaattgattgtggtgcagtaaggatcggtcgcaccttcaattaatattagaaaccccaatgatcacttgtagaccatttaatgcctaatgactaggcaatcggtgatagatcaatcgagggtttttttttttttatgaatttttgggtttccaagctaaaaacctataaagtgaagagtcttaaaacatttataaatatgaaaactactatattcaattagaaaaaccttctttctcttactcaagctcttcatctaagtgcattgatttcatatttgcaaatcccaatagtgcacttatattgtgagccaaacttatatctaggattggaaacattaaaacattccttatttactcattttgagtgaagagacattaagtaggtggagtacttgaagggattgtaagtgtccattggagcccgtgtatccaattgtaaagcttgaagacttgggttataaaccttgattaatcttcactcagttaggtagttgagaagagtagatgtagacatattaccaaactaatataaaagagtttgcatatcgcttctttttatgttttacttaattgttgtcttgctttaaacacctaattcaaacaccattttccatctccctgatgatcaatttacatagagcatatttggtagtactttttacaggtgtttttagtgctaaaaatacttaaaagtgtttttaaggtgaaaaagaggtgtttgccaatattttaaaaatacttagaagtgatttttagaaaaacgcttggaaggtgtttcctttgaaaaaaatattttaaaaatgttcaaatattcctaaaatatcccaagtattgctagataccctccctttctctttcactcttatattctttcttcactatcctcttcctcctactttctccatctgagtagagactctatagtccaaaggctctcatcactcttattcaacatggttgaactctataatttccattttttttttcttcatttttctttttgttaatgtttcattgacttgaatggttggttataagaggctcaatggtgatgtcaaatggagggagaaagcaaatgaggaatagtgatggaggtaattggtggtatgtagggatatgtgtgggttagtagtggagatggaggcatgagactggtatggttgaggatggtttgctgcattgtcgtggtgatttgactgcgtagttccattactaatgcataatggtgttcgtggagaggttgcctgtggtgcgatagatttgagataaatgaaggtggtgatgaacattacggggacaacaacgaggagaaaatcgatagcgtgagcgaccatgaagatggtggggtgactagtaggagaaagatgccaatgcgtggctgccatagttgtggttgaagtgaggctatgatggtgcaacctatggtcaggcttgaaggttagcgatagtgtggtgataaaatttgaagaaggaaaattagaatggagaagaagaaactgcccactctaaagaaagccaaagtagtcgcaagaaaaaggaaaagtgaagcataaggagtggttgtactcgagtgatgcaacctgtgcctagattatagaaaaataaataaagggaaaaaaaaaaataccattttctaatttctcaaattttcttaaaaaatttcatattttcatcctcaaagttatgattctcttttccaaaaatctaactttttacttaaaaatttgttggcaatgcttttgtaatgaagcaattataatcattttttaaattgtatgtcttttttggtaatttattaatattaaaaatgcttttgtactcatacaatatagtcaaaaatattattagaaccctttttccaaattctcataaaattgtttttcatagaagcactataaaagaaaacacttctagtaaaaacactttgactagaagcattatcaaatggactcttagagtacgtttgaaagtgattataagaagtgtttttattctttctaacatggttttaaaaattggactggaccgactggttcgactatcggccggtcacaattccgattcgatctggctaattagaccagaaagcgatccaatcggaattagactgcttgaatcgacagtttgatcgatgaattggacaaaccgattggtttcattcgaaccgagcaactcattttcctttccctttccccattccccatgcagttggtacctccactatcgcctggagcgtcatcccttcaatagcacccctcgaaggtgggagcccagacccaacccacccctttacccacagcgagctgaaaagagccctcccttccctccactgacccccaaaacgctgcaaatctcgtcatctccctgacaacaccctcccaacgttgggaaccccaccccgcccccctcctccctaccatgagctgcaaatctcgtctcaaggcaataggggagttctggaggttgaaggaagcaagttcaagaggcaaaggaagaaatgaagagagactttgacatcaacaaattaattcttagtattttcattttaaattttttaaggaattttatcattttgtatatttttaattaaatttaaacaaatacatttgtaacaatagttttttcatttttattttataatgtatggtataaaatataggttccaaaaaaaaagttttggagaggacaagaaaaaagaaatatgtaaggaaattttgaaagagaattatttgaagacataataatcgaagtaaattaaaatactctaatgcttgaaaattacttacaaaaggttatctttaatcttcttaaaactatgctatcaatgtggttcaaatcgctacaaaaagatgtacattaatgtatgttacgaaataatgagaatagacaataataataataataataataaatagaataagaacacatatatttacgtaaaaaatcttaaatgggaaaaactattggcagaggagaagaagatccactatgtcaaaaaattggtataaaaggggagagttataagcgattacaacagaagtataatcatcatcataactctaaaactatacatcatcacacacacacacacaattgtatcatgtcaacataatgatataatatggctaccattcattgttatgtcatttcacaaaatatgaaagattggttgtatcataacattgctcaagaattatagttcaagaataacttttatttattttattaaacaaattattaggaaataaattatggtaaaattgtaaaagtgattctaggagacccaaaatcaatttcaaaagaggctttaataagtgactattgataaatatatttacaagaaatttttggttaaaaaggatgaaatagtccctaaattgtgaaactaacatttcccatgtttttttcttgaaaagtaacccatttttgacataaatgttttttttattatttcaagtatttataattatgttttaaaataaaatgttatttttacaagaaaataacgagggtatttttatcaaaatgaaataaaaaaagaatagaggattaaattttaaaaattgggtttttattgatccatttaatcaaataacctatatataaaaagtgttccattataagtaaatcaaatccccaaattgtcaaattaaatcaaattgtcaaattcaaaggcttattgtacttaaggaatatggtaacacatgcatggcaaatcaaaagagaaaaagaatctagttcggtggagtttgtcaattagtgtcttttttttttttttttttttcaattttttgttcgtttttttgttttgttttgttttttttttgaagttttaagagaaaactggcttggcatagtcgctaatcgtgttctgacctcataggtagctatcaaactaaaatacaagaagcataaccctcaaacgcagctgcccacaggatttgaaaaagagaagcaaaagtaaaggtaaagaaaatctcccttttgtatctctggtttgccgagacatggccatctcggacatctctttagactccgagacaccattccttgaggacgccgtggagggtgttgt

SEQ ID NO: 12278 - DNA, 1160 bp, Vitis vinifera
  Intron number 3 from transcript GSVIVT01024413001 (locus G SVIVG01024413001) derived from phytozome v7.0 (chr-ID chr1 6; pos 2225842 to 2227001 reverse strand)
ttggtgccacatcttgtgctctaatttctatagaggtatctttttactggaagtctgaactatagtaggctaattctattttctattgtatagctccatgctcatcctttgtattttctatttcactgttgatttttagatctgtttcgtcactatgaagatgacaattgataatcaactatgatcaattggatttcttatgatccatcaataggctatatgcaacattttaaacctcctaaaagagttttaaggtttccatctacatctctcttaacgacaggtctcattttgtcgttctgtcgatggatattgcaatgataattttgatcatagggattccatgatatactattctgattgtattaaacttgtactatgtaattaggttggatttgaacatgatatcatacttagaagattatatttggtagtgtaacaaaaacacatgctgaatggcatctacttctttgcacttgacatacaatttatttatcctgcatgcatttaattcataatgttttcaatttaattgaaaattcctgtctatattaacctctcccagattgtgctactaatttcagttatttttccaagtcaatatttatcaaaattgttggacaaccaattttcttaaaagcttaaccttgtaggagttggggcccataatgtatatcatacactctaacaacctccctcacatgtagcatccatttttgggcttacatgaacttaataaagtaggtaaataaaacatatggtgttgagattcgaactcttgacctcccaacaattaaggctatgataccatgttgaacaactaattttcctaaaagcttacgcttgtaggatttgggcccgcaatgtatgtcatgcactctaacaaaaatgttgttgatatcttcaagtttcttgagcatctgtttgtaaattgataacgagattcaagaacttgtttatttactgaaacaaccctcttcccaatttatttttcaaattcaccaatggtcttattagcaaatcaacaaaataaaacatatcttgcttcgcagtatgatctaactttaactcttgtctcatgggtgttcatttggtctttggctctactaactttaactgtcgtgtttctttctacagtcatcttcattaagtggaatctc

SEQ ID NO: 12279 - DNA, 2555 bp, Vitis vinifera
  Intron number 7 from transcript GSVIVT01027931001 (locus G SVIVG01027931001) derived from phytozome v7.0 (chr-ID chr5 ; pos 9650333 to 9652887)
caagctcgttctcgtaaaggtcgttttatctctgggtaatcacatacatgttaataatgctattaatttgcttgttctttctgtgcttttacctataaaaaaaattaatttactttttttattttcattttgttatccattttaagacacaacaaatgaactgatgatttttttttttttttttgataagcaaacagagaatctattgaaagagtgccaataaaagggggtacaccctaagtatacaagaagtatacacaaaaaacaaaacaaagaatacaaataggtatctacaaaaaatcagcatcaaaaccaaactattcatagctaaggctatcgtgaaaaccaacaatgagaaatttcccatatttaatgaagctttggaccaatcaaagagggaattaatggaactttcctttaacctctgatctgcaagttcttctccattaaagattctgtgattgcgctctttccaaatcaaatgcaccaaaacaagcaaatgggtgccatttgccaaacatggtgactcttcttatccaatcccttgaacttccacttaagaagcaaatttctctctgttgctggaaacacccaattttgatcaaaaattgatacaaggaatgtccataacaactgtctttgcatagggaatcaaaatgtgatcaattaactcttcactctctttgcacagactacatctattagcattgtccacccccacttcattaaaaagcctagagttgagtttttcccccaagcaacttcccaattgaaaaaatgagatctcataggagcttgagaaccttaaatttcatcagctgggtagtccacgctagaatcagcaaacatagaactatagaacaactttacactaaagacttccttcctttcctccttctggacaaagaaattttccccttcatctgacaatttcaccatataaataagctctagaaattgggacactccatctgattcccaattttggaagggtcttctgaaatgcactagccactggccttcaccatctcttcctttccacatgttaacaacagtagcattcttgtgaggagctaaactgaacaatcaaggaaaggcttccttcaggcagatctccctcccatcccaccaaaatttgtatgccatttttaacccaatgagttatcctgtgactgaaatcctcccagccttttcttatgtctctccaaagacacatgccaacagtctctcttaccttacaagtgttccaccccctgatcacttccccaaattttccttggatgatcttcctccagaccagtgaactgatatggatgatatacatgtagtttattctgctataattcaaccaaatttctgttgggtgagatggtagttgcttttaattacttctttattgaccagaaagtatgcagatacatttatctacatgaaatgttgtttgatgaaaccaacaaactagatgttaatccccctgtctttatttcttttaaacaatgactgatagatgcttaaaaaccaaaagggagaagagaaaaagaatgatttgattaaccctgaaactaagaaattattatagatcattactgtgattgacctcctttggtcacattctgagaagaaaaaagaaaatagaaccagtcacgtgattagatgttcccaaggggaccagatgaaagtgaagactgcattctatggagttccaatgtatccacactgggaaaaggtggattacaagtggcagtgggtggctgcatatgattatgagatttactgtgctgttgtggaaagtcaagaatctgaagaaatagatgtagaagtagtagctgaatgctagtcaagttgtacattcaaagaaaatagcttaaaacaactttgaaaacatcatcataattaccagaaaaatcagtagatccaaccctacacatttctctgtgagatgataatgccaacatggcatcatcatgatgtcatgtgatgtgagtgtgtgtgttttggtttgcaaaatttagggtaaatgttaggatcatgctttggtgccaatttgaacctataaacatgtgattctagggtttgaaaggaggaaaaagagaaggaaagatggaataagcttagatttttgtcttattgactttcctatatcttttcaccaatttttattgttgagtctaaaaggggcaagattacaaactcttgcatagcaataattacttttaacataacacattagaatttcaaagcacaacatgtaggaatatattcttccccttccatgctcaacaataaattctttccccctcccctttataccatagacctcatgaacaagttactcattgcatgcttcaaatgaagattgtcatgatttttttttttgggtgcatatttttgcattattgaaaggcaattttggaatattgggagcatagaaattaaagaatacatgtagaatatatatttaatttaatcattaactttttttttctacttttcttattctgagacagcttgacactcgtatcttgctctaacttgttctttttaagtattcaggc

SEQ ID NO: 12280 - DNA, 7976 bp, Vitis vinifera
  Intron number 2 from transcript GSVIVT01038277001 (locus G SVIVG01038277001) derived from phytozome v7.0 (chr-ID chr5 ; pos 24892736 to 24900711 reverse strand)
agcagagtcaacctgctgcagcctctccaaaccaggtagtggttttacccttaaggatgcagtctagactgtccaaaaaagcaaaatagaaagttttgcatgcgcttattgtttgatgaatcagttaatattgcaacaagaacttgcccataaaaatattgctgcaacaaaatttgcctgctaaaagattactgctaagaacttgcttattgatgttatgtgtgattatgtggggaatgggccctcctttgttgtccttcttggattttgtagatggtatggggattggtaagcatagttgtgatgtagtctgttttctggtcattgcttgtatatatcgtgtgtacatgagatgtggcccctctttctgctaaacacctttttaaatgtattctgcttatcttcctattaaaagaaataaagaaacctgcttattgatactcaattgggtcttttttcataagattttatgaaagtgtctaaaactctaattgtcatgcatttaaagttatctcactcataagaacttgcaactccaaatatttgctagaattcttattctttgttgctctttactattattttgttagaattctcattctttattcctctttatggttcatagaacctagtctttatatgaattgatttctattagaaatttgattacacagacacctctgaatttgattttaattccttatgaaatttactcatgcaacttgtttgccatgctacttatttgaaggactgctctacttattgattcaagtatctcatgctggaatttaaatgacttttgttacaccctagaaagagatgcattggttgatttgatggcaagttgagactacattatatggagatcatattttcattaatttggtgtgctacaaataatttaacttgattaagacctgtgccaaaattggtatgcctctaatgaactatttaggaaaatatgttcttccatttccattattttcatctttggtgtgcctctaatcaactttttaggaaaatacgttcttccattctccattattttcatctatccgttatttattcatttatttaattttcttttccttgaatcttgttgcttaattctagggatttgaatccaaatgtttggaaaatttgcaagaaaagagtctctatattgtgaattcaaatggagtttatttttctgcttcttttctctcttctattttgaggctgacaggaaaccatatggagacatgggttaaggggagtctcaaggtggggattcttcctgtttgttgggcttgattttgaaggaaggtcatgtagtggatgtgttgagaacttctttacccttttataatggcaaagttggggtacccttggctctaggggagttggtggagttttctccttctaaacctgcaggggaactctatttcttttgctgagtttcaacaatacccaatgagcatggaaccagaagctatgtttcatccaagatcattagagcaggctgagtttggtgttaaaggtgaggaaccaaactagctcaagaaaggaaaagggagatctgtgagctttgattctttgtgtaatgatgtaataacctgggaattgtgaacaatgaggtgatgatttggcgtacaattgtcccaattgatcaatgaaaattagcataatttcttagaatttgagaaggcttaatgatgtggataaagaaaaatcacaaggcttttctgagatcccaaaaggtggatttggtctgtcttcaagaagcaaagctagatgtttccttacatgagatggttaaaagcttaggagtggggtgccttttggagtaaaaggatctggatgctacagaggcaccaggaggggtcaattttttgggacaggggtgttgaagtggttagacaaagaggttgggcccatttctctctattgcaagttaaagaatctgaggatggtttctattgagtgttttcaggggtttatggcctggtgctaggggcagaaggagggagtttttggaggagttgaaagctatttagggcctgtgggatgagccttagttcattagaggagaatttaatgtagttcacttccctcatgagagaagtccaggtggcacgatctcctcaccaatgagagtttacttagacttcattgaaggttgtgatctctttataggtggtgcattcacttagagtgcgggtgaaaataagctgtctttgtccaggttggattgcttcctaatcttttcaaagtatgagcatttctcatcaatgtcccaaagattctcctaagacttgtctaagaccattcctcaatttaccaaactttgggggtgtaaggagtgggaaaaccacattcaggtatgattgtatgaggctcgagacatagggatttccagagatgatctcaaggtggtaagagtgctatgatatcaaaggtcctctagcttcatcttagctaggaaactggaggcttctaaagacagtattaaaaagtgaaatataaggtgtttagtaatgctgaccagatcagaagttggactaaaaagaaagggatatatgtttattagtggtggaaaaggaagctaggaattctacaatctggggctttaatgctaggagaccatgtgacatcataaattcaaggttctttggcttaaggaaggggacaagagcactaagttctttcacaggatgctaatgcccatatgaggaattacattagcagattgaggatgggtggcccaggacattccttatttcactaggcatagctttgcattgtgccactcaattcatggtctgcaccatgacttgctcatcctactcatacattgcgcccatgatgccaacctatgttgaggcttgccaatgccttgtcttgtgtgtgttgcgaccatgtcatgcaccataactcttggcctccacactaatacaaccccatgtctagcctcactgtgccatgacattctacccatggcacaccaatccattttgtagaatgcggtgtggccttgtggtggcctctttaagccttggccttgtcttggggtgtcctagggtttgtcgcattgctttgggatgccagcttagctatccctccttgttcttcttcttctgagtcattttcgtattttctaaagaaaacatgatatatgcttgggtagacataatattttcataaaatcatatctaatccttccatatgacataacttggagaattcctcttagggtgttctctttgaaagaaaaattttaaaccactgaaaatcccaacttcattatttatccaagtcaagccatccacgtgaggcactgcatgctacaccgcttgtggggttgctgcagcatgtcatggctccaaggtcaacctatgggctagacgtcctccattttccgcctattcgagtcaaggcatgcttctctttatgccttaggccacattagtgcaagatgcaaccacagatgcctatccttaacatccaagtagtgaaggtgctaagactttaccaccaagccaatttagcttatatacaaaggttgaatagaaataaattataatcaatctatgcaatcagccaaaacttaggccctgtttgagaatgttttttaaaacagttctcaagataattttttgagaacaattctagaaataattaacaaaaaataagtaaaaacatctgaaatttttttttaaaatcaccttgtttttcaagcaaattcttaaaaaaatagtttcattgcaaatttgccaaatgtgtttttcactttagaaaactcttgttttttttttttaagaataggaaactctttttaaaaacacatttgctaaacaggcctttaatttcttcaataaacttcaaattgatgaaatcaacaaacaagcaatccttggggccttcaaggctttggacaaattttgaaaatcttctaagaacattaatcaaacatgaatcatgattttttttttttttgataagtatgaatcatgaaattgtcaacacaacacaaaaaactttgcctttgcaaggctttagatgattcccattgaagaaagttgtaaatattcaaggttgggactatgtgtaggctgttttgcctaaacatcatgttgcaactatgtgaacaaacacggtgagggattggtctatatgagattgtgaagaaaaaattgacaaccctaccaactgaagttgcttagccatatctgcaccttatatgtattcaatattatgcatcctgttgaatggatattagcaacttgaggttgagttttcaacagggggcctaaagagtggctagatgtctggtcagcttttaagtagttggcaacatccaaaatgcttgaaaagtcgtctacaattaagatggatggctgaggattaatttttttttataggtaagaccagaaagtatatatataaaaaaggagataccaaaactgtcaaaggataactttgctgtccacacttctttccttattttagcccacaattgtttccttatttctctatttattattctgtacagttagcatacattatttgacggattatagtttacatatatagggctagaatcatgctggaatttatttgctttccatgtatagcatccttgtaaagtctatatataatatacaaaactcaaggccaaggtattcggccattcacacaatattttgacatggtatcagagcttgtgttctaaacctagaatttacacgctttctagtttttctttgggttttctcggatttagccctaagggctctcagatttagccataggggctctcggatttagccctaggggctctcggatttagccttaggggctctcaaactctagcccagcttttgggttctttttttttttctttttttttttttctggtggttgtgacaacacatctgtggtgtgatcttggagttttctttaggtttcttcgcttctagtctcttggagatcttcgattatttggaggtttgttatcagatttaggctctttgatgatgtttttttttttttttttgtttcctaggctatttctgtcttcataatgtctggagaatattctattgttcgtttcaatggcaaaaactatcttagttgggagttttagtttaagatgtttgtgaaaagtaagaagcaagacagagtctctaagtcatctacggaatctaagtaccgtgcgatgtctcttgctttttctgaaatcatttgacttcgaggtttgcttgcggagttagatttttctgagaccgatcctacacctctacatgtcggtaatacaagtgctattcagatcacgaccaatcctgtctatcatgagcgcacaaagcatattgaagtggactgtcactctatccgtgaagcctttgaagctcgtgttatcactcttccacatatttccacttacttacaaattgttgatatcttcaccaaggctctccctcgtcatcgacattgcttgctaagtaacaaattgatgcttattgatcaacctgcatcaatttgaggggggctgtcaaaggacagctttgctgtccacacttctttccttattttagcccacaattgtttccttatttctccatttattattctgtacagttagcatacattatttgacagattatagtttacatatatagggttagaatcatgctggaatttatttgcttttatttgctttccatgtatagcatccttgtaaagtctatatataatatacaaaactcaaggccaaggtattcggccattcacacaatattttgacatggtatcagagcttgtgttctaaacctagagtttacacgctttctagtttttctttgggttttctcggatttagccctaagggctctcagatttagccataggggctctcggatttaaccctacgggctctcggactctagcccaacttttgggttcttttttttttttttctggtggttgtgacaacacatttgtggtgtgatcttggagttttctttaggtttcttcacttctaggctcttggagatcttcgattatttggaggtttgttatcagatttaggctctttgacgatgtttttttgtttttgtttcctaggctatttctgtcttcataatgtctggagaatattttattgttcgtttcaatggcaaaaactatcttagttgggagttttagtttaagatgtttgtgaaaagtaagaagcaagacagagtctctaagtcatctacgaaatctgagtaccaggcgatgtctcttgcttgttctgaaatcatttgacttcgaggtttgcttgcggagttagatttttctgagactgatcctacacctctacatgccgataatacaagtgctattcagatcatggtcaatcctgtctatcatgagcgcacaaagcatattgaagtggactgtcactctagctgtgaagcctttgaagctcgtgttatcactcttccacatatttccactgacttacaaattgctgatatcttcaccaagactctcccttgtcatcgacattgcttgctaagtaacaaattgatgcttattgatcaacctgcatcaatttgaggggggctgtcaaaggacagctttgctgtccacacttctttccttattttagcccacacttctttccttatttctccatttattattctgtacaattagcatacattatttgacagattatagtttacatatatagggctagaatcatgctgaaatttatttgcttttatttgctttccatgtataacatccttgtaaagtctatatataatatacaaaactcaaggccaaagtattcggccattcacacaatattttgacaaaaacaatgtcccaaaatatacaggaagtatacactgcccgcccaaaggctcacctaagtgggagaaaaagagaaacaaaaaacatcacctgccctcacttagaacctaatcaatcaataaagctaacaagagaaatagtccatatctacaaacaccctagaccaagactacaaattacaaacaaaagaatttttcatgttttggactgagaacccctcattatcaaacactagcatgttccttttcttccacactgtccaaaacatacataaaagggccaccttccaagactttttgtgggctttacccacaaaggagccatgccacactgtccaagatttttatttttaattttttgatggctgaggattattgtcatcataaaggttcactaaacagtttttctttctttttattttatgttcttgcaggtagataagaaaagttttatagtattgaccaattcattcttttatctcaactgaaagggttagttagatgtaccatccagtccaacacacacacacagcctttgaagtcctgtcaggcagaagatgcaataggaagtcccaattgagatggctgtaagttttttatgtctttttcacaaatcatcctggaacaggcttctccttgaatctattgttgcctcctgtgaacaaaaggtagcatgaaagctgatattcttttttatccaaacatcaattaatacctgcttcctgtgcgaataatctgaaaaaggtaacaaaccccatctttcaaaaattaatgatatggtggttattatattatcttagatgttcatacccaagacataggtttttctcttcaaacttcttttgttttctaactagttttcaataactggaagcccagtgcttacaataaataaatacctggaaatgcctctatttataaacgtaaataaatgactggaaggcaaatgttcccatagaatctggtttttgcagattcccttcccttattctatatatttcaaaagagattaaatttctgatgttgttattaggaggatactgctgtaggatacattaaattgtttctgctggtgcacttttatttacattaaatcactttttggtatgacattatgcaggttcagaagaaaaagat

SEQ ID NO: 12281 - DNA, 6314 bp, Vitis vinifera
  Intron number 6 from transcript GSVIVT01013967001 (locus G SVIVG01013967001) derived from phytozome v7.0 (chr-ID chr1 6; pos 8105811 to 8112124 reverse strand)
aaggggtcaggtaatttttttttttttttttaattattagatttcacaaaattttatatttgaggtgtgcttcatgttagcagttgtttttctttttaggaccatgaataatcatttgtgatacaaatttcaggccatcaattgataagaattggcttgaacttttttcacctgagatgaaccagaagagttcagtgtcttatacttttaagttgaatggtgcattttcaatcctatcataaactgactctaaaactatttttgtttggaaaaaaccaactctaattgacgaaagaattgaacttcaaaaacaattgaagataaggaatgaatgaataaaacttcaacattattattactctgaaatgaatttgtacatttttctattgatctacttgcaatagtttgctagttgtagatggaaaagtattagtaacaacaaggagaaaagtaaatttagtaataaagaatccatggtccaactttaaaacatgattagaaaaataagggttagtctctaaatatttataaggatcaaagcacttgtactctttatgtgctttagagtgttccaaagaatacacatttgatgaattgaggatcaaccttgtctttgtttggagaactatgaacaaagaaaacaaactcaaactgtagaacagagagaccatgggacaactaggcattacacaaaatataaagttttattgcatagaaggatactgatttataaagtgacatccaatgaaagcaacatcatcttattaaaattttggaactctgatatgaaacataaggaacaagcaacatccaacacatgctaattgttcctttcattaaccccattttgtttggttgtataaacacataaaaattagtctataattgtagtttatagtcaagagcgttatcaaataaaaaataccaattgaagatcaaattgatttttatttagtcataaaaaagtttaaatacaactagtacttcacacttttttcttagcaaaaataactaggtaatctaggaaaaatcatctataaactaacaaaattcctgaatccttaaattttagagatacaacgttacatttaaataagccaaagtaaaagggcttgaacttctattattaattggaaaagataatctatggtgtttgccaagttcacaagacttacactcgagtttattcctaatctttggaaataatcctaaagaatgtaagtgctccaaagaagcatgatctaatctataatgccactaaagaggagtaacaagtgaagaaagggtagcaacaataattctttttgctagaaaagcatgacccaatttgcaatgccagtagagaggagtaaagagtgaaggaagagcagtagtatctgacatcttttaatcatgataccaactttcaaactatttgtcaagatagtagatccctatttgctcaagctctccattaatcatgctttttgtgtggagatcttgaaaaacacaacgagaaggaaacaaggtaacaacataattaaattgtttggtaagataactaacatacaacaaattagcatgaaatgtaggtccgtatggaatggaattgagtttggatgaagacaaggaaatgagatggattactcaagcaaaaaatagatgaaaaaaaatccattagcaaggaccgagggtgcattagaaagttaacttagaaagttatgagcactccccaagtatatgacaagaatctccaaaagctataacgcatgggaaggaagactaactagaagcaaaggagcatgtgtacccaaatgtgccaatgtaaccataggagcactaatgtcagattcaaaggaaatatttgaagacaattgagctagtttgttatagtcatcctaaaacaaactagtagatttcatattaccattaacaatttaaatagagatacgaacatcaactccatcaatggaggggaaaacatgattatagaaaaaataataatgcatatattgaaataattttaatgaagaaattaatatatgtataacaaatttataaccttagactgataaactcaagaaataataatatattgaattcgaaacacattaatactaaaatgataatatatttaatttggatatattgaagaatataaaagaaatgataatatatctatataagtatttttttatttaaaaatatttataaatttatatttggcttataagaggatacttaatacatatattttcatgtacttattacacaaaaggaaaattggtgcagtggcttgtgccattgctctcaagcttaagcacctggttcaagacttcatgtgtgggcttttttctttgcttttcatctaaatgcaatcccacattagaaacatcaaagaacacaaacatctatttattagatggagtgcttgtagtaaacggttagcttttatgcgggttgggcttgattgggcaattgggcttgtgttcttggatacttgcaataaatgcatggtttgtttattaaatagaaagataaatggggagacatgcctaaatagaaatggtgagatgtgctgataaggagttgaaaagttggccatatcaccaaaaaaattggaattatattgatatattgccaataaatccactacaaacataaaaaaaatccgaaaaatctgtgaaaggagatattgagttggatatcatgtcaaagccatccgacactcaacatatcaacgaaaaattggcaatatttcctgatatttcccgtccatgcctacaagttttaagtcaaattaatgtgagtaaatagtcttccctatgcatacttgtttaccttaattaattagcatgttgtaattattctgattattcctaagccatcaattagcatgctccaagtgttcaaataagcccaaataaatcacataattcatcaacctatttattattacttcaaaccaactttgattttattaattaaagcaaactacacaagcaaacctttgctccttcctttaaaagatacttaaattaaaatacttaaaacccttattaactttagtttataattaaaacatgattataactaattaaattcaattttcaaataaactttaccatttatttgctttaagagattgtttggaattcaaatatacaaaaaacactaacctttgttttctttctccccttatctccttcactttctctctctaacttctgtctataagcccaccagtttctatagagattgaggctacaaatgaagtcgaacaatctttttacataaggtctaaaagcaagcatgaggtgacaagctttaaagctactattaaccaatattttccaaattgtacttaagtccccctacttgtagctttttgtgcttttacacctaccaataagtccctcaagtcctcttaattaaaattaacccccatggagctaattcatgagcttaagctactaattaatcataattaaccttaatcaaagataaacttataattaaatatgattagtgttaaactagttttaacctcttattaagtacatttaaggttaagtactaagataatcattattattaatttaattactactaggtattacacctttagtttcattggaataatttgaattccatcctctctccaaatttgtgatcactaccaaacactacataactattaaagggggaaaataggtattacaggactttcagagaaggaaaggaatgttagataacttcaacattgatgcgaagttgcactatacttgcatgtcacaccatgaccattgatacatccgaggacacatctcccacactagcagtaagagaattgttattgtacttaagatgtcagactagtacttatatcacataggcatgtgaagtgacttaacacttggatgttgtagcatgatattgcagtattgtattgtatcatagggatgataatacaaatagggatttttccggctaatattttgtgatctgtttggctaatgttttatgattcttttttataccattttatttgagagaaatagttgtcttatttattaagaaaataataggcatggctactgcagtggggtactagatcatggggaagaaaatgaaactaaatttttttacagctagagctctaagattgatgttttgataccatgttattcaagagacaaatatcaacctaggtttttgtagctagagttctaggattgatgttctaataccatgatatttaagaaaaaaagttcttattcattaggaatatggtacgaagtataagtgtatatgtgtgtgtgtgatattcaaataacacaaaagtctaaactccccatgttttttctcttattgttatcttttgtttattattcgtaaacatttatattcaaataacacaaaagacttatcctttttctattgtttgaatagtaaaattcactttttcagcaaacgattcttttatgcaattgtatgctatagaaattgaaaggaaaaaaatatttatactaaataaccatgtctgaagtaaaataagcttattcgatatattccccatatccacaaccatgtaaaagttgattaaaaaaaaaatcaaataaccatatctgaagtaaaataggtgtatccaaaaaagatcatgcatccataatcatgtacaattgaagtcgaatcctgatatcattggtttcacctatctatatgatttcttaattataaaaaacaggggagaatgtctctcctttaactatcggatgttcccatcagtttggtagtttttgagaaactcctatatccattggatatttgatgtacctttccttttgaaagtcaaatatgttctcttgtatccaagaaatttggtgtcttttatatttgagtggttgtgcttatgatgcactagcaggcacttagtggaggaattgccaagggtcgaacctttcgagcttcttaggcttttaggcataacccacgggacctggctaaggattggaaagtagggtacaggcagggccactggagtgactgagggttggatgatcctatttaggcccttaatgagtgttttgagctctaagcaatgcccattcataatttttgttgccaacaaatacatgcttagtaggagatgtgggccattcctctattcattagcatttgtcactatatgtgattgttttggttcactttcaagtcttcatttatgcattcattgcatgttaattttcctcatctttgtggaagacaatggacataccttccctccccaagaattgcatatcaaatagacaacggactcaaacttgggacctcccatttctgaacagagtatgtgcccattgaacaccccacagaggatgcttgtcaattctcattttcatctcaactatatgaacctgatctttttaatttttttttcttttttaattatttgctttagattttattttctgaccatgttttcccaatgtttgagggtgatttaggccactaaccatttattgattaaaaaaattaattacaagggaaacagaagtcttacctccaaatttagagagtgcacatgcttgccacaaaagattgaagaaaatgtccaaataaatgaaaaacaaaagacatcaatatctcaactatatattctataatcctgttgtcaaacattatctttttgatttgcatgtattgttgctgtcttatgaagattcctctttagatttattcataagctccaatccttggttaatgatcattgtcaaaagatcctacatttcaattgcctgtgcttcctaatcttttttcctcccaattgcagtataacatgtgctttattttttactgcttgtttaaattaatattcctgttgaaggtgtgcttacttgtctacaattttaatgtgccttatgtatatatttgcattctgtgagttaggttctaaatagattcagtttaattttaattcacccttacagtaggaatttgaacttgacacattgtcaagtgtcttgccatctttgtttatttgtttgatgtctacaacaaaatctgctctaacttttattttgcagataactagatgcagtcattatcgtgtgtgtggttaatcttggtgattggaatagtttgaattgtttctttacatttatattctgttgtcttagtgcgagttaattttatgttgaattgacaagaatagcatggtcttagcttgactttacaggcttctatattttcctaatatttattcatctaatttgatttcacatattcacttacaaacaggcaggaagctgctggtgctttgtggaatttgtcat

SEQ ID NO: 12282 - DNA, 4224 bp, Vitis vinifera
  Intron number 5 from transcript GSVIVT01011272001 (locus G SVIVG01011272001) derived from phytozome v7.0 (chr-ID chr1 3; pos 10307081 to 10311304 reverse strand)
tacctgaggtaacaatcattagtttctgcacttatagattcattgtggtctaacatgaatgcatcaatgtgcacccatcaaattgtgtgtattgtgtattgcgtatttcaaccatccatatggatttagatgtttataaatgctatgttgtgcgttgtgaagccttattgtagaaagtggcatcatttttaatttttaggtcatccaagaggtcacaagtctccagttccctgttctggtggatggaatgcttaggtaaaacttccataatagtggccttcattgtctgaaatttgtccatttatacctgtaagtctgtagaatgcattatccatgccttcatgcattcgtaagtttttgcacttgaggaatttacttctaaaaaacaattcctcatgcacaaatgtgtttattgtatttataggataagttattgttagttccatcaaggcaagttgatgttgactagttttaactttaacattcaattctaaagttgtgtctaaggttacctaaagactgtcctaggggaagggcagtatcattcttaatttttggatcatccaagagtagggtcacaggttctccagttcccaatactggtggatggagcacttggtaaaacttccattacagtggcctccattacgtccaaaatttgtccattaatacctatgagtccatagaatgcattatccacccttcaatttttttttgataggctaatgagaaaatgtattaaaagctcaaccaatttagaaaatcggtgttggactctcattcaatctcaatttgttctcaccttcccttttaattgagaaggattgcaatttctgtaagagaatctccacttcctcaagcttgtaatcattaaattgccttgaaaagcagggactccaaccaccctttcccaacctactctgatgcctctgctatccatccatctttgttagaagcaaaagagaataagtttgggaaggcttcttccaagggtaaatcttcacaccattaggctttccagaatttaacccttctcccattcccaactgaaaagtgagtcctgcattttatacattcccactcatgtctgatggctttccacacccccactctatatcctcctcttccaagagtaaatacacaccttcatgcattcacaagtttttaaactagctgaatttactcctaaaacataattccccatgcaatactgtgtttattgtaggttacctatgaatgtcccagggggagagtgaataggattatcaaattctttaaccaattgtgattttatttaatttaaagtacaagccaactaaccaactaataatgatgtatataatgaattcttttggaaaattttacgaacacctcgcaagcaagtattcaaccaatatataaccaaggtgactaagatatgtatcataaataataattttcaaaatatgaatatagagaaaaattaaattcacaaggtgaatgatgaagaggcaagaatttatagctgtttaccctaaagcctacatctcttggataatatagttgtgtttatccctcaatcaaacaagttttaattggtttacctatatgttatgacacacttgtttcaggggttatgaagaaactaatctaaagattttcttacaagctcaagtaaagtagggcttttcaacttgaatttgtgaatcatttctagtgaaacaatattttcctttccaatggtgtcaaccgatattgtgcttactttcatgcataatgtacaaggttgtagaagttgtcattgaagccaatgatcattagtcaattgtacagtcacttatattcatccacaacgcattgtaattcctcttggtccagccgtgcatttattgtgtcggtttcaatctttcctcaactataggccataatcattgtgagttcagatgtttcatctctaggctgttgatccttgtggcacaagattagtcctcttggctgcttcccaattgatatgttgccatgcccgaagctactttgataatgcttcaggcattggatgtattggccaaactcaaggtagaggtggtgtatgttttgtcagcatatgcatccttatgttaggcatggcaatattgacattctttggaaggggccctgctttcctcactattcttatagttttattttccttttcaagttgtggcaaggaggtcctgacttctttgacagactttcttgtatgggatactgtatcaaatatctttgctgaaccccttcaatcaatgttggaactttcttgcttatcttgcaatgttcatctaccaactctgcatttgaagtgtattgcattttggttcaggttgtgatgaaaacagtttatattttccttaataaaatatatcttgtcaaaaaaaaaaaaaattctgtagggcaacattattagaaataatttcaattgcaatagactgttcagaacagcctcaactttagtttccatcaaattgggaaccctaacctttggagttatactatgcaaatttacttgggttgtttgattgaaagcatgatgtgtatttaactctcattggttctccatcatttggcctacctgatgtcatgtaggcagtttgttcaacttgatttgctggtcgagctattaatatgtgaaggagctacaaatatttctatagtgtcttttgttagctgttagagggtaaaaacagtgttcaagcactccagaggacttgaacccaagttataaggcttccagcaggcttaaccggcaccagacctgtgacatcttgatgaccacttaattttataattgtgcaactatctcttccataaaccttggattcaattttaaagcttttggactgtttataattcatcatacaacataataatgaaccttagtttgagtatgtttgtcatttttagaccttaactctattattgattttgatgtcataattagctagattcaaatcaattcctaatcactcaagtcaagttgtcttagttctatttattctcaagtttcctaattactcaattcaactcaactgaacagaaccttaaccaaggttcccgagtatttgggttgatttctcaaatcttcaccattctgctctgtgctgagtcatacttgtcaaattgtagaccagtcattccttttcacttccccaacccatgtttttttggcttcttgtcctatggatcattccaccttaaacataagactccatggtggtgcaattatcggtctttaatccacatggcctggctatctccagtttaggactagttactcatgcaaaattcagggtttctaagtttgggtcggatttcgtttaagccatgtaattattatttgtctatagaatgagggaggttttttatttttattttttttatttttattattacaatttgtaagctgttttggtactgaattcttttccctgaaggcacttattattagtttctctaggtttatgcctagttaatgatcttgatagcattggatcaatgatttaacttggaagaattagaagccaacaacaagaatcatgattctgttccctagggatagcccacaaggagcttttagaatcagaaacctatccatttttattaggtttgaacctatcatttaacagatatcatatccaagggatgaaatcttcaatgctttcagacatcagaattgctatgttcttctttggcttaattctggagccaaaaaccatgcatatgattcggtccactgaaaatgagttgcagcaagtttaattgggttcaccgtcacttctgcattaagccttactggttttgtgcatgattttctgtgatgtatctaggaaaatccctcttttctcaatctgcatttaggtttgctttatgtgttcaattttcttcaattattcagtttcagactacacttccttactggttcttactatgcctccttgaacactttatatattgtatttttacattattaagtttggcaaattgtttccacataaccaaagttgattctaatccttgttgtgtgatacaaacatggtccctgatatgcttctggttggtcgaatggtggattgattgtttatttatttgtttgtttatattatgtttatttttatttatttattttgatttttaattttatttttagtctactctatttgactgaactttctgcatttttacaggtcaaaggtgtagagcaagaattag

SEQ ID NO: 12283 - DNA, 11468 bp, Vitis vinifera
  Intron number 4 from transcript GSVIVT01027950001 (locus G SVIVG01027950001) derived from phytozome v7.0 (chr-ID chr5 ; pos 9939031 to 9950498)
ttctcctcaaacagggcatccttagtatcaaggtcaagatcattgttcgactgggatcctaagtgcaagtagggccccataacaccattacctgatatggtgactattcaagcacctaatcatacctcattggcgaaaaccttgcatgaccacctttggcatgcaatctcgcttatcctcacatatactttccttgttgtatgatcactttgctcaccttgacatgtacattcttcttgttgcttatctcgttcatcttgacatgattgattttcttgattatatattatcatgattgttatggaggctgctatccttgctagaaatttatctcgattagcttgtgtgtagatttggatgatatacgtgtgctttgcatgattgtctgttgcatgacttgtctcatcctgtgtgattgcatgagttgcttctctatgtggaacacacacctatccccttatctctaagtccccaatcacggtcgactttgttttccttgatcttgtaattgatatgagatttgttgctttgtttgctattcgaccaagctagtaattaatagtagggtctagcgacgggctatatcgatgtttgggagcgttttggaggagaccgacacattgatgctgattggagtccgatctttgaagacctatatagcctagagctaggtttcatggatatttgtgtgcctaatgtgttttttttttgctttagcttcataagtttttcagatgcacccacaccactcactgtgcactttagttgactattgaatgctgagagttgcgagagctttcactataggaaacccccctgggatctcgagatagtgcatgtgtggaggtgatgaccaccttgaatgaaagcgccctatctttttggaggtgtacagagggttgcgtatcgtcaaagagtataatcacttctgctagagatcctttaaagcccactctcttctttttagagccaccttgaccttgtaggttgagccttagatcttttgatcaaaattttctttcctatacatgggtgcatttgtgggccttcagagctgggtcagtggtgataggtttagttaccttcgtagtagtatcttatatatttgctcaaaattggatatcagtttgaatacttccaggttacctctcggcatatttgatagatattccttgtagagttttccttacaccgtatcttatctagtatttcctttattgtaggaatattgatacgtctagtatgggttcagcttcttggatcagggttaggggtagattgatcagagtatcagactagttgaccggagatcatataagagagatatggattcacatgaggttaccattgatcagtttgcttcggccatggcttcaatttaggaggctatagctggcctcggccagaggatagatgggcagcaggcccagcaggtcccatcttaggatggcgcacagtatgacccaacagtaccaccaccccctccacccagttagtcaacaccatagactatacctttcactctacatagtcagaccgaggttgccctgcctcttgtcatagtgcctaccccgatctaagaggacccacgtgctcatatggaaagacttgagcagaggttgaggcaatcgaggacttcagatggagctattacttgggaagattttgatggagcaccaatggctagtttaccgaccaagtttaggatgcatgagattgaaagatacacgggcattagctatcctcgcatccatttgaggctttatagtatggttatgagggcccatggattggataaggcctagatggttatgtttttccctatatccctgagtagtgtggcacaacgttggtttgcatcattggatgtatcacgccatcagacttgggatgatctggcgtaggagtttttgagaaagtttgcatttaacattgtcattgatgttttgaggagagagcttgaggctttgagacagagatcaaatgagttcgtttcttctttcatctcccgttggcactggaagatagtagagattgttgataaaccattagagagagatcagatacaaatgattttgaggagtctgcaacctaggattgctagacacgtggttggagtaccttttacagactttggttctctgtcttagctttgtatgatgttgaggatggtatttcgagaggactatggacatatttttccccgattgatgctaaggggaagaaaccatccggatgacagagatcagctgatgtgagcactatcacttctactagttagaggcctcctaagcatcatcaatcagttctacagcctactgtgactcacccttcttatcctcctcaacagtataagcgacgagcacttccttagccgtatgattaagccagcttgcctcccacactagcattgccttattatgccgcacaggcacagagagacctttgacttcatatcctaccccagtatagccatgctacgcagcatagtttgcaacgagacccccaacttcctatcccagacctagaactccacaaactttcgctcattttgctttgaggacgtagagacaattttcacagttgggtatgccgttgagccaagctcttcagaagctcatagaggccggattattgacagttcttgctcctaggccattgccttagcttgttccaccacaattcaggttgaatttacattgtacatatcattaggggctagaacatgagactaaccgttgtactgctctgagacatgccatccaggatttgattgatcagggtttggttcacttggttgagtgtaaccactaacccattataaaccatactacacacgcagttcctcctccagccgatgacatacatttcattgactttgttgagcttgatgaccatatccacatgttgagttggtatgagtcagagctagaacctatagtagcatatgggatcattgggggatttagtattgttcaagaggccgagctttagcgtcttgttcatcaattgcagttgagtgatggagctcctggcgcttctgcgtctgcattggctaccccatcatctccagatcgtatgaacctcatgacactctatttcttggatgaggttgttccacatgacgagtacatcgatgagatgttcatgatgagtatgagctagatcgatgagatagttcagcctaagcttacttctccatttgatctctttggggtgtccgccattggggttgcagaggagatccagactgctcctgctctggagttttcagatgatgttatagttgttgatgatttgtttgaggctaccgttggcccagttgagggagcgtctaactttgtggacccacctatttcatttgatgttttatcaggatttgtctcccgttctgacgatgttcatgactcttcatttatggatttgagcattttttagtatctgcttgtctcttgttatatcactttatttgcacactcttcacccacttcacagatatttgatatagaagatgagattgcacaacatgattcaaatgatgactcatctttttcttttgatctggactctattgataaaagagttttacctgctgcagaagatacagaggttgttgatttcggtacaacaaattaacatagggagctacggatcatattggacttatctacaaatgagatatagcctcgtctagttactgagatcatatttagacgttttcgcatggtcttatgaggacatgccaggccttgatccatctatagtccaacatcgcttgccacttctgccctatgctagaccggttaagcagaagttgagatgattgcaccatcactagagtttgtaggtgaaggaggagatccagaagcagcttagtatgagatttttatcaatggtcgagtatcctgagtggctgaccaatgtcgtccttgttcccaaaaaggactgtaaggtgaaagtctgtgttgatttccaagatctcaacaaagctagtcctaaggatgattttcctctcccacacattgacatgctagttgatagtacgacaggtcattcgatgttttcatttatggacggatttttcaggtacaatcagatcctgatggctctagagaacatgatgacgacgtctttcattactgagtgggatacttactgctatagagtgatgttgtttggtttgaagaatgcaggagctacttatcagagagcatcgactacccttttccatgacatgatgcatcgggatgtcgaggtttatgtagacgacatgatagtgaaatctcgagatagagcaaatcacctagcagctttggagagattctttgagaggatcagacaattcaaattgagactgaatcccaagaagtgcacttttggagtgacttctgggaaactactgggatacatagtcaatgagagaggcatagaggcagatccaaataaaatcaaagccatccttgacatgtctacgccgaggaatgagagagagataagaggtttcttgggtagactttagtacattagtagattcatcaccggattgataaatatatgcgagcccattttccgactcttgaggaagagtcagcccactgtttgggatgatcagtgccagtgcgcattcgagaggatcagagagtatttgttgtcacctccagttttggtgcctcttacactaggtcgtcccttactcttatacttgtcagtctcatacatagccttgtgatgcatgttagcttagctcgatgattcgggaaagaagcaagctatttattatttgagtaagaggatgcttgattatgagatgagatatgtcatgatatagcgcttttgcttggcattggattgggctacttggagattgagacattacatgacagagtattcaatgcacttaatatctcgtctagatcctctgagatatttgtttaacaggtctgctttgattggttgactcatgaaatggttggtactcctgactgagttcaatgttcattatgtcactcagaagtctattagatggagtattgttgtagatcacttggcctcattactagtttttaatggtagagctattgatgatgactttctaaatgaggatatcgttgtagtgactagtttttcaggttggcgcatgtactttgatggtgcggccaaccattttggatatgggataggtgttctactaatgtcctctcatggtgaccgcattcctagatctgttcgtttggcattctctgatggacaccctgtcacgaacaatattgttgagtattaggcttgcatcttaggattagagacaactcttgagctcaagattagacagatggagatgtttggtgacaccaatctggtatggagacagattcaaggccattggaagactaaagatgtgaagtttaggctttaccatgcatacttagagctgctggttaggaaatttgatgatttgagttatacacatctgcctaaagcgtagaactagttagctgatgccttagctactctagtttccatgattgatattcatgctgataccgttgttcaccctttactgattaagttaagatcagttcctacttattgttgcttgattgatgaggtagagttggatgatggtttgccttggtatcatgacatatataagtttttgagacttggcatatatcctaaggtcgccacgaccaaggataagagagcattgagacagttagcgactcgatttgtgatctgtggggagacatatacagatgatcaactgatgggatgttactattgtgcttagatcacacctctgacgatcgagtgatgagaaaggttcatacgggagtctgtggaccgcatgtgggaggacatatgttagctcgtaagatcatgaggaccaggtatttctggttgactatggagatagattgttgccagtttgttcaaagatgtctagagtgccagattcatgaggaccttattcacgtacccccttcagagttacatgcactgacttcgccatgaccattttcagtatgaggtatagacattattgggaagatttcgccgaagttttctagtggtcatgagttcatcttggttgccatcgattacttcaccaaatgggtgaaagttgcctcatatgctagattgacatcatcaggggttgttagtttcatcagatcacacattatctgtcgctatggagtccctcataagctgatttcggacagagaagtacatttcaaagtagatattgacactttattacagagatacgatatccagtatcatagatcgtctgtgtataagccgcaaactaacgaagcggtagaggttgcgaataagaatattaagaggatcttacgaatgatgattgagatttcttaggattggtaagagaagcttccatttgcattgtgggcttatcaaactttttttcgcacctctacaagaacgacaccttactccttggtgtatagcatggaggcagtgctaccagttgagatagagatgggttcattgaggataacattggagtagcaaattttagaagtagattgggcctaagatcgattagatcagcttaatctcctagataagagaagattgagggtaacatatcatgtttgtgcctatcagaggaagacgatccatgcattcaaaaagtgggtcaagcctagaccgctacagaaaggtgacttggttctgaaggtcattaaggaattgatcagagatcccaaagggaagttcagacccaattggagcggaccttatttcattagggagctgacctcaaaggacgctgcatgattgatggatctagatggaaaccgattcttggagccaactaatctaggttgaagaagtattatgtttgagaccatagtcgtaggatgggtggccatcatttcagttagccatataccttgttattcccttttgacatacaaaccgttgctagcctattgagtctcgcatgtgcatcaaagtctttctttcttactatcttgcttacgtttctacaccgggataggggccctttagtgtatgcatgcttcattcaggagtttcatgagccttgtgcctacaggtgcatctttctctcattatttttcctacactactgcattccatcgtatctcattggttgtgttcttcatctcttcttctttattctatctattgtttgttttacttcatattctctataccctgagtggtgatccttctcatttcattacatggagaatagtcacatcatttccactatttatcccacagacaacgattcagagatccttagtttgagaaggtcttctcgtcagagagagtttttgttaccttagcacttgagaatgtgtctatccattattgatatcatctttggggttcatttgtttatgttcaaggtatatgcatttgtatatatgtaaaaaaaatgaaaagaaaagaaaaataagcacatgtgtatatgtgcatagtattctccatcattaagcgtgtatattgatatctaagggtcattttatcgagtatgtttgttgttgagagtttgtatgtgagctttttgagatccttttttctttgtgttcactttgtcatatttatttgaaagtgagatgagtgatcttctcctaggggctctgggtcactgtcctttccatcattacattcattgttgatgtgactttgctccatgtttgatttgagttgattatcacttttcttcgtatattcattgttttgctatcatcctcgtcattgcttgtaatttatcccattcgcttcacctccttgttattttcttacactgacctattccaggtttgatatttcctttgcatcattcttgcgtatctcattatcagtttgatttgcctcattgtctcattattgatattatattcacattgggcattctcagtttcatggctcacaagtttttttatacatgagggcatgggtttttgatcattgggtatttgtgcctagtttcctttcatttctattaccttaccaccctaacctaagttatgtcccgtgtcttaagactaccctgaggccaggggatcagatgttgtcttcgacaacccctacttagacaggtgtttgagatttggttgatatttagatatcatcatgcttcttcttctgggaggcgcctctttgatgtttggacctgattcagttgtggatatggataaccgggattgcacatttgatgatggatgatccgatgttgtctgattttttgatctaccatacatttgatgccatactagggcatatttccctttcagttgagatttgtagatcttcatggagtcacatgatcctcatcactcacgagatgcatgtcgagttgatagtctattattatcttgtcatgatctcgtagtggagtctctcttaggccatcccgtcaggctcacatttttcggcctataaatatcatcatgttttttttttttctttttctaggagacgcttctttgatctgttgatccgattcaactatggacatggatgattaagattacacacttggtgatggatgatttggtgtcatctgatttttcgacctaccacacatttgatgccatactggggcatattttcattttggttgagatttgtagatctccattgatttgcatgatcgtccccatttacaagatacacattgagttgatgatttgttttcattttacgatgattccctagtggagtctttgcttgagtcattcagtcaggctcatactctctgatattgtcgtgattttgtgagggagttgtcttaggcgcctacattcccatatcatcatttcagtggaggacatgtcaggtctcttatactttcccatggatttattctcgagttatcaggatagaccagatgcactagttgctatactggggcatatttccctcttttagttgtggagatgattgttttctcacaaagttgttgcagtcttctttactcagcctagggatgtttattcacattactggtcaccgtttcaatgatttttgccgagatgaacctccagaggagcacaaccttctagttttggctatcccactgttcatgactcttccatagattgttgtgttgaggttgcggtagttacccaagcggactattctcttgagacttcgcaatggatcattcatttgagatgacgatggactcctccaacagagcattttgagttagagacgtttgacttattgtgacacttaatcagatctcgtgatttagttagatggattgtgaggtcgtacttatagtcgatttgatcattctgactcgctagcggagcatcttttgagactcatgcaatctctttcagaccctttcagtagattgagagttgtggcggcacgctacactagagcatatttccttcctcatcatttcattgcagcttggcgtttaaagccgccatctattctcgattacgatgttcagagttgtccttcacagtttggcgttcagagccactatcttttttcaatttggccgttcagagccatcatttcttctcagtttgggagttcagagccaccatctctttttagtttggcgttcaaagccaccatcccttcttagttacggcatttagagccgccatatcttctcagttacgacgttcaaattcgtctttcacagtttggcttccagagccactatttcttctcagtttcggcgttgagagtctccatctcttctcagtttcggcgttcagagccaccatctctttttaatttggcattcagagtcaccgttccttcttagttacggcgtttagagtcgccatatcttttcaattacaacgttcagagttgttatctattcttaatttcggcgtttagagccaccatctcttttgagtttggcattcagagccactatcccttctaagttacaatgttcagagctgtcatatcttctcagttacgacattcagagtcgtccttcacagtttggcatttagagtcaccatctcttctcaatttgggcattcagagccatcatcttttttcagtttggagcttagagccaccgttccttcttagttacgacgttcagagccgccatatcttctcagatgttcaaagtcatctttcacaatttggcgttcagagccactatctcttctcaatttcggtgttcaaagccaccatcccttcttagttatgcgttcagagccgtcatctctttacaactcggcgttcagagccgccatatcttctcagttatgacattcaaagttgtccttctcagtttggcgttcagagccatgttttcaatttagcgttcagagttgcatctccagtttggcgttcagagtcgctatctcttcagtttggcattcagagccaccatcctatcacaatcgggcattcattgccacctttttagcgttcagatccacattgcgagcatttaaagttgtcgttttcttttagtttaacattcagagtcatctgcttcactttagatgtttagagccctgagctcacgacccagattcgttttctttattcatgactcaaagttatttcttttccatttagagccctgagctcccaacctagagtcgtttttctcatttatgacccaaagtcatttcttttccatttagagccctaagttcacgacctagagtcgttcttctcatttatgacccagagtcattcttagcattcaaagccttgagctcacaattcataaccattttcaccatttttttttccagttttaggcgttcagagccatttctttcatcaattttaggcatttagagccactcatctcttccagtttcaggcgtccagagccactaagtttggcattcagagccatgtcttcaatttggcatttagagccatcatcttcttcagtttggcattcagagtcgttgtgcatactcattcaggcatttaaagtcaccattttttctcatttttggcgttcagagtcatttttccttagccttatcattcagagtcatagctcctgacattcatattcactggcattgcacatcttgccttcatgattttatgtcgtcctcattttcctcatttcattaccttgtgcttatcgcttgttcatcatgctcttctagacttccccttctactgcacatgacatagtcctttgggttcacaacacatatttcggtcatgttgttgggcaccctacacttagcgttctcatgtagttcacatagggtagttccctttggacgcattcttccctgtactccaaggtggttcgaccattactcatctttgacattgatcttcaagtcacttctaaagacattttagagggagtctggatccatagcgcaactttagagacgctatgagagctaccattctcttaggattttagggccccttttgttctttcctggtttgagcgagtttgtgttttacttgtgtatctttaggggtctttc

SEQ ID NO: 12284 - DNA, 692 bp, Vitis vinifera
  Intron number 6 from transcript GSVIVT01032604001 (locus G SVIVG01032604001) derived from phytozome v7.0 (chr-ID chr1 4; pos 28773541 to 28774232 reverse strand)
ctctaccagttcatcaatttcaggttcgtttgataaatttaaataaactctttgatgactgggttcttgtgctaactgttcttttattaattatgatttttgactttttcttaatttttcattggcccatccaaaaatgaattatgcactttgaaaatccattaaatttcttaataaatgtctgagctttctgtcaaaatccattaacatgcttaataaaattctgaaattcagaaagctccatcttgttcccaattattatctgcagcgccttataacaattatctgggttctcaatatgtgccatatggttttctaggatgttatatttcttcttggtagttcactcctatttgagaccaaacttaaaaaagtaatgctgaactaactcattgagtaatgtgtcatattcttgttgataggacaggaattgattaaaagactagtcttgcagtcatgtaataatgacagtagatattagccatgtaaatattggaaattgttcaattatttgagccttcaataaatactaaaacatatataaatgagaagctaagatgagattcttgtcattgcaatctattcataattgtctcctggtgtgggcatgtttgtactctcaacattttcttattatgcattctgatttcaccatttgaatgcagagggcttctcgtggttggtgtgagaaa

SEQ ID NO: 12285 - DNA, 11043 bp, Vitis vinifera
  Intron number 1 from transcript GSVIVT01021628001 (locus G SVIVG01021628001) derived from phytozome v7.0 (chr-ID chr1 0; pos 8387018 to 8398060 reverse strand)
gtccaccaacccgggtactgctgctcagaaacgtatgaatgatattaactttctttaaattgggtgttgcataaatgtttacctgcattattatgatgggtgcttgaaaattggatggaaactgatcctcttttttgttctttactggggcatttgatagttccagcctaggttttattactatgaaaaaatgttatcagtttcttgaaatcttagaaatgatcttatccataagaatcatatgattaaaaaatggtttcaaattacttgatgtgagttcatttccttgttgtttttaaagcaactcttacttaatatcagttttaaattcatttgttgcctaatttgttttagctcattgacaccaaatcttattggtgctcatctctttctttgccaagatcaacttgcaaaattctttattgttgttgttaatcttagttctctactaaattcaatgagttgcaaattaaaattcaagttgtcgtaacttcatcttatttagtagagatcgtaatttcaagtgcaacccttgcaattttttataatttgttatctttagtggacaactcataatataagacatttgaatgaataacattattttttataaatgttttcatcaagctagtgtgtccatatgaacttcaccacttgtctagttcgtaaaagtgtattagcatgaacatttagctttccaacatcctccaatatcaaatcaatgcaatggccagcacaaagagttcaccacaatcttcttctcttttccataagcttcattccaacattcacataattaaagacattatcagtgataacttgcacaacattctcctttccaatttattcaaccacctcatcaagatatttgaacattaattctccattttttattgtattagatgcatcaattgatttcataaatcatgtgccaataggactattcatcaaaaaatttataagacacctactctttccatttttccaattatccgacataattgagcatccatattacttccattatgatatttatgtcattcacctactttttaagaatccatgccctcaagtcatgcatagatagatgcttaaacttgagtccaaaatttgtcatagcatcaatgataggaacccggtaaggatcattcattgtattgaatgtgagacttttgagtacataaatcaatcaatttttatacacacctccttcctttcttctagcttccacttggaattaaaagcactttgtttgtgttgtgaagtggtgaatttatccatgggttacttgggtataattcctcactcctacttgcactcccactccccaatgtccccattgttttagaaaaggtagtttcatttggacccataccaattttttcgagcaatttatttcttttttatttttgttcattataattggtcaatgcctctttacattccaatctaacatcttcattgactttgttatatggttttataccatgataagttccggctaagtgatgcttaagtctatttgtcccttccgtgcatctttgattgcaaaatttacatcttatatgcttcttcctgaaaacttcaataacatatttccacaaaatctttttgtgaagctttctaataagagaaactcatactaaaaagaaaagaaatgataataataataagatttcataatgattgacttcaaaaaaataataagacataattgacttgaaatcctaaagttaaatttaagcattaaattcaaattaattaattttatttaattttaaaatttatgatttgaaaaaccaaacacacacacacaaataaaactcaagaatagtgctcggtgctcactatgggtgtgaaattgggtgctcattgttaggtggattttttaaaggaaaaaaatcgaagtaaaaaaaatatcaaatcaacaattgaaaaatagaaataaaacatggaagagcagtgctcatgcatggaagaacaatgctcattataaggtgggtgtgaaatgagtgttgagtgttgacttttgagtgtttaaaaaataaaagagatttgttttgaggaaaaaaaaacaaattaaaagaaaaaaaaagccatggaaggagatttattagagcctaggccttcacactttttttccaattagatggcttgacagaagagatgttagccaacaaggagagggttggttgtggtgatgaaactcaaggattggtgaatggggccttttaagatgacttgtttggaaacttgttgtctttcaacaggtttgtgggggttgtcggtcaaaggattggagaatgaaattttgactcttttgcagaggtttgagactagaaaaaggggtagagcctttgttcatggaaaaaagaagggttcaacctttaagtctagatttgggagacaattatgcaagctatagtgctctattaattatgattttgcttcagggacaggaagaaggtgagagaagacttttaggaattgttcaaggtttgttgatgaatattaggattctatcttggaatgttagaggaataaatgttgttgaaaagcatagtgtagtgaaagttgttatcagatcacaaagggtagacctagtctgtttgtgggagactaaggttaggaatttgggagtagaggcaagttctcgaattggggcactatggattctagaggttaggcatggggaattttagttttttgggacaaagaagtgttagggcttttagaaatggaaagaggggtatattctctgtcgtgttggttcaagaattgagattataatgtcaattgggtattccctagattgtatgggccaatttgtaatgctgagatggaggatatgttgtctaaccttggtgataatagggggttgtggagtaacccttggcgcatcaatggggactttaacgtggtcagatttcctagagagaagagatattgctcgagaacgtccacaacaatgaggcgtttttcagagataattgaagagctttagttaaggaattttcctctcacaaggggctccttcacttagtgtggtggcttgaataatccatcctattctaggtttgatcacttcctagtttcgtaagagtgggagagtcattttagtggtctattttagagtttggtgcccaagcccactttcgataattctcctattttactggatgcaggaggcattagaggaagaaaaactcgtttttggtttgaaaatatgtggttggaagtggaagatttcaaaaacttggttactaatcgatggacaagctacaattttagtggctgatgtagtcacatcttagctatcaagctaaagttgttgaagaaggttctcaaagtatggaatagagaggtcattgagaatgtttccatgaataaaaaagctaccctttgttagattggtttttgggaggcttgaaagagaccttgatctttctcccgaggacaaaaatgctagaagaagggtcatggaggattttggcaaatgggtgggcatggaagagacttcgtggaggccaaaaaacaaaaagagaattatggttaaaagaaggggataaaatctcaatttttttttttccacagaatggctaatgtccaaaggaaaaggaatttcttgtttgctatcaatgtgaatggaagaagattaattggggaagttgagataagcgaggaggtgatcaacacgttttaaagcatcttgtcagagctaggggattggagaccgagcatcaacaggctgcattattcttctttggacagagaagagtcgaggtcccttgaggaagctttttctaagggcggcgttcttttagatctctctagtttgtgtggggataaagctcctagtctagatgggttcacaatggttttttggcaattttgttgggatattgtcaagaatgaagtaatgactttttttatggagtttcatgacacgggtcattttgagagaagtcttaacgtggcctttattgtgttcatccctaagaaacaaggtgtagaggatttgaaggatttttgccctattagcttggtggggggtgtttataatctcttagttaaagtttttgtttatagactaacaagaatggtaaggaaaatgatttcaaatttccaacatgcttttgttgagggcaaataatttttttatgtagtccttatagcaaaagaggctttaaactcacaactaaaatgctcagaaagtgtggttatttgcaagatagatattgaaaagacttattaccatgtgagctggggtttcttgttagcaatcatggaaataaaaggctttagagctaagtgggtaaggtggatgaggtgatgcattttttttagctcgcttttcagttttaattaatgagacccttgcaggtttcttccaaagttatagaggcccaagataaggagatcctctttcccctttccttttcgtaatctcaatggaggtgctttcttgtattttgaagagggcaatggaagggagctttctagaggatgttttggtcaatatgagtggaggtgtgggtatggtagtgacatcttttatttgctaatgacatctaatttgttgtggcttaaacaaggagcatttggattcctttagttgggctttcatgcgatttgaggcgatttttggtttgaaaattaatttggattaaattgagttgatcctagtgggggaggttcattttcctttttcttcataggtagggggcgggggaggggggaaggtttctaatgtagaggatttggctagggtgttagggtgtaaagttggttctctcccttcttcttatttaggcctcccttagggtgcctcctttaaacctttacaagtgtgggatgtagtggaggaaagattttagaaatggttggctttgtggaagaggcaatacttatcaaaaggagggaaactaactttataaagagcactctatctagtttaccaatttattccatattcttttttttaatccctcttaaggtagtctaacattggagaagattcaaaaggacttcctttaagtgggaggagagctccattgttggcctcacttggtgaactggttaatacttttcttgagtaaaaaggatgggggcttgggtattagaaatttgactactctaaataaggccctatttggaaaatggtgttggagatttgcttctaagaatgcaagcttcattatcgtagaaagatggccttccccctttgctaagtctttaatggatgatttgaatgtaaagtcactcccaccccttagcccaaccactagagttgtctctctcttgaatcaggtgattgtaaggaagtatgaaaaggaagaggggggttggtgttctggatcattgagggaaggttatggagtgggtctttggaaggctattgggaaggggtggaaggattttagcaaaaggattgtttttaggaagggaatggaaggatagtgagattttggaaggaatggtggtgtggtgaggattccttggttgaggctttcccggagttgtactcaatagcctctgctgaagatgcatgggtagacctaatgtgggtgcaagtgggggaagtgggttgttgaaatcaaatgttcacaagacaaaataatgattgggaaatggaagaggtggatgattttttcagaaggttgcaagggtaagtgatcagaagggttgttgaggatgtcacgacttggtggttgtcaaagggaggtatctttacagttaaatccttttactccttagcaggtagcaatcagaatgcgttcccttcaagcattgtgtggaacccttgagtcccaaggagggttagtttttttgctcgagaagctatttggagaagaattctaactttggattagctaaaaaggaggggttagtttttattgagttgatgttatatgtgtaaaagtgaggaggcatcaacaaatcatatcccccttcaccattccaatacagtcgtgctttggcaactttttgtgctcttttgggtgttcagtgggagatgccttctttagtcaaggatgtcctccttagttggcatggtgcctttgtagggaagagaaggaagaagatgtggaaagaaactcctttgtgcttattttagaccctttggaagcagagaaattggagagtttttgaagattctgatttggtgggccaagctattttacggtcctttatgtacatgttcttgaaatgggttagggtgcatttaggccttagcttgttgtctttatttgatttattaattggctgggctgcaagtaaggtgagggtattgttttttgtgtatccctcttcttttttggctttaggtgccttatatacatcatgcatacttttatatatatacaccgaggaatcttccatggctaggcccttaggactctccatgaggacccaaacctcggggtgttgaccgccccgcaacaaccaacattgggtaaatacaaggtatcatcagtggtaggatttgaacccaagaccatgtgccacttacttcacactttccaatattcgccctgaccaactgggctaccttgatgggtatacatcatgcatactttttcccctctttcagcacttttaatacacatgcttttatctatctatctatctatctatctatctatctatctatatatatatatatatatatataaaggaaaaaaaaagaaaaaaaaagttttattttgatttcttatcaagattagtggtcaaccttgagagagaatgatttagggtaatcaaggaactttgtctaatgagccattaactctaatcttcactgttcttatctgtatgaaagatgcttccccttgggattgaatatcttagtgccattagtttggtgactggatgtgttgaggacagtcaaatccttgatgcttctttggtagtgaataaatttctggataagcagatgtgctttaagaaggaaagagtggtcttaatagtggatttgaaaaaacctgtgactatgttgattggggtttctggatcatgcctttttcatgaaatgttgctggtgtagaaagaggaaacagattagggaatgtctttcgttggataatttttttctgtactaatattaatagtagagtgaagggtgggattaaggctttgagagatttctgtgaaggtgattccccatcctactcattaggctaaagagcctcatcttgttgaaggctttagggtccagggattggtggggctcgcatctgcaattcacatttgggaccaatttgctctttggtgttcatgtgggaaaattttctaacttaagaaaatatttctgcatgtgcatacaaattgatccataatattagaatacgatgaaactacctaggtcagcttgctaataagatgccctaatgtactgtaaaatgttgtgttagccaacaattagatcaaaattcagcgaattgatcaagattctccagtttattaaatgcctaagaaacacaatgatgaggggtggggtattaatatgataaagaacccatagcatggaatctcatacaaaggtttaagatctcttgtaggcctttatggctattttttgtaagtgtattaactatatattttgattcaagcaaaaaagagagtcactttgtgtatagaatgtgtgttaaatcaggctttatattgtgtcaactccttctgtaaagggctggagaaattttttttgtaaacatcatccctagaaggaaattgtgggctaaacaggttactgggaattaatctattagtcctgcatttgcaagaccatcaactgtagttgtgtttttgtaataaattttctatacacattacctcctttcttttggaaccttcatttatagtgttcagcttatatttttcaatttatggattttaataaaccttaatgatttctgcggaaggagggcagattctaaacctaatgttaaggatgactgagtgtctggactctaggactaggagtgggaaatgtgaattgcaagatggactttgagaagggataatgaccatgtgcattggaaattcttgttgtaactgccagactatacgagtttgacagagaaatagaggaatctgcttctgacatacgcctaattttttcaggaatatatcttgaaatgctgttgactccttcacaactagtacattccaaaataactgctatttggacttctttacctttggcaatgaacctcttttgtaattttttttttttccattcatccaagtcttctatattttttatatccaaagaaagtaacaaaaaaaaaaaaaagtagaatttgctaacttgaaacccaactgtgatattaaagattccattgcaatcgatatagtaacaattaaaaatgagtaatccactgatttctaactatctcttttatagtctgtttctcaattttagttgtctcaaagctgaaattttaaaagaaattaatgaatatgttgtatgtggagtctgtttgactaagatatttggagctcataaaatggacctctagaagattgttctttaatattgttcttgtacttgttgctacatactgataaggggtttagtgttttcatggaatctaccagtgctattgatgtaagccaactgcttgttaaattaatacttatgggaaatcatttacatggagctgatagtgagggatccatatttcttggctaggttctacataacattccaaacaattggcaattttctattaaattgagtcatcttacattttgttgttagtctgtaatagaggttttaatttgtaaatgcttgtatttttgcattgcccttttggggagaaaacttcatcttatttgcatttgctcaaagtgtacaagagaattagattcttatatacttttagggcgctttcatttttttttttttttaattgaaaataaaatagcaatgttgctttagttgttttttttgtgaattttagcaattaggtggtggatgcattacttctgtgattccttctatacccaaataactggataaagaatcaagataatcatataagatgacctgatggagatatttcacaagcctaaaatgtctccctattttaatttttctttaatttcttaaactccccgttttctccaatctctcaaacccactactacacattccttctcaatttcttggtaacatatctgttatcagcttcttgatagtgttcccaccacttcattatttaaagtgagttccaatattgatctctttccaaaatttgttgagaccaaaggggtgggatccgcttattatttcaggcatgaagcacttctgaatcttctactttctcatcttctatttaaccttccactcacacatagcttcatggtggtgtttgtttgctggtttttactatgctgtactatttatgtgatgataattaccacagaaatgtgtcttgttttgtgttagtctagattgtaaacctggaaagttatcctgcttgatcagccttcacttcctattgtttttgtgtaagcactattgcttttgtatgcttattacaagctttgtgcatggtgatgtatgaattttattgaacaatagttttctgtggtaaaaatataaaattcattggaaaatgcttaaaaagtgccactaccttgatacatgaagcatacaaggccatgaaaaaaaataaaggaaaatagtgaaggccaaatgacagccactgtaggtactttaggttaccatcaagctgttaatggaatctaaagagataaaatccctttcacctaggaacttcaaattcagctccaactattccaaaccttcaaatgtcttaatctggattttctataaatggtgatataagttcaaagcaggacttcaaagtcgccttctaatcttggcaataaaattgccatgccagccagtaatgttatcatttaccaaatcgggaaatacctaactgatgctgaaaatggagaacaacagaacctggattctatgtctttctcccttataggttttttagagtggatagcttccacttgaggggaggtagttctttttggtcctttttctctttttgaggctgtagccgtcttgtatactccctgtatgctctgtggcgtttagccttttctaatgcaattcttgtttacttataaaaaaataaaaaaaaacagaacctggattctatgagccacctcacaatcagtaaatattgattagccaacttagcttgttatatttatgtatgcaggagtagttgacaaggaccttctcctaatcaatcttatcaatggtgtgaggatcttctcccacatatcttatccccagtaaaaggcctgccttgtatgggatgaagcaccaccacccccttccctcaccctcactaaacataaaggggattgcagtaggattttactgtgaaacaacttttgtaaatcttctgtgctaacttgtcaatcatatcctcagaaggttcaatgtaataaaaacttgaccagaagaacccctcaactccaaatcccagacctgtatgttgttatgaactttagggtatcataacccacaccaagaatgagccaatgttttgagaacatcaataaaagtttcatcacaaagtcttgttttgagtaatagaaaacttggcatatattacgtggtgactaatatcacagcactgaactttactggttgatcattaatggaaacttggttcattcttgtttgtaacctatacttctgtcttctactatgttaaaatcttgaaagggatgcatgcttgtgccagtcatgatgtatttctaatataacatttgcatatttctgattaataaccgtttatggtatattccatttgtgttgtttattttgcttgatggaaacctggtggtatacctctaattgaatcaccatatttttctttgctgagatgtaaatttttgttgtatccatgatccacattcagggtactagtgtgaaaaaatggagaggtttgtcctttttaattgtattgttcattctcttgaaggtgggccctggtgaggtgg

SEQ ID NO: 12286 - DNA, 1237 bp, Vitis vinifera
  Intron number 17 from transcript GSVIVT01029823001 (locus GSVIVG01029823001) derived from phytozome v7.0 (chr-ID chr 8; pos 100382 to 101618)
gagtcctttggttaattgacaggtaggacctctcttaaagctttcaaaaaataatgattaataatgtttgtttttaaatgaagtctaatgatattgtttgctctataggtttaccaggttgtgcctacttttcttgataggtatacatgatatgcatttattgttatacttctatttttgctcatggtgaaagagcatattagtatcaaacaggtagggatttggcagtgtcttctacctgtcattaataatttgaaatcatacaagggttatacacttgcccccagaaaggatgtagaaggctatcaaactacaatcagaaaaattttaggtatggtaggtctaatttatcttctctaataatgacttgaagaaccttgggaagtttagcccaagtactccatttcatttgagaggaatcccattaacagaattcatatatcgatctttaatttgtaaatttttgctaagcaagtatgagctcctagcttcctttctttttcacccctttcctatggctaattattggttttaaaatggtgctatatcatatatctcatgcaaaccctagaaagactaaaccaagacataatcaccatgaaacaatcatatcataccttttttggttatggtctccattatcatcaacataaagtgtggaaagattggtccagattcattgttgtaaattagtaagtattatccatatttagaatattatattctttgcatttgaattatttcttgtaaataggttactcccttaaatagatttaaatcattgtatctataaatatgattggagatcccatgtacactacagtaatgagaaccaaaaattcattttcaattcatctttgtgtttataaagcatgatgaagaagtacattgaaagaataaggaaaacaaagcttatgtggtaacatctttattttcacttcattatcatcaacagcaaaagacgggcctgttcagtagataaatttgatctatattctttgttttttttaactaatgatgttcatcaactctatgcccatttacagctgctaattcttatacatctgtagtattgaatttgaaattttctattttttgttcttgtgtagaattaccttctaactttttagttgtcaacttgtcgtgaaataacttgcataatgatctgtttatagatgatttatgtggctaaaaaattaaaagaatgatcatgtgacatttaattctctgtaggtac

SEQ ID NO: 12287 - DNA, 17241 bp, Vitis vinifera
  Intron number 5 from transcript GSVIVT01022882001 (locus G SVIVG01022882001) derived from phytozome v7.0 (chr-ID chr1 2; pos 18417347 to 18434587 reverse strand)
gctggtaaatgactatactttttgttttttgttttcaccatttaacatcatgttgctaacataacagtggcatctcctaaatattagccaataagtaggtaatttgtgaataaagaaagaaatcatggcatagctataagttatcagttcatgttccctgataccattctcatacatttggtatggaccaatacctttatggccttgtcaagcatgtccatcctagagaagaattaagaaattctagaatcgcatttttgtttcttatttagcttttcaaacataggtacgaaacaaagaagttgaaaacgacatttgtactaggaattgcaaatgacacattcttgcatttttatagtgttgggctaggttgtgtataaatgggggttcaatgtgtgtatttgattttattgattggttgggtgtttcttgatgggaggggtattttctgtttttctcctcttttcctatgtcatatagtggcctttgtatactagttgtgcaccttggtgtgccagttgtttttttgttaggtcctattaatttatatattttttgcttacctatcaaaaacagaaaaaaagggttagtatgaaagatactaatgaccaaattggcaagtttggtgggtatttagtataagctattgactaatgttattgttaatattatgaaggaggttgggaaacttgtgttgaagtttctaaactcatttgtggagggtaggcaattcttgatgttatttttattgctaatgaagcaattgagttcagattaagttgctaatagggttggcttgtaaattggatattgagaatgctatagccatgtaaattaagggtttggtttttgttttttacccttgtcccttttgagtccaaagcaacaaatttgttatatttacaaagaagatgagaaatccttcaaagatttatgtaatgggtataaaatacgggttaattcaggttttataatctattatcaaattttcattggttaatggtttccctatggagtttgcatggccttaggcataggcatctgccctcatcttacctatttgttttggtgatgatgggggttttgagttgctttattcttaagggagtggaggggcagtttgtgaagaaatcaaattgtttcttttttccaccgaagtcttacaaccctaggcaatatatacttatatagaacatttagtagtttacaggtgctcgattctaggctagaaaataagagcaggttctaccccatattgaatattaaatccctataatttaggggttgattctatcctaatttgaatctttaaaaacggggattacttctctaccgaaatagcctaatctaggctaatgatatttacaattacactcaatcttctattatgtgaaataaggttttgtcacactccctctcaagatggtgagtggatgttttccattcccagcttgccaatgatagtatgaaaaacaacactgtttaaaactttgattagcaaatctgcaagttgacctctagtggatataaaaagggtgcaaatcagtccactatccaaattttcttttatgattgccttggattatgggtaatattgatcgctgatttattgtcataatagggtctcataggtccttccctcttaatgtttaaatcttctagaattattttaagccataaaagctcacagttagtacctgttgaatataatgtatttatagtatattatctttccttgttaatataggtcacatgtatggtagttaggactcctagccttgtatatatatatctctcaattgtaagtagacattacatgaatgagaattaaggtttttcttctttctctctctctcaacatggtatcagagctagggaagaaaacctaattctttcctgtttcccgtgtcatcaactccgggcaaccttccggtgaccgtgtttcattccggtcaccttccccatctcccaatactttccggtcagtcggaacgtcgttagaaaccactcaccgccggcgaaattttccggcgaacttttccggcgacctatttttccgacaccgaccataccagaaggagcgcctggaggagatctccaacttttgtgaaggcaccggcaccaaaagaggatccacgcgccggccacgcgccattttccggccggcgactgcatctcacgcgccggcgcgtgagggcgtgtgaggccttttccggcgacgcgcctcctcctccagcctcgtctgccgccgaccagcatccctacctacctggttctcccatccgagccctgcacgtacctcttttggggatttttgtctccgtcagccctccaaacagcctttccggcgaagttccggctactttctctccaccccaatccctgcacgtgccttgggaagtgttcttctacctttctggtggtaccacgtcgcgatctgaggccgtctccctttttcggtggtgccacgccgcaatctgaagccgtattagggctctcttcgatccaaatacgtgaatatgaccaccaaaaatcagatctttacctccgttatctctggatctcctatgattacctcagagaaattggttggcagtgaaaattatctttcctggtctgcctctgttgaactttggtttatgggtcaaggatatgaggatcacttggttacccaggaggcagatatccctgaggttgaccgcgtacagtggaggaagatagatgcacagttatgtagtgtattatggcaatcggttgatccccggattcttcttcatcttcaggcttataaaacttgttttaaattttggactcaggccaaaggattatacacgaatgatatccagcgtctttataaggtggcttctgctattgtccatctcagccaacaggacttggatctatctacttatattggtcagattgcctctcttaaagagcagttcttgactgtgatgcctcttactcctgatgttggggctcaacaaacacagcttgacaagttcttcatggtccttactcttattggcctccgtccggatcttgagcctattcgtgatcagattcttggtagttcatcagttccgtccttggatgatgtgtttgctcgcctcctccgtatctcgtccactcagactttgccatctgatagcgcttcagattcttctgtgttagtttctcaaactacctctcgaggaggacgcagtggtacccgaggtagaggccaacgtcctcattgcacctattgcaataaacttggccacactcgcgatcgttgctatcagttacatggaagacctcctcgcactgcccatatggcccagtcctctgattctccgctgcctcagcctccgagctcctccgcatctcagacatctcaggcttctattgcctctgttgcccagcctggtaatgcctctgcctgccttacccacacatcttctcttggaccctggattctagattctggagcatctgatcacctatctggtaataaggatcttttctcctctattactactacctctgatttacctactgttaccttagctaatggttctcaaactgtggctaaaggtattggtttggcccttcctctgccttctctacctctcacttctgtcctttatactcctgaatgtccttttaatcttatttccatcagcaaaatcactcgtactcttaattgttctattaccttttctgataaatttgtgaccttgcaggaccggagtacggggaagacgattggcataggacgtgagtctcaaggcctctatcacctcacctcagattcatctcctgcagtttgcatttccactgatgctcctctcctcattcacaatcgtctgggccaccctagtctctccaagttccagaagatggttcctcgtttttccactttgtcgtcgcttccgtgtgagtcatgtcagcttgggaaacatactcgtgtctcgttcccaaagcgtttgaataatcgggcaaagtctccttttgagcttgtccacactgatgtttggggtccttgtcggactgcgtctactttaggatttcagtattttgtcactttcattgatgactattctcgatgtacttggttatttttaatgaaaaatcgagctgagttattctctattttccataaattttatactgaaatccaaacccagttcaatatttctattcgtgtgttacgcagtgacaatgccagggaatatttttcagcccaatttacttcgtttatgtctcatcatgggattcttcatcagtcttcttgtgctcatactcctcaacaaaatggggtagctgaacgcaagaatcgacatcttgttgagacagctcgtactctcctcctccatagtcacgttccttttcgtttttggggggacgctgttcttaccgcttgttatttgattaatcgtatgccctcctctgtcttacacgatcagattcctcactcccttcttttccctgaccaaccactttatttccttcctcctcgtgtctttggttgtacttgctttgttcatattctcactcctggacaggacaagctttccgccaaagccatgaagtgcctcttcttgggatattccagacttcagaagggttatcgttgttattcccttgagactcatcgatactttatctccgctgatgtcaccttctttgaggacttaccattcttttccaccacttctgagtctcttcctgtttctgaagtcttgcccattcccattgtctccccacctgatgctatgccccctcgaccacttcaggtttatcatcgtcgccctcgtgtcgttgctcctctcccttttcctgaggcacctgctgactcacttcctatcccttcgacttcacctgccccggctctgccttctcctaatgacttacccattgctgttcggaaaggtactcgctctactcgtaatcctcatcctatttacaattttttgagttatcatcgattatcttcaccctattctgcttttgtttctgctatatcctctgtttctcttccaaagagcacccatgaagctctttcccatccaggctggcgacaggcaatggtggatgaaatggctgctctgcactctaatggcacttgggatcttgttgttttaccctctggtaaatctacagttggttgtcgttgggtctatgcagttaaggttggtcctgatggtcaggttgatcgccttaaggcccgcttagttgctaaaggctatactcaagtttatggttctgattatggtgacacattctcacttgttgccaagattgcttctgtccgcttgcttctctccatggctgctatgtgttcttggcctctttatcagttggatattaaaaatgccttccttcatggtgatcttgccgaggaagtttatatggagcaacctcctggttttgttgctcagggggagtctggtttagtgtgcaggttacgccgttctctatatggcttgaaacaatctcctcgagcatggtttagccgttttagttctgttgttcaagagtttggcatgcttcgcagtacagcagaccattcagttttttatcatcataactccttggggcagtgtatttatctggttgtttatgtggacgacatcgtcattacaggcagtgatcaggatggtattcagaaactaaagcaacatctttttacccactttcaggccaaagacttggggaaactcaagtatttcttgggaattgagatagctcaatccagttctggtgtggtcctttcccaaaggaagtatgctttagacatcctggaagaaaccggtatgttagactgtaaaccggtagacacacctatggatccgaatgtcaaacttgtaccaggacagggggagcctttaggagaccccgggagatatcgacggctcgtaggtaaattgaactatctcaccattactcgtccagacatttcttttcctgtgagtgttgttagtcaattcctacagtcaccatgtgatagccattgggatgccgtaatccgtattcttcgatatatcaaaagtacaccaggccaaggtgtattgtaccagagtagaggtcatactcaagttgttggttacacagatgcagattgggctggctcacccacagatagacgttccacttcagggtactgtgtttttattggaggtaatctaatatcttggaagagtaagaaacaagatgtagtggccagatctagcgctgaagccgagtatcgagctatggctttggcaacatgtgaactcatatggttgagacatcttcttcaggagttgagatttggaaaggatgaacagatgaaactcatctgtgataaccaggccgcattacatattgcatccaatcccgtctttcatgaaaggaccaagcatattgaagttgactgtcattttattagagagaagatcgcatcaggatgtattgctacaagttttgtcaattcaaatgatcaactagcagacatcttcactaaatctctcagaggtcctaggattaaatatatttgtaacaagcttggtgcatatgacgtatatgctccagcttgagggggagtgttgaatataatgtatttatagtatattatctttccttgttaatataggtcacatgtatggtagttaggactcctagccttgtatatatatatctctcaattgtaagtagacattacatgaatgagaattaaggtttttcttctttctctctctctcaacagtaccattgctctaaattcaagctttgcacttgatcaagcaattaattctgcttcttactttttggaggatcgcgtctctctttgttggggattgtgtggagagagaggaacgctaggttttttgaagacacttggaagacgtcggagatgatgtgagatttgcttcatttctatgcttctttttgggcttatagtacagatgtttttaaaccttatcctttgaatgtaattcagcttggttggctttcgatatgtactccctagggttgggtctatagggttaggagatgttatatttgtataggttttttgtaccctttgtatagccctccttgtatagtggatgtttacttaggtctttttgatcaagtttgcatatcatggggaggatttatcatccttctcatgttttatttattcttgattaatacatatatttgtttctgataaaaaaaaaaaaaaggaatgtgcaataactagatgtggatctcgtcagctggagaccttgcatagtttgcatcagtgtaggccaagtgttaacctctctccctttttgaacaatattcctttccttggtgttctcttcaagtcgatacattgcttgaagatgaacttctttgggattgtgcataaattggctcacaatgttgacttcatatgctatgttcggtttggtatgcggaagttaaattagtctcataacaagcctttaatatatgcccttgtccatgacagtgtctccatgagcctctccgagtttgtgattctgttcaataggtgtttttgttggtttacgccttgttttacttgtctctttcagcttatctaacacatacttctattgagatatgaaaattccttacctagggtgagctacttcaaaacctagaaagtatttcaatctggcaagtgcctttatctcaaattccttaattaaacattttctcaaggcttctcttccttctaagtcatctcctattactaaaatgtcactaataggatcgtgactccccctgaggctagagttcaaaatctcggctgagattggtatgactcagctgagttgtatccgtctaggccatgcccgatactgacctataatcgagtcaaaatcaaaatccacaaaaatgatgaactttgggacaaaagttcgaagcctcggtctcagtttgcatcttcatcctttagatctaagcttttgcatccttgtatggctgatttatctctagtttagtacctttagacctcgaagatgatgtgagaagttgttggttgagagatgaaatgggtgttcgacatagaagatgaaatgtgtatcttgcagagaaatgagcatgttgtagagaaatgagagtgagaggtttttgactcaaatgggaaagaatgggcatgttgcagagaaatgtgggagaaatgggagagagaggtctttgactgaaatgggaaagaggtctttgattgggtatttaggggagagaaacggaagagagaggtttttaactgaaacaggagagttcttctgattgggtatttgggaatatattaaatgattataaatatttaagtttatatgaaataaataggatataaatattaatataaaaatttaaaattaatggatataaatactaaaaaaatatatttatttttaaaaatttatttattcaaacaaaaataaaattaatacaatatttggttttttttttttttttaataatggttttatttagattatagttgataggagaatgatgtttatatttttaaaggtaatacatggttattttttaatggttgaaaatatatattttttttaaattttcaaaatatttaatttaaaaaaatttattataaaaaataaattcttttttttactagttttatctaatatttagtatgaggtgataaataatttttttttaaatccatgcttctatcattgtatagataatgttctctctatatatttattaatttttttagtctatatgattgtatttattttttttaataattttagcaattctcttgaaaattttgaagctcttaaatgaacatattttgcatgtcggcagataccgatacaagataccaagactgatgtgccttgggaccttttgagtcaatgattgataccgcgactttgaactatgcttgaggctggatgttgaatgaacaacatgtgatctccttggctttgcttgtaccctatagctattatgactttggaaaatctcccaagccaagctctaagagattgttttaacccatatgatgcctttttgagcttacgcactttttttgcccctctccaagtgtggttcaaaaccgggagagactttcatgtagatttcttcatcaagattgctgtgtaggaaggtgtttttaacatcaaactgttgtagattcctcctatgatgtgaatccaatgacaggagcattcttattgtatttgtcttcgcaattggagcaaatttctcaaggtagtcaatcccataggtctatgtatatccccttgccacccacctagcttggtatctttccattagttttgtaccttttgggaggattcctgtcctcctttgccttttgcattcaatgcagtgaatttgtcctttttgatcaaaaaaggggaaaaagctggactctgatatgctctactaaggattgggtatttggggtttattgattcctaacaaaactctgatggttaagtgaataaggatgtttaatgaacagaaatgagtgggggaagatcaaaatgaagaagtttgataggacaagagtggttagtgttctggtgcatcaaaggggcaacaacgtggagtctatgaaaagtgttaaaaaaggatgggatgcttttttttttgatcagaaacgaagaagattatattaatgaaagaacgaatacaggagagaaaaaagagacaaaagaaagagaaaaaaaccaagggaaggatgagaggtcctttctacacaaataccaaggaaaaacacccaacaatagaactctaaaaacaaaagaaaccccatcaatcttcaaactcttgaaacgcaaaccccaatccaattgagttgtagaatgcttagaggaactcctctaaaagcttcaatacaagaagcccatagagaagaataaaaccggaacaaatcccaaaccatctcttccgttctccctttatcctcaaagatcctattgtttctttcttgccacaccatccaaatcaaagtaaggcaagcaatttgccaaagtgtcttgcctcttaatgagttccccaagcctttaaaagaaataaccaacatgtcctcaaggctccttggagggactcaaatcacacctactagattaaacaacctgtgtcaaagtccaatggtaacgggacaatgaagaaaaaggtggtcaatcgactctccatttcctttgcaaagaatgcaccattgaggacagagggctttgtagggtcttctcaattgcaacttgtcattagtgtttaccttcccatgtgctactaaccaagcgagggccttaacctttgaagggacttttgagctttatagaaacttggccggaaggaacattaaaggatttgaaacttttgacaaggcatagaaaaaagatttcactgaaaacgagcctgacgaagacaaagaccacgctcttgagtctgatgaagaaggggaaagaagcacagaattaagggaggacattaatctctgaaggagatcaatttctgaatctgttagattgcggcgaaagttaaaattccaagataatggtaaggaattgccaaggacatttgagacagtgaggtttttcacagaaataactctgtagagatcagcaaattgagaacacaaagtttggtttccccaccaaagatcttcccaaaaccgaattctctccccattgcccaccactaggcggacaaaaggggagaactcctggaaaacttgagcaatagccttccaaggacatctgtgagaccatctaaccaccatgttggcgtcccatccattaggatgtgtcccatatatactcgcaataaccttatgccaaagaccgcttctttctctagggaacctccaaagccatttccctaagagggcactatttctcatagaagtcttcccaaagcccaaacctcccatctcctttggtctactaacaacctcccatctgattaggtgatctttcttcccttccccgaccccagaccaaagaaaatccctttgcatcttctcaatctttgaaactatagatacatggattttaaagagggagaggaagtagctagggatgtgagacaaacaagactgaattaaagtaatcctctctcccaaagacaaatagacctttttccacccatccagcctcctcgaaattctctcaaccactggatcccaaaagcctattgtctttgggttccctcccaaaggaaggcctaaataagacaaaggccactctgacactctgcactccaaaaccaaagccaaactagacaacacctcctgcctagtgttaatacctgaaatggtgcttttttctaagttgatttttaaaccagatacttgcccaaaaaccaaaaggataatcttaaggttttgaagaaggtccaaagaggctttagagaaaaatatggtatcatcagcaaactgtaacaaggacactctagtcctatccctccccacaaggaaaccctcagttatcccagtttcctcagctctaatcatcaacctacttagaacatctactactagagtaaaaaggaaaggagaaagaggatctccctgtctcaaacttctagaggccttaacccaaccctttgcattcccattaactaggatagcaaaactagaagaagataaacagcccctcatccaagatctccatttctggctgaaccccttcctttgaagcacatgatctaaaaagccccaatccacataatcataggccttttcaaaatcaattttgaagactaccccttcctcccctgacctttttttctcatccaccacttcattggctatcaatacagcatccaatatttgtctcccttccacaaaggctccttgagagccaaagattgtttcatgtagaactttacataaacgccctgataagaccttagcaattatcttatataaacttgtaaccaaactaataggtctataatctgagattttaaaagtttggcttttcttaggcaccatagcaatgaatgtcgcatttgtactttgatttattacccctttagtgtggaactcaaaaaacaccctcataagatcctcttttatcacatcccaacactcttgataaactgctatagtaaagccatcagggctaggggccttttccttattcaattggaaaactgccattcgaacctcctcttcagaaaacggtctatccaaccaaattgcactgtcttcagaaataggggcccaatcaatcccttcaatcttccaagagtcaccttcgggtttggaatagagattcccaaagaaatttacaatctcctcagaaataatctcaatgttatttaaagtctcccccctctcagaaattagagactttatgaacttcctgcttcttcttccagtggccactctgtgaaaaaacttagagttgcaatccccttctttaatccacttaaccctagatttttgtctccattgtacctcttccttcaataacaaatcctctaactccttccttcttaaggtcctttccgaaaccagatcaagatttaaattcccttcttgttcaattcgatcaattctgcctaagtccgtaagaatgtgctttttcctctctcttaaatctccaaagaccactaaattccactctttcaactttgatttaataaactttagtttcctcataaacttgtgaccttcccaaccttcaaccgtacactcttcccaccaatctctaaacttctctttaaactcaggatggagcaaccacatattctcaaacctaaaaggagtcggcccccattttaaaggattagtttccaaacaaattgggctatggtcaaaggtccatctaggaatggcctcttgaatacttggagagaaaaaagaatcccactcagaagagaacaaaaacctatctaacctcttgcaactaggatcaacttgcatgtttaaccatgtaaaagccgcattcctaagagggggatccaacaaaccactttcccttataaactcgtcaaaacacctcatgttgactgttaacctagagtcacccatcttctcagacatccctcctgatcacattaaaatcccctcctacgcaccaccttaggaaagtcagaccatgcaggtcttgaagctccatccaaaagtccttcctccacactgccttattcgggccatacactgaggttaacaaaaaaaacccttcctcatcagagttcaattttacagtaacagagaaagatcctaacaccttctctgaacacttgaacttaattgaatcccacaagatcataatcccccccgacgccccacaaacaggaagagcaacccaatccagacttttacctttccaaacacttctcacagacctcctatcccaaatttcatgctttgtttcctgaagcatcaccacatctgggttttgagtacttaaaaaccttctcacagtcctccttttcttcctagatcctaaacctcttgtattccaacttaagatcttcatgaaaacaaaaacaacccgacacaacccacacccagaactaatcctctcctcgagttccagagtcatttttcttctttcttctggaataaaccttgtccgcagagagagcactcttgttctctccttccacaccttttccattatccccgacaattctaaccctcaaactctccagaaccgactgaaccttgaccatcttccgaggcgtaagcccctcaacctgaaaaccttccgacgggagggtggaaggttctagcactgggaacgaagcctcacctgagacaccacgcacgtcagggttactgagagtttccctaaggagaggccggtctttaaattttcggttagaggtttctaggggaaccaccacaccttccgaacaggacgcaccaccacgatggttgttattcaccataggagagataaaaacggaaccacgctgaacggcgtagcttgactccaacggaatcgaagaaaaagagtgacaacgagaagggtgaaccaaagaaacagaggtttcgggaataaaatttggctcaaaagccctagacaaaggaagatctcgctcagatacaactgagaaaggagtacgcacctcattgatcaaattgcattgcagaatcccctcttctccctctgtctcgccggtagaaactttggatgtttcaaaaccagtggagagatcgctctttttggagtgagatttgccccgagaagtgtctcgatttgtctccagtgagccacctccttctaagattcgcttcggggtagaagacgcctcctcaaatctcggcggcccacttcttgctctgcgccttacggagactgaagatcctttcggctttgacgacacttgaagaagacctttcggcattttattctttgcagtgagccctggtcttaggagctttgaagacgaagatgcatctgggccgccattagaggatcctttatgggctggacccgctaggggcccaaaatctttcgccccaaattgggcccaatcagaacgggcttcaaaggcgtctggtgttggcccgatgttgcttcccgccgttgggcccaacatccaccttccctttcctttctcccccttaaccgattttgaatctgaagaacgaaaatgggaatgatgacgaggcatccagctatggcactcaatggtcctgtcaatagctcgtagcccctcaacgttctgtggcttctgcaagacgcaacccccggctgacctcagctcgtctttgctgcgattcgactcaggcctgatagagtcttctccgtcatcttctccgtcatcttctccggtgactgtaactgcaaccatgtatgtccaatctccatcttctacctctaatagcgctggaagcacgacatttggaagcatctccacccacaatgttaccttcctcaaatcaacaaacttcaaagatttcctcgccaccttcgttaccctcccccattgctgcaaaatgtgtctcaactgcaccttatcccacaggtggaaagggagacctcttagttccaaccacccccgtctaaattttccattagcgactgagttctcttttggcgaccatctcctcagagcaataacctctcctctcgctgtgaaactcccttgatcttgaatccactgagctttccttgcagattccacaaaaaaacaccctttgtaagcagaaatgggtgttatagacaccattcctttcatccccacccttctagctgtagcttttccaacctcacaccagtctcgtatttttcctttgctttcacaaaccacagctcttgcccattttccaattggcatctctgcaccattcttagttcctttctctgcaaccacatcagcataggacctctcacctctgtacattcctttgctctcttgaggctttttttgcttctctttcgaatctctttcagcttgaacagagaactcttggactgaaacaatcaccttcctaagattttcccacccacagccattaacacctcttggaacaactaagaccaaaggttttctctttgcaacgtattctgtgattttcatatatctccctctgctattaaaacatatctctatcagatgagtcctagtcttgcccctcatttttcgaatgaaacccctggaagcctccaaatccacagctttctctaactgctccactaaccaacccgtctcctcctctccaaaacctaaagaaaccacaaaacctcgacttctctctgttattgaaatccacgttcctccattgcaatcttcagacttcacctagaaaacctttctctccactacaaccgactgatttcgaatctcttttccaaacaagattcaaaacacaaacactactgccagagaaattcaataacggaaggtctgttcagctgttacttgaccaaacagtacatgcaacctcaggaataccagcagcatccttcagggaaacaccttcatcaactaacatgttgagatgtgaacttgcttgaatgcaaactgtttgaaacccagcgctctagttttttcctgatctgtaaaggaaactcctacgttttacatctgaaagttaactcttcactttattaagaaaaataataatgaagcttaggatgggatgctttttgctctttgatccataacaggtggcttaaaactaaattttggtccagcatctggtgtgaggaaacacctcaagagagtttatttattattattgcagtgcattgagacactgtggtgacagattactgttttaaggaaggtggttgggaccattggaacctaaggttcatgagaagaccatgattggattagaatgatgatatcattcttgccacatagtcagaaatgtggtcatgcaatgtaatcaaggaggataaggtactctggaagttatctaagatggttgcttctcagtggtatcctatggtatggctcttagttttaatctttttatatttttcccatgtagaagggctgggtcattctccgtccaagtttggcatatttccttcgggagtttttggagacaaaattttcatattagattaacttatgacaactaggatgatagccaatttgtgctgtttgtgcaaataggttgaggaatggtactgttgttttcagccttaggtatttcttggatgcttcaaaatcaagttaaggacatcttgggtcggctagttggcaaggaagttttgttgcaagagaaaaaggtaagtatggaatatggtcccggtatgttcattttggtattaatagaggaagcaaaatagaagaatccttgatggtctgtattggggaataagaggttatcctgtgtcgatttcatttacatattggtcagttcttaaggagcaagtagtcctatgtctttttagtttatattttgttttttaagtgctgtgtatgcctcctgtctacatggattgtgccccacttagatttctgttgatacatctaatatttccctatgaatggaagttactaattttcagccattagtggcatctagatcaggcactgatagtgatagtttactgagcttaaaaaaggaaaaagcattgtttctctgtgaaagtggcataaaagccaatataaaatatgtttttttttttttttaaattattatccatacaacttttggttgctgaatgaaataatggatattggcatttagaaccatgattcattgacaaggtgcaaagttgttaatgaactgaaatgatgtgagagctcttgaacccactaaattttgttccttgtttctcttgtctaagttgtgctttatattgcagtgca

SEQ ID NO: 12288 - DNA, 1140 bp, Vitis vinifera
  Intron number 8 from transcript GSVIVT01031806001 (locus G SVIVG01031806001) derived from phytozome v7.0 (chr-ID chr3 ; pos 4518957 to 4520096)
tgatctcaaggatttttgtagctgatcctgcaacggttagtacattttttaattacagatcttcgtttgcaagttcatgggtattggtaacatgtttagtgctttcattattgatattcatctgagcacccttgcattgtttatttatttgttgggctgattccttttatttttcttccacctctctttctctctctctctctctctctctctccccccctctttctctctctgttggtctctgttggtgtgtgcgcgcacttgttagaataattttttttgattggtgtgtgcttgttagaataataatcggattttgagtggaaagaatgtcatttcatgggacttggataaattaaactccacatttatacatgtatgtttgcatatctccatgtatttttaattatatatgtagtcaaatgtacagcaaaggagatatcctgaaagcctatttataaaagatttgagagactgtttctgtgtggcttgggatttcaacagaaaatcaaaattggtaaaagagttgttgctctttgcatgtactatagttggacctttctggtatattttggcaactaagttgaggagagtatgaattacacaatgtggtagtatgataagtcctttcctttttagtgttttgattatggggaatggagttctttttgtatcctgtcaggcttaacattcagtatttttaaaattaactatcatttatttggattcttgtttcttaattaacttgcaaaacgttgcaactgtatgtttatttgtacttctcttaagttttatgtaaattatatattctttgtagttattcatttgtcttctcttcatgattttttctggaaaaaggtggtggtttgggaagaaggtagggggctgggttcttgattttgctggagtcttactgataggatatgtttagaagaagactgcaaggaaagaaaggaaccaaaaaaaaaaaaaacctagtttattcctgccttgtagatcttgatgcaatgacttgtctgtgtagctttgtttccctgatgtaattaaggatataagacagaaaattgaactctgaccaaatttgattcccttgaatatcaaaatctcaacagaggataacgattgctgagatcaggaacc

SEQ ID NO: 12289 - DNA, 34267 bp, Vitis vinifera
  Intron number 1 from transcript GSVIVT01018446001 (locus G SVIVG01018446001) derived from phytozome v7.0 (chr-ID chr1 6; pos 14998444 to 15032710 reverse strand)
cagaaaggaaggctctacgagttttccagttccaagtacgtttactaaattccccacaaaaatgaaaaaataaaaaataaatcctatttttcttttcagtactgagtctcacagcttcgtaagttgtaattaaagattccgtgagtgttgttatgtgtgagactgcaacatggtatgggttgttgcactgccaaagacctagtgtaccatgatctcatgctttgtgttcttgaaagctttttcctctctcgctctaaccatattcctttgtgggttttcaactgtgaaaggggccgagaaaacccttatggtaaaaccttaatctgaactagctttagctgtttggttctccatcggatcacatttcaaagttcatcctgaccggagttgatcctttaggaaagttgatgtttctgaattaccttgtttgtgtttatttaatgctgaaaaggcacccaaattctaggcttctgactacatcatttcatttccaaaacttacgtaccctccgggctccttcatcttatctagggtttgtacttctgtactattgcttaaaaagatattggtcaagaacttgaccaaccgtttttagtctttggattgcaaagctggaaattagccatgggttcatgatctcttttcttttcttctataattacttccattcctaggattctcaagtcaaatacaactctattctattatcttttctctttctcttttattgttttttcttttttgtcccttagttgttggctaatctcttaatttcactagttaacattagcaccatttgaaatttcttagggaggatttgatagtttcatgttcgtactccattttttcatgtcatcatggacattttacagcagtgcaaaaaagcatgtgtactcctttttaatttttcttacagattaaagcacccatttcaagtactattttgtctattgaatgatatatttacatgtgcatgttatcatagtactaaaggaggtcacttcttcactgtgtgtgtggtgtgttgtcccatgcccacttgtgtctagagagttgggtgccttcatgaattattgtgaaaaccataatactccagaacttaatttgcataaattataagatagaaaaaaaaaaattatgtcaagaaacataagatgaaaaaggattatagctactaatgataccagattttgctgcaagtttctattttctcaagtgtttattttgtatatgctagagttaatttagatgaatgcaagtacttactaaaagatcaaagagaaaaagctaaagaactactacattttggacttataaggtcagaattagtacaaagacaacagtttcaatgccatagggtttcattaccctctgaacaaattgatgtgctatccttttggtaagtgcatttttataactaatgttgttcatgtatatacatatttgtttttgctttattattgtatgtgtatccttgtataacaaatggtatatttaatgtttttagttcaacaaatttgtgagtttttttgtttcttttgtttctttctttctttcttctatatttttaatacgtctgtgctctaagttgtttcttagtgacttttgttccccaacgcaacagtaaatactgagatgactacatggttagaagagtggcaactagcaagagcactaggatatattatggaaaaggtttagctctgagcttgatagatcaaggacgaaatgcaaaagtgaacctaactgcaaaatgggtttagggagcaagaaaaatgtccagtaataatataattttagaatcataattgctagagttcattagtgtagtaatgataatgtatttttggagttaggtgtttgatgaaatgccttgcataagtgcatcaaaagagttaaggtatccgtttacatgccacttctattgcaacttttgggcctgaggaattttatgattttcccttcttagtgctctagtaaaccatctctaaaagtcaaccgttgtcttgtcgaaggatctcctatccaccgactatgatgcagcctaagacccaagttaccctggtggttagctaaatgagtcccttccctctctacacgatgaatttgtgcttaatatatatcgagttgcttcgaggttccttgttattactatttgcccatctaatcatgttaagagaatcactttttgtttgatgtgatgacttgaaaagagacaatggttggacaaagttatggtcatgcagaggagtttctgctgctgcaaaaggtttcttcttttatgcgtagaagagagctgttcaatttcacatgacagcaccattgccatctcttttgactgaccgtaatctgaattcctagagtagccttccctactcctttaaagttcatcttgatgtgatttggacaggaaactgccaagtaaatatatttgaatttgaattaaaaaataaaaaaagaaaaaaactaatgcaataagacctcgttatattcatcctcaaaagttcatcttgatatcacttgttttgattagtctgcttgatggtttaagatgttctcttaggttatgactactaggtggttgattattttcgcgttagattttttttgataggtaaaatagagaatatattaaaagagcttaaaatatttcgcattatattagattcgaagtacactacacctttaaatttatttcttttataatcttttaggatatatggaaggcatataatttctccctttctcctttttttctattcagttttggaacccaagaggctaatcccctttctaacaaacattatttggaattcttggaattcatgggtcccgtccaaaacatgcatttttctctgaaagtcaattaagaaaaagttttgatatcaaattagctctagaaaaaagggtggcagctagcaaataaacattttctttataaactttagggggagtctattgatcattctactttactataccaaagcaaagattcattagcaactattgttttccctatttagtgtagtttgggtgatcctttcttcggtgacagattctctattaagttgacatgactcttttgtatgggaagaaagggaagaaggtatggagagccactcctttttgcattttttggataatttggtggaaataagattgaagagcttttaaaaataagaaatagattgatcaaagataaggtagttttctgtcagttatcagggaaggatccaagagaacaaataacatagttttctattctatttatgaccttttctgaattcctatagtctctgtcacccccaatcttcatcctagtaatctctttcgtataacatgttaacattgtccaactaccgttgagtcgaaatcttgttgccttgcaagtccacatgtccatctatagattttcttatgacttaaagcaatctgttggtgcaaaacccacatcaaatcacagtctactaaaatcaaatttgaatgttttctgtcttcagttatagaaagtgttctgcattttttttttttttgtaatcttttatgtttacctttctagtgttattactgcaaccacattatttgtaaatcacacagtgaaaacttttccttgaacttgagtaatgaattcaaatgtattagaaatgcagaaagaatggaaagttagaaaatcggtatcaacctcaagacatgaataagacatttaattcgtctcaccatgaattgttttccaatattttctttgaaatgatatataagtatatgttcctgctttaagcttcttaatcatcttcaagattaattggaaagttcttaatttctcattttactctttaacttctttactttctcagcattccaaatgattacccatcttgagcatccttgcaatgaagtcataaatagccaatcactctcttttcatctgcaatagttacttctctctatctatctatctattgacgagttcaagagtttattgtagattaggacatcattctaaaaaataaataaataaataaataacatatactactacaataaaaaaaattggatgcattcacataattttagaaagggtcagcataatttatgactaaagatcacatatagcttctcatgtattcctgccatgtctaaggctgttggtacagacaactcataggaaaagttttcaacaaggcctatagtcagtgtctattgtaggaaccatgtttgataatcataatcgtatactcctacagttttcaagacaccagtgtgcggtccccaagttaaaaacctataatcccttggttcttatgtagtaatccttctttgtcagtccatccaattagttcattatccttttctatcccttagagattactttattgtcatgttctattaggagtgatcatgtattcactaattctttattatcaagctctaagtaaaaacttgtgagattaggcatgctaggagaaagaagaggaaggagaaatgagaaaaagaaagttgaaggtggtgtttgtctaacttcatctccttgttataccttctcatctatttatattattatctaggattacaaaagtatataccccaaaggatgaatacctaataactgataagtagcttttaactaaatataacaaagtaaagtcatctctaacaaattttattaatcaatattcaaactgcattaagctgtctttttccagccaaatctatatccaagcttcagactattcatatccacactgcttattgcagagttctcagttcattggagaagtctatccatttttttctaattaaaacccctgaacgatcaaatgaaacccgtcttttcgagttctgggaagaagaaaagcaaataaaagaacagtttggcaacagacttcatagagtacttagttatgttaatccttacctaaggtttgtaagaagaggaacaaataaaagaaaactttgccataaccttcatagagaacctagttactgttaatcctttcaaaggcatgcttccaagtaaacaaatgaattattattacgttatctccagatgatttttttgagtccacctgcttcaactctttcttttacaactctttggaaggctgaccaaatattactttgtgaattcttgtttgattgagtagatggacagcataatgaagacggaaaacttggaagttcatactaggttactactcattgaggcatctataataaaatcttgtttgagggaaacttaagcataaattcaaagacaacacttgggttaaaggattctgggagaatcaagaaatattgtaactagaattatcaagatcccactcaataacaagttctttacaaggtgaaagaggatcaaccaatatggtcatgtgaccactaaggtctagcaatcagttgtcaagatggaagcaaattgagaatgaagacataagcgactaaccgtgttagttgattttctaagtgatgactgattctttcttctctatccaatgtttggtttttgaattatcctattcatctgtgtttggaagaatgaaagcataatttttggaagggagttactttcatattgaaatgcttatggctccatatagagtggagtgggcagtcatctagcttgtggatgattcccatccatggatggaggaatcaagtaattagaagctcattttctcaggttcctgagtttgtaatcacaagcctttcatataatttgcacacatgatattcttctagactatcatgtgttagttcttctatttagatcttaaactaaattaagtcatgaaaagaaaaacattaataggatgaaccctggtacgtgataagtattcaaggaaacacttagaaagaaagaaacaagaggaaaagctatggccagccaaccaagccaccactaaaaaaagtcaaagataaatttctctccttaatgcattgaaagggatgtaatctaatggcttttgagatttaaacttgacatctcctcgtattcttttcaccccatgcactagaacaggatatgtgggagcagataaaatgttctttgtcttgtccttacatacaacggtgtcaacaaactagatcttctactatagagaagggcaatgcacaatagatgttaaaaaccaagaaaagttaggacctgtagggtactagaaatctcaatgaaggagaatattattagctagctccttttgcttcccacataaacaacacaatttttcagtctcctttgtattggctgatcaatggtgagaatctttccacaaattggttcccaagcaaaagaggaaaaaagaaggtctcacctttgtaggagctccaccaaaacaatgatgatggaaaagaaaaagatgaaggcttaggaatgagaatcaattagaaagactcaaaatcacccctttggctccctcgaccactcgggagtgaatccttgaagaaaagctgtgaatgcaagtgaaaaaatacaccatcatcttaggcttctaaagagaaaaaaaagttccaatgataaaaaagtaactcattaagctcttgtagttagcaaagttggccactttatctgaagtcaaggaaaaaagacctaaaaactgatcatttgagaagcctttcccacactattcaacacttcccagcctttttgtatgccttgccaaagctcacaacctaacatgccacagcctaccctattgcaccacctttttccaaattccccaaacttctcattcacccacttcctcaattccactttcaacagtgaaccttaagagctactctcgtaataaggctttttattaaggacaaactagtttctaataaccagcctctccacattacaatgcaaactgtaggccacctaacccagtggagccttcttccttcttccccttcttgccacagaatgtaggtattctttcaaaatgctggggggggggcaggggcggattcacaacagctaaagacttcaaggcttcagcccatctgcaaaccactagtgtgctgcttatctttttgtttccaagtacaacttattttctttcttaaaatagggatatctacataaaactttgttgttgaataagcctactgattaacaatgagcagaatcctatttgatgaataattactatctcaatatataagaagctttctactttatgatgattgataaatgcacatacagcctctaattatgggtcaatattcagttgatggtttaagatatcccaagttcaatatgatttatatggaaaaaccatttgtatgtatttcaatctgaaatctgaatgtggcatcagttctttctctcattctataattgatttgattgcaataatgaatctatttcttcacttctttgcccaataaacgagatggagagtggcctgatatttcaaattacataaaccaatatttgtgacttgattatttggttttgaataaccatgaagcctaccttcttgtgaattaaatagatttgaacgaaaggatttgtgtactttattatttgtcactaaaaggttaaaaatatatcttggtttggcagaaagaaaacaaacattcagttgatctttaattgtgtagatcaagaacaaggactacattgttggatctacatgaaccccctataatacccataaatgacttttcttttgttggaaatgaacattaccatatgtgatatcaaaagcatgatacacagtgtctaatgcattcctccccaagtcaaaatattttaaaccctcttaagttagatgcatatgttctcacacaactaaaaagatcaataatttcaattctatacattgggggaatgttcacattgtgtatgactttcacttgatcaacagttacataacatagggaaagtagcaaaaaaggttttataacattcttaacattcataataaaaagctcatataatttttaaaagaggaagccaaactatttttctatagaatacaaaaactggttttgcatgattaatgacaatgcattcacctgactttctatgatgtttgcatttttaactgctgaaaggggcattatcgttttttggatgtttatatatatggcagttctaatagaaaagctactatactcgatattttaaaagactaaaagcaactttgaggtggtgtaagaaaatgaggggaggtgctagtcttcaggtggaacgaagtgtagcactcaatttaggaaaaaaataatcaataaattagaaaaatatgtgaataaaatcatttaaaaatataataataagaaaagaataaaattcataataaaaacttaattgcttgtcattttcaatagtttataatttagtttctctttttctccctcacaattgagagctctctcatgataatcaatgctattgataccattcattactaggatcttacaagaaattctcgtcatatctaattgctctatcacctcctaatcagtgttaatgcctacccattctttttcttcgtcttctttatccaccaatcacaatcatctctttcctttatctattagttataagataatgattatatataaatatataacactcctagtcatggagttgtaacttaagaaacatggagtctaatgtccctcgcattgatatgctcccatactaccacccaagcatcctttcaagtagctataacatacaaccatgagaaagaagcactcaaaggtgaatcctttcaaaaaatttcttcttctcttgcataccataaataaataaattacttttgaaaactccccaccctccttattgccttctacaaccttacatcatagtgtccccttaccttcataaaacatcatccctcctttcttccctaaacttacctatgataacatctttcccaagagattctctttctaacgcaagcctaaaactcacttgttaagggacccaagtttaaaatgaaaaaatatgaacgccaaatattagaaaatctgtcaacttgggtgatagattattgaagatatttccagcccatatgagctgcagtaactgtataattgcacaaagaatcccttaggattttttcctttcttagcattcatcacttattttatttatctttgatagcataatcttaggcattatttcctaggctatttttagacaattattctgtatatattcatatgtatttttctacaataaatgcaacaaaaggtatttttacaaatgcttctaaatctgaataaagcatagtatcaaagctagaattttctgtcataatcattagcattctcaatgtcctgtgccttcattaccaagaatttttttagaatatatcccattagtatctaaccttttgttagaaattactaccacttcaggttaggcttccattgcctctttttttttttttttgtgaccttcacaccatttcttcccctcataatgtcaaacacttcaacagttgattcctcgatatcgagccaagcacaatccaatagccaacaccactcattaaatttcataatatagtaggatccttcaaactcaacgggggaaattatttagtgtaatagtaggtgaagacctatattaagggcaaagggaagttgagctatctcattagatccatggtgatcaaggatgatccaaggtttgttgtatgggagaaagaagactcaaatcatgtcatggtgttggaattctatgtagctagagataagccacacatgcatgttcttctcaatagccaaggaattctgggagcctgtgtgtcatacctattctaaggtaagggatgtagcctaatgtttgaactaaagacaaggattcacaataccaaaaaaggcattatttttgtaactgagtactacaatgtaattagaagtctttggcttgaacttgattaatgtcaaaatttaagaatgaagtgcagatagatgcaataatgcattaagaattcattgaacaagagagggtgtatgatttcttagcgggtttgactatggaattggatcaagtaaaggtccaaattattagaaaagaggcacaaccatctctaaacgaagcctttgcaatcattagaggagaagaaagaaggagaaatgtaatgttagaaaagcaccatggacaaatctactttagccatctcaaaaccaagtggaaatgaaggaagtactacaactaatgttgcaaactttggtagaaatgaaggtaagaaaacaagtgaaaaaaacattttatggtgcaactattgcaagaaaaataagctcacaagggaaacatattggaagctccatggctagcccctaaatttctttaaggggaatgtagaggggaaaattttggctataaatcacaaggcaatcttgctgaaaaaattgaggaaaatagtgggaagaaagacttggctaagaaatgaagcccaataaagaggaaattgccaaacttaaacaattcatttctaagctaggaaaactcgagggacatgtcattttgctcaaacatgtaagtattcattctctttaaatgcctttaagatttagttttccacttcttggattattgattcaagggcttcaaaccgtataatcaattcaagggcttcaaggtaagaaaacaagtgaaaaagactttttatggtgcaactattgcaagaaaaataagctcacaagggaaacatattggaagctccatggctagcccctaaatttctttaaggggaatgtagaggggaaaattttggctataaatcacaaggcaatctcgctgaaaaaattgaggaaaatagtgggaagaaagccttggctaagaaatgaagcccaataaagaggaaattgccaaacttaaacaattcatttctaagctaggaaaactcgagggacatgtcattttgctcaaacatgtaagtattcattctctttaaatgcctttaagatttagttttccacttcttggattattgattcaagggcttcaaaccgtataatcaattctttaaaagtcttttctagttatgtttcgtgctcaaaaaatcaaaagatcaaaattgccaatggtaccttagtaactatggttggtcaatgagatgtcttccttaacattttctctaaccttaagaaatgtcttatgaaaaatgggtattactcaaataacacttgaataataatcgaaagtccaatagggaacctagagagggggtcaatttgtgatttaaaaaattttaaataaattatttataaaatatgtctaaactttgtttcaagattatggcccaaataagaaattgatttttatggttaattgatattcaaagattaacaacatatgttgagatatgttagggacaataataataaccatcggaataaccaacttaacaaacttaataataagctcaacaaattaatcaataatgggttatgggtataaccaccacaaccaccaagataacaaatcaactaacaaaataaccaattaaccaatcaaactgagatattaaaagtcatcaactagaaaataagcaggaataaatagatatacactttttaggaaaaccctgcaatatattaagattaatcaaattaacctaatctaagcactttaaacatatatcaagtataaagaaatagacaatgagacttatgattttttacgtggaaaactcctacaaacttgtaaagataaaaaaaaccacgaggtataagacttaccaatctaaatctacgattcgaaatcaagttacattaatttacctgattgctttaacctaaagacttactctctagcacctacaacttaatccacatttgcgatgcaacaactccctattgctccctagtagatccttcattccttctgaaaggatttaggtcttcaaccaacaattcaaatatctaaatccttgaatgagagatcgggaaggatgtggcaataaggctttctctcaaagagtccctctaaagaataagaggtctctaaactcttaaatctctacaatttctaatttgttagctcgaatctctaaccctcaagggattattagagaggtatatatagacataacccaaaagagtcccgatattagagtttgaatgaaattcatccaaaatacgtttctaaactcgacaggattgacttgattacatgagaggacttaggccgcttgagagggattaatcacttgagcaacccatgcttgttgaaaaatcattttaaaaacattttaagtctaaaaatgataccgaaccctttatccctcaaataagccttatatgccacaagtcaaacatttttagacgtacttgtgattttccaattagatgaaaaacaatccttgatcttcaatggagatcaagtcattatttaaaaagacttttatggtcaaacattaattgaaacaaaattatcaacaataaacaagactcaatgccctaacattttacatgttaaaaaatattagtaaatttgttgtctattcctcaaattattaaggacctaaattgctaagccaactttacacaatctgaatgcttttttaggaccttcttacgaggaaagtgattaggcatgctagagaataggggaactatatctctttaaggctaaaagtgacatgacatttttttgtcttgattagtatgcaaataataatacataataaagaaagactggaacttgccaacgtacactaggaatatacaaagaaagtcaagcaaaagataaaggaaaagaagtgcagagaacaaaaccacctactcacaactacttggctcttaaccaatctaccaaatcaacctaagacaaaggcaaaccttctacatgagtcttaacaaggtccaataaggaaaacaaaaaagcagacttggttatcctactcctcatacctacttatcaaaacatcctactctagcctaggaacaaatatggctattccattttcttatttgtcatccttcttatttattgttgaaaaaaacatttcctaatatgtttgaaaaactaaatgttcaaaacttccattatgatgtttgtaagtatgctaaacattattttgtgtcttttcttttaaataatgacaaaagttttgttccatttagtttgattcatacagatgtttgaaaatctgctaatgttcataagatttttgtggtaagccagattgttttgtttgttaatgattgcactcaatttacttgggtatatatcatgaaacaaaagttgaggttagcacaatcttctatattttttataacatactaaaaatcagtttgatgatcaagtcctaagaataaggtccgataataaaatagagcttcaatcaatatcttacgccttatctccaaaaaaaaggaatcattcattatcctcttgtaatgatactccctaacaaaatggggtagttgagcttaaaagtagacatctaatggagatcactaaagctttgatttttccaatgaatgttttaaagtcattttagggagaggttgtcctaactactatatacctcataaataagttaccctctcaaattcttaactatgttagccctattgaaacactttatatatttttttttccaaaatttgacaattttgatcattttccccaaggatctttgcgtgtgtagcctttgtatatatccatgctcaccaaagaagtaagcttgacctaagaggcattaaatgtatctttgttggtttttctcctacaaaaaaaagttacaagtgctatcaccaagctcctaaaaggatttttgtcactatggatgcatccttcaataaaaaataaccatttttttatcctaatttttatctttagggggaaccttttgtaaaagataaagaattctttcctagcccacctactcttcctatcctagagagctccaccaaaactgtctaaactaagggatcagatttttccatagcaatcactttagaaaatgcctcaatcattgcattggtcatgatagatttttctacaacagttactttagaaaatacccaagaaattgccccaaagaatgccttcgaaattgtaccaaaatttatccctaagttaccaataaaaaattcatatttgaatcctatctgcaaaggtcagagatggaggatcttcaagtgccactcaaggtctattcaaggaggaagcaactggccctagaaactccatatgtctcaatcattcagccaaaaaatgatattaatactattgatcctaatgtacaaacaatagacaatgattttcttagccttaataatcttgatttgtctattaaccttaggaaagaaaaaagataatatacttagcaccctttgagccattttgtttcccttgaaaagctatcaccttcttaccaagactttgtctcaaaaccaaattttataaatactaaaaactgtttaaaagacacttagaaatgataattagaggaaaacattgataaaagaaatgaatgcactagtaaaaaaataacatatggaggttgttgattttctcatgggaaaaaagaaagtgagttgcaaatgggtgtttaccttgaagtttaaggctaatggcacactagaaagaccaaagcaagactagtagcaaagaggtacactcaaacttatggaattgattaccattgaacctttgcatgatgaacactatttagagtctattatccttaaccactattctcgattggccattgtaacaactaaatatcaagaatgtatttctacatggtgacttagaagaagaagtctatatggaagtgccactggggttggaagaaaattttgaaaaaaacgaagtgtctaggtttaagaaggctctttatggacataaaaagtcaccaagagcctgctttggaaaatttacgaaggcaatgaaaagtatgggaaacaattagagtcaagggaatcatactttattcttctaataaacaaaaatgaacaaggtaacaatccttattgtatttgttgatgacatagtcttaacaagaaaagaccctacaaaaatggagaaattgaaaagggaactaactagctaaggaatagtaatctcacaacaagaatacattctatatcttctaaaatagacatgaatgagtggttgcaaaatgacaacttcaaaagaaaaatctcacgagctaaatgaaggaaaaggaagcacttcggtaaatgaagaaagatatcaacttctagtggggaaattgatatacttaactcataaaaggcctaacatggaagcagtgtttatagtgctaaagtacctaaagttttcacctggacaagacattcatttcaaaagcggagggagtttaatcctagaagcctacacaaatgttaattgggttgggttaataacaaattgaagattcacatcatcgtattgcatgttttcgaggggaaacttagtgacttggagaaggaagaagcaattagtggtaataaggtctagaatagaagcgaaattcaaggctacaacatacaaaatcagtgagtttctttggatcaagataatactgagtgaccttggaatcaaatggaaaaagcttgtgaaactctattatgacaataagttatccatcaacattgcacacaatctagtgcaacatgatcgaactaagcatgtaagtggactaacattttagaaaagagaaatttgaaaatgggataatttgtacttcttatattcctatagaacgttggttgatattctaacaaaggggcttcctacttagtcattccaaaccatcttaagcaaattaggaatgaaaaatatttattcccttagcttgaggggagtattggaaaatttgccaattagaaaaatctaccaacttgggtgggcagattattgaaaattttttcatctcatatgagctgtagcaattgtatagttataaatagaatctcttgggattttttcctttcttagtatttttacttattttatttatctttgatagcataatcgtaggcattattttctaagctattattagataattgttctatatatattcatatgtatttctatataataagcacaacaaaaagcattttcccaaacacctaaccccactcattcacccttacctcacttttttttttttttttttatataaataaacattctatcaattcaccaagtaaggcttctcaaatgttgtcatttctcatttaaaaaaaaaatccctttaaatcatctccaatctcataatcattcttcttagaatgtcaaatagggttacaaagtaaatgggaagactagacaaggtacttttgatcaaagttaaccaccccattttctttacttttgaaacctctttctaatgaaaacctctaactacacttgttaaggagtgtgaacaaacattcaaccaattcactaagtgaggttttttcttaagtgttatacttcttcttacaaaaatccttctgaatcttttccaatctcaaactcatccttcttagaatgacaaatagggacatgaaacaaatgggaagactagacaagatactttttatcaaagttagccaccccatttttttgcttatacattgcaagtcttatttgaaactgttttgatgcaaacctctaactccaattaaagggaaccatgtttaaaacaaaaaaaatatgaatgttaacccccaaactattctagatttataggaatctcccaaatggagacctagatatgtggactggagcatccaacctctataccctaatacaagcaccagttctttcacatttcaaacacctccaagtgaaattaattcactcttttttggattgaccttccacctagaaattgcctcaaaccatattaaatccaactaagatatatcatttgatctttgcatgcctcataaaaaatcaaagtgtcgtcaacaaacaataaatgagacattctcactccctcgttacctctatctctcaccttaaaacatgagataatccctcgtctctcactttctttagaaagcaactaaatgtctctatttcaataaagaataaataaggaaaaaaagggtttatctgcttcaaccttctaaaactttgaaagaagttagcaaaagtaccactaaagagctctaagtatctagatataaggatacaccacttaatctacccaattcacttttggccaaaaagtattttttctgaaagttgcaagcaagaaaccctaatttacattatcataggccttattgcataaaattccattagaacaactcttcaaccttgaatcaatggcctcatttacaataaaaataatgtcttgaatttgtctctcctctacaaaggtatgttaagagttagagccactctacctaccattttcttgagtctatttgctaacaattttgctagtatcttgtataggttctctaccaatctaagaccaagaaagtatattaagaccaagaaagtagtatttaaacttctttcaaagacacctttcttatagaattcctcaaagacttctaatacttaactcttcaatcccaacatagttactaaaaggcttagtaaactcacttgctcttgggttgtatcctcattcaaagatgagaggatagtgaaaactttcacctctaaaaaaggcatcaaactcttagctttttcccttcccaaggaaacaatgaacatcctattattataaggtttctaatatctggactccacaagaggacttcaataagacttagtcacccactctttgatctcttccttactagataaccaaacctcattcactcttattctagccataaagtttattcttttatgcacatttgtcatcttatggaagaatattcaatttttgtctcatttctaccatatctctcttgacttttgcttgtaagaggtttcttctagctttgtccatttactatactcttctaaaaccattcttttagcctcaaccaaaggagcttctctctccttagcattctaaaaactatcttattgaacgcttctactttcatgatcgacacatttctaaacacctctagattccaagcttttgagtccatcttcaagcctttcaatttagaagctaaaataaaattgttaaagcctctaaatgtattatccaatcactaatttttaattaggtatttgaaacctccactttaagccacatattctgaaatctaaagggagtttttcccctttcctctccttcatgtaacaatataggtaatgactagacaccaaccttaacaaaacacgttgtaatatcccactaaaatgattctcctactcttttgatgttagaaaactacccattattgagatagatcaattgttcatggccccacaccaactacaacgtgttccatttagtaaagatcatatgggttcaaatcttcaaaaatctcctcaagactaaagacattataatcaattcttcattttccttgaaatatatgaccatgttaaaccccttctcccttaataaaccaaggatcatctcacaattcttcaatgtaccttaattatgttgaagaattatctatctcccctatgaacaggcttatacactctagtgaatggctacctaggtaaaaccatctttacaacttttttttttcaaaaaaaaaataataataaatgtcttttctccctttatttctaataacgtcaacaccctactctcctaaaaaaccaccataccactagatgacttcattgcttccacaactctccactctagaaatcttcctacacctatacttttcaccaattgtaatgatatctcttgtacctcagtttttttttccaagcaaaccatattagccttttatattcttatcaaggatataatcaccttatgcttctccttgtcattaacccctttaacattccacgattttaatcttcataaagagacaacaagctcctcttgactaacaaaatagccttatctacaaagcaagatgtcatagatgggcatcatcctccttcatcgtatcaaagaagaagccatagccaaaagcttcttgaagttggctttgaagctcctagctcactagtctttccatccgttacagcccttgaggatttagaccctccaccattgaacaaggctcgatccaaatttttaaagcccatctttaggctattaactttattcactaagcctacaagcctcaacctaacagaatccttcctatccacttaagccttaagcctctcaacttactagccttgttactacccccattactctaccgctcttagcttggcttctaatatactggagcctactatagactaggtttcactatttgacaattctcagtccttattactaacgtccactccactgcaacaacaccaaggaattgaggccacccagatttgaactcacctccttatggacccaacctacacacctaaatcatccatttttatagaaaccatgtctttcacaacctcctttgaataagatagggacatgtctccttcttttattttaaataagaaactaggtccccccctctttgcatgatcctccattcacattatcccttccatcctcaccttccatgacctctatcattttgctcacaagacctgaaaagcttttgcaacatccatggtggaatctcccatcatagttgaatagaaaatctcttaacaacccataacaacctatattgttcttgatacctttttctcatcagttttcataagaattcttgttcaccacaaattttggctttctttaatatcttcatctactataacaaaagaaaagaaaaaaaccacaccaattgttcaagtttcaatttaccatacttcctaattgtatgcaaaaatcacttataaccatgtgaaaatctttcttaaagcaaaaatcaaaactagtggttgccatatttccaaagtgtttgggaaattctactttaaggctactaattcaaagttgcttctacccaaatatgaaccaatgtccaaaccaaagtgcaaaaaagaataatccttcttataatttatgaagactttgtaaatgatgttgaagtgatattcttgaataagttaggggtaaagtgtaaaacatataaaaagttaaaggggtaaagtgtatttaacccctaaaatgttatatgatgtgattgatatttgatcaatctaatataagattaaaacattctaggtaacagttaatctattgcaatcaactctttagccaattggttcaaaacgaaaggtattgacactctttaagcttccaaccctaatttttttaataaaaatatagcaatataaaacttggtcaatcaatttttttaattcatcaaccacctcaaaataattaccatttattctagttatcttcaatcgcaaccatctttgaaatggcaagagcttgatagaagatttgaagcatctgggttgtgagtatataatggaaattttaacccaaaattgccaacatacaaagacactcacaatgatgagggaaaaccttttaaagtttattcaaggaagaaatagaagacctaagtaaactttaagtaggattaatattaattagaattgaattgagattggtatttgttggagtctaattaggattagctagttgagttataatataattagaatttgagtcatgataggttattagagtcctagtaggctttggatgttataattagaattagaatcataataggttattagagtcgtagtagactttgaatttcttagaaaaacctataaatatcaatgtaaattaaagggatgaattgatatcaatattattatattttcttttattgcaaggttgcaaccctcaatggtgagactccattgattttcttgtaggtgaaactcctagaaggccttagtgagactctaaggttttctatattttcttcatcgtttcttctttctttctatttcttatcttatacttttctctaccataaaattaattccttgtttctctctttacacccaaaaaaataaaaccctagtccacctacccttgagtagaagcaaccatcatagggttgtcctacatcaattttggtatcagagccaaagttcttggcttgaaggcatatgcaattaaggagcggagcaacttatgcaagcatgagttccaaaaaaacttctagcaatcaaaatgttgctacaatacgcttagaggaaatttcaaccacacaacaatcccatcaagatgttataatacaactaaatagcaaacttgatgagatcatgaagttattagaaaagagtcaagaaaaatgaccaattgaagaggaaattgaaagtcatcaatttagataatcgccaaatcaatcacgcgaagaacaagacaattttatgatggggactcaaagaagggccagactttttgagctagatgatcatgtgactaaaaaggtacgtcttgaagttgctgaattttatggaaaactaaatccaacagcttttcttgattggattatgtcaatggaagattactttgattggtatgcaacgcccaaaaatagaaaagttcattttgtgaaggcaaagttgaaaggagcagcacgtctatggtggcataatattgaaaatcaagttcatagaactggccaaccacctattgacacatggaatgagatgaagttgaaaatgaaggagcactttctcctaactgattatgaacaacttatgtatacaaaattgttttctcttaaatagataccaagtctgttgaagaatatacagaagaattccatgaattaagcattcgaaatcaagtgcgggaaagtgatgctcaacttgcagcccgctacaaggctagacttcgaatggagattcaacttgagatgatagttgcacacacgtataccgtagatgtttatcaactagccctcaaaatagaagaagacctcaaattttgggtttccaggcgttcaagttcacaaattgggaacactttcgccaagaagacaacaagcaaacctttaagcacatcaaacttcagaacttctaatcatgtgaatggtgagggcaacactcaacaaactacgaatgtggctcataagaatggtaataagggtaaaacttcaatgagtattagagatagaaaagtagacatgactcctttatgctttaagtgtggtgggcatggtcattatgttgttgtacgcccaaccaaaggtttacacttttgtgttgaagaaccagaatctgaattggagagttacccaaagaaagaaaagacctacaatgaagatgaagttagtgaagaatgtgactactatgatggtatgacgaatatgcatagtcttgtagtacgacctttattaactatcccaaaggtaaaaggagaagaagattgacgacgtactagcattttctaaacacgtatttcttgtcaaaggagattatgcaccatgatcattgatggaggtagtggtttgaacatagcttcgcaagaacttgttgagaagctaaaccttaaagcaaagagacatccaattccattcagagtagcatgggttaatgacacctttatcccggtaagttttcgttgcttagtaacattcctttttggtaaggactttgaagagtctgtatggtgtgaggtcttacccataaaagtaagtcatattttacttggaagacctttgctctttgataaaacaattcaacatgacggctatgaaaatacatatgctctcatacacaacggacgtaagaagatccttcgtccaatgaaagaagtccctccaattaagaattcggaggaagaggcacaaccaaaaaaggtacttactatgtgtcaatttgaaaatgagagcaaggaaactaaagttatttttgctttaatggctcgaaaagtggaagaatttaaagaacaagataaggaatttgttttgtattcgaatcatgaagccttgtgatatcttaattctcaaaagaagcttaactctcaacatgcaaaatggagtagttttcttcagttgtttacctttaatttaaagcattgtgcaagaattgaaaataaattagttgatgcccttagtaggaaggcccttttcttagtaaacatgtcaaccactacaattggatttgaagaattaaagcattgctatgacaatgatgctgattttggagatgtttattcctctcttttgagtggttcaaaagcaacacacattaatttccagattttagaagggtacttgttttataaaaatcatttatgcttactaaggacttccctacgtgatcatgtcatatgggaacttcatggaggtggaatgggtggacattttggacgagataagaccattgctttggtggaaaatcgcttcttttggcctagtttaaagaaggatgtttggaatgttatcaaacaatgtcgagcatgtcaagtaggaaaaggttcaaagcaaaatacagggttatatacaccgttaccaattccatccaaaccttgggaagacttgagcatggattttgtacttggattaccaaggacacaacggggctttgattctatatttgttgtggttgacagattttccaaaatggcacattttattccatgtaagaaggcttcggatgtttcttatgttgctgccttgttctttaaagaagtagttcgattgagctatttttgaaaaaccttgtggaccaagctaggtactcaataaaaattttcaagttcttttcatcctcaaactgatggacaaacaaaagttgtcaatcgcatccttggtaatcttttgagatgcattgtgagaaatcagttgagaaattgggacaatgtcttaccacaagcagaatttcctttcaacagttccactaatcgtactattgggtactcaccttttgaagtggcagatgggttaaacctaagcaacctgtcaatcttataccattgcctacttctatttgcactagccaagatggtgatgcatttgcacgtcatatacgagacatacatgaaaaagtacaagaaaaaatcaaaatcaacaatgagaactataaagaggcagcagatgcacatcgaagatatattcagtttcaagaaggtgatctagtgactagaaagatttcatctaagcacatatcaaaagcttcaagctaagaaaatgggtccatttcgggtactaaagcggttgggtgagaatgcttatttgttagagctcccttcaaacttgcattttagtccaatatttaatgtggaagatttgtatatctaccatggccatcacaacgatgcaagtgaagagttggatcttcaattaccacctactcttagcccacgtcttgagatcgagtatgttcttgatgatcaatttgtgtctactcgacaaggtggataccattaatttttagtgaaatggcgaggcaaaccacactccgaaaatacatggattacgacaacagattttcaaaagcttaaccctaatctctatgaattgtatcaagcatctaactcgtcggagccaagttctttcaagccggggagaattgatgggggaaaaccttttaaagtttattcaaggaagaaagagaagacctaagtaaactttaagtaggattaatattaattagaattgaattgggattggtatttgttggagtttaattaggattagttagttgagttataatataattagaatttgagtcatgataggttattagagttctagtagactttggatgttataattagaattagaatcataataggttattagggttgtagtagactttgaatttcttagaaaaacctataaataggttaatcaatgtaaatcaaagggatgaattgatatcaatattattatattttcttttattgcaaggttgcaaccctcaatggtgagactctattgattttcttctaggcgagactcctagaaggccttagtgagactctaaggttttccattttttcttcattgtttcttctttctctctattttttatcttataattttctctaccataaaattaattccttgttcctctccttactcccaaaaagataaaaccttagtacacctatccttgagtgtaggcaaccatcctagggttgtcatacatcatacaacctctccttttgacaattctaggggaaaaaaacctttacaacacaaattagtataagtatgctccaaacctactctcatacaaggcacacacacactcactcaaactcataacttgggtactatacaacctacaaccacaactcaacaaataatacaactagtggaattggcataacaaatgataaaacaacaagagcaacaatcaaacaatatcaacctatacaacctctaaaaagaacaaacaagatgattaaaaaaatgaaataaagattaaaataaaaataataaggcacaaaatttgaatcaatcagtatttgattatttagatgcacactgattgaaaatactaccaatagactactttgagctaaaaatcaaagctttgaacataagtaacttattaaactatcatattcaaagttgagaagcaagagattattaattctctatcaagtaacttgtagctaaaaatagttctctcataagtctatatgtaactagcaatgatagataacctctacttataggactataattatccatgaaccaaaaatcaatttacatgtatgttgacttgtgttttgttttttttttttttcttttaataaccattatacatcgcttcacatatgcaatttttgaattttatcttctttttttatttttaaacgtattggcaacacacttaggatgattatgattttaagattagtaaggcgttctttttcaacaatagagatatccaacttttgtaatggggatgccacaaccattccaagaaataaataatattcttttactttttatgtttgagagaggacaaacaatcaagacgtaatagtcaaattcacaaggagattcaagtgacttaattcaatctttaaggcgcatttaataggtatagaattatatttagattttaagaaccattcactgacttttatgaaaatacaaggcactcctttaagctattaatcacttcaaatgaataatattaatatcttgaaatttatacaagcaaatcaaaattataagcaagctcatcagtcaacataagaagatttttttgtcttagagaactttaagatcatatgaatcaaaataaccatttacaaggatgatagggaaaacattctcatagacacatcaactatggacaaaatagagagagaaagatatgaggagtttctaatgaataaaactaagtatgacaacgaagataaaaagatgaagtacaacaaaaacacttcaaacctaagaaaacatctaagacttaagtgtatgcataaaaagtatcttacacatactctaaaggcaattagttgagaacacaacctatagagttcctaagtaactaaaacttaaaaccattcaaagatttggtatggatatcaactatttgaccctcggtaggtacataatctaactaaacaatttagtcttttaccaaagcgtgaacgaaataatgtctaatgtcaatgagtttggttctaaaatgaagaacataattctttaaaatgttaatagcattgacattatccaattctctcccattatcactcctaatttttgcaatggtacaacttttttcattttaaaccaagctaggatgtcaaaagtcaatgaattcgattttagaacttccacatgcaagaaaagagcataaaagaaaactttcactaacaacatagcaattgttagaagttgttaatccaatcatcacacatgcactatttaagtcaaacagttttcataaattttgtaaaaattagatattgaactcattctcacgtatttggtttatgcttactaagttagcttttaaacatttaatatgtaaaacttcttcaagagtaggaatgctcggggcacaaatagtggttttgcttttcactctagccatgttaccatctccaaatgtcaaatttcctccatcaaatttaatgaaattaataaaaattgatttattactagtcatatgacgtgactaaccactatcaaaataccatgaatttgattcatttgcttaagagctatgtaaaaagccaaacatttaagatcatactttttcacctaaatgtgtttaacatttgaaacttttatcttttcgttagaagtgctctcattcaactcaccattatgagggatttttgagtcattcgtagacattctcttattaccattcaatgccttattctttaatgtataacattcattcatttggttggtcaactttttttgaaaattattaaataatcttacataacatctatcaaaagtgagtcccattttgtcacaatgagtatggtgaaatttcaatttagtctaagttttttgggaaaattcttcttcacaaagattgatataaatttgttttaccactacactacatgaagttgtattctcatccacaaatcttaatcccatttttcaaaacatttacatcttgaattaatcaagtcattaagtcttttagagcaaggatgtgtttcttccttcctaaaacatctcattttaaaacatttgattttcatacttcaatttatcattctttttctttattttagcattttcataaaataaaaataaaaaataaaataaaaatacaattttgtcaagcaaatatatatatatatttatctcattgattaaactctttttggaagcattacattttactattctttttaaaggcttaggtactcattctacaaagtttgatagattgtgtcaaaactcatctcatcatcatcgaagctacttgattcacttgaagctttgaggttcttcattggcacttccacaaaggcagtgaagttgatgtagtcatcatttccattcgaatgattttcacttgaatgacatgactttgagtcaatctatgctactcacataatcttcttgcccttttcttaagggacatttgatggcaatgtgacccttccccccgtatttaaaacattcaatttcaaactatcttttaacattttttttcacttttttttttcttttttccaattgagtttctctatttttagtattttttttttcttgaattttatgaatttcatctactttttaaatttttaacaagactagtacgcttctcctttgacattttctcattatctttactttcaatacttagggactcttctttaatagcattcaaagaaactttgttccctttcctaggtaattcaaggcatcttagatgtttggagagaaccaaaatgttcgtccatctttaaagaaacctcatcattgtacaatttaatgacaattacttttgctctaaatctttccactaaagatttcaaaaattttctcacaactttagagttagagatgtgttcatcaagattctaatggtcgtgaatctacaggtcaacatttgaagcttggacacttaaatgacattaactcctttatgagttgttttgaggatatcccaagcctccttagtaaaagagcatgtagcaatcctcataaattcatccatgctaatagcattaatttgctttatttcacttccatcatattctaatttaggttgataatatttgttagtctagcttctttgtccaacacctttggtgtagactaaccaaattcaatgttgttccaaattttttcactttgcattttgagaaaatatttcattttcgcttactaatgtgaataatttttatcaattaaataaggtctcccaatagaagatgaggatctataaatgagattcaaggattgaaaataatttttgtggcaaaaccctcttggataccaatttaagtaaatcttagtcatggattagcacctcaagagggaacgagtaggtgttctcaatttttcaacaaaaacacaagtgacgtgcaaatgaaatcaacactctcaacataggaaataagaattccatcacaaatatgaaattcattctctaactaaattaaaacataaatttaaaggacaatagaggaacaaagacacaataatataacatggaaaatctccaaaaagataaaaccacaggccaatcacaattgtataatccagtataaagaaaatatcaagtgcaaggttttgccttgtccaattctctcctagactacttgtttggtaccttaggaaacccggcttctcatcatcttcatgtggaatcctttgcaatctctccaaaaacaattttttctcttcttgatatccacacaaaaggatatttagattttaccttaatagatgaagaacaaagagtagaaatggggaaaaattttgaatcaatacattttgttgggaaatttttcactcaagtatggtttttaactcaaatacctagaaattttccaaaaaaaaaaaaaaaagcaaatgcttcccattttttctctaaccaatgcttgaacaacaaaaaagcaacatgtttaaaatcaattagtgaatcacgtatttagaatctctaagcttaggcttaatggtactaaaaaggagtagaaacgctacagaaacttttaagtttttacaatatttctcaaagccattgtctatctacctagagaagaattagagaaggaagagaatgataaaaaaagaaaaggaaagatcaaggagagaagtgttttcacaaatttctccaagtattctaagggttatgaaataaagattacttcactaattttgatttccagttcttcaaatctttaactggagatctaaggaataaattaacggaagacctagtttttatttcagaataatgttcttgttggtttaaatagggaggccaataaataggactaaattttcaggaaatatgattcttggatatattggcatttgcaatttacattaaaaaaatttgtatatgtttaatctttgctaataatatatgtttggatgtgttaatgtggattctacatgatatgaattgttgacgtaaagatctgccattagaacacttagtaaagattctaagtaaaggattgaacacattaaagatctcaacctttaatgcctaaaattgcataggctttgctattttagttgctatgagctgcaactttgggacttaatgctgaacatatggggcttaaatttattatttatgaactgatttttaagcctaaggtagaattgaaatgctttgatgcagttaagaagctttgaaactccctgatgtactgttctgatatgccaaaaccctcactgttatggttgtaatgcagtattttgcttatcatttcttctaaataacaattcattcatctggtttttgaaatgcaatgaaatggcttcatccctacattagaaaaatcaagtgatctttttaatgttatgcattggctttgttattttaaatcacaagaaatagaaatatttctatttgaaagttttgaaatacttacatgatctgtcatgtcttatcccttcctgattttcattgcctttggtgggatgatgacaaccttcaaccctagccagttttggagcattattgaccagtgatgtaaccataaagatgtaaccttaaatcgaatttggttccatccactagttagaagaatgtatgaaactagtggtatctgttagagtcccacaaggattggacaccatttaattgacaaaagaaaaatgtatgtgcctcttatgctttaaacatgaatttttttggaatgtgagctatttgtaagaaaaatatttatcttctgaaaatacatgagattagatcttggttgaaatggtacttccataatttggaactcttttatgaaatacttgatcctacacacattgcattactatccattattaggcttccaagcttgtcctgttttccccaccctttacatgtttttctttttagtaggcaaaattagaactagttaaaaagtgcctaacaagaggagtgtgctcctcaagtacttggggatacacgaagggcgctaaaaggcatataggagaataaaacaactcaaattgacatctagtcaccatttactatccaaccaacaaatgaactctaacaaagaaaaatgaccaacttgaagagtttaatgagaccaaaggaaaaaaaagggggggggggatgaggaaactccttagagataggtctaaccataactcatttaaaagatcttccattacctttttttccaaattgtctaaaacaaacacaaaggagttgttcttcatgcgtttctttgattcttccccgtaaaactcctagtgcttaaaagatgaagcatattatgccaagacctccttgctttcccataatgtatgagagaatgattgtctataatcaaataaggtgagccaaggcttcaatctttcagatttaagcaggggataaggatacaaattatagcaaacaaaaaaataaataaaaaatagggggaaaagataaagaagaaaataggaaatcttaaagtctcactatggctatctagagtcaaaacttaatattattttgtcatcaactattaatctcatttcgcatcaattagtcttatttataacttttgaaaaaccttagaaattgaataaaatcaggaaaatataaacttaacctatatggtaacttattatgtcttatctattttctaaaatttctaaggttcaaaataatagaattaaaaaaagtatatgaactttctttttaaaattaggaacttaattttctaagaacttcttataacaaaagtttctaaagaaaaagacttctaaaattggaagaacgactccaattaaaacattaagaagaaaaatattattttagaaaatcataagttttagaaactttttttttagtttaaccaaattctaaaaccttcctttttttttctttttttctttttttttctttccttcctattattgaatatgcattgaggggcccatctccatcatccacactacctaattcccaattttgaaaatgtcttaaaaaagcaagggagaaaagaaggggaaaggaatctttgaaagttgaatccccacaccaagtatcctgctaaagtttgattctcctctccttgccaaagacaaatatggtttaagtcttaaaagcacctgaatcccttcttatcaccttctacaatccaactctaaaactctccctccctacacaaaaacactacccttcgagatcctcctcatgttttcctataattacttgtctccaaaaaagattccgttttggggaaaatcttcagtaccaacttttagccaaggaatggtacgacactttggggttggtaagtctcaaatatgccattgttagtgttatgttagttgtaatctttcaagagcaaattaagtgtattcatgaaccatgggtagttttttatttgattggagattgtctcattcatgagttgcttagattgctctatctaatgtctagtttaaatttcaagtagtttttttattgaaatacaagtcaactcagtttgagcaccatttttttggtgtgtgaaatggccatcacacgccttaggccagaggttcaaggcacaacaggttgacatattaacccttagttatcaccatgtaggctctcaggtgggaatttcagaatatgggaataaataagacttttgaccaacttaataagcttttgggaacaataccagtctcaggactattactattaatttcatgttttaacttgagtttaattagttttgtttcaaaaaaaaaaaaaatgaaactttgactgtcttatatttggatcttttatagcagatgttataatgtaggagaatgttgtataacttgatcatgtgtgacatagctttgttgacattctcatcttgatccataggtgtcatctatttcaattttatcccttttttagattcatttggttgccgtatgttgtaccccacttctgcctcattctaaatcatacttggctcaacatttttttttggtcctcccttccaaccttctagcatcagacaaagtacatcttcttcgctctctgtaaagaacctagatatccacataactaagaatacacaagtaaagtgctactgaatttcacattctaaaagtcttcttgatatcgccttttacaaccttctaaagatcatcctttcagcttttctttatcatcaattcgtcatatttaaacttgacaaatagataaataagccacatcaaatatccagtctggtgttgaaagagaataccctatcttttggtgttgataataagcaatcaaactagcattttagttaattcaatatctttagactacaggaaagaaatttttgcatcggctgccaagaggagagcatgacataatagttgctcatttctccagatatttatcttacagttattattattattattattgccaactctctgtttactctataattgtctatcaatatgggttcatgcttctacaaagacaaagtgtagctggcaactttccaaaatctaaatgtgcagacatggctatgtctatcagttttgacatgtaccagatataatttatatttgtacttcttgtttatcatatgttgaagtagaagaatggtttggttattaaatgaaaacacattatgaagtagtttggttgtgaaatcaaaatacattatccatattgtttatggtataacatgtgttattgagcagcactgcatatatgttaagatgatgaagactctaatatccccattgtattatagccctggtaattgaaaggtgcaacatgcatgttgttcttcatgttttactaaattaaaacaaacgactctaccagacatgaatagttctgtggtaccatatcaacaggtgccctagactatgtagaatttcatatttacaatagttttcttcttccccctttgtttctgttttgtttacttctttatctatatgttctgtttgcccattaaagccctaggcttactagtatctgtaattgcacaacagcctagtctgattcaattagaagtggaagaaaacaaaccactgttggtaaacaagaagcagcaaaccatctgtgaagaaatattttatcttaacatgacaaatacagtcttaaacttttttgtagccttgttgtatcaaacaaaggaagtcatgttctgccatctagtcacagaaaaaccagagttgaatttcacttgcattattttgcattatggtttacttgaaagatgttgctcatatcttgtgttttggatgtttcagc

SEQ ID NO: 12290 - DNA, 3852 bp, Vitis vinifera
  Intron number 4 from transcript GSVIVT01033839001 (locus G SVIVG01033839001) derived from phytozome v7.0 (chr-ID chr8 ; pos 17324582 to 17328433)
tggcattgtgttcaaactctaggtgaatctaacaagtattaaacctaccaaatctctctctctctctttctctctctctctctcacttatgtagagttctctttaaaaattatttatagtgcttttttttttttcttgtttttgtttgttgttggatatgctgatttcttagttaactgttattaatctctgtactgatgtaatcaatcattcttatatccatgagccaataagatgaaaatgtgtggcttctctaaagttacctctattgtaccatatagcatcaagttttttatggtgatgagcaattgggttctctaaagctttctcatttctatgttttatttgactcactcactggaaggaatgtgtctttcctaagtcccaacatggtatccgattatctgtagaaataaaattcaggatttcatgatacatatgttttaatatttccacagcacaaagggagttaaagtacaaaaacaattaagcttcttttgtttatattttcatggaaaaggcttttttgttgcattcatagttggtattcatcgcttctcgggtaaagaagtgtctacccaatatttgtggagataggattggtgtaatattctatccttgatgaataattcatcaaacctcttcttggacccccatcctctgggttattgaagatgaacttgatggtggtcttcttgtcattcagctcatgcccttgttggagtaatttgtgaggttcacattgggattatcatttttctcaaagggattctattaaaacacgagattctagcatgtctccaagactttaaagagggaaacttgatgattttgtctaacttctgtggatgacaattgtgctaatgtgattactcatactgcaattggtttagggaaggccttggtgatatgcaaaaccttgcgtggggaatttttggtttttggtggattttcttagtagctttctcattctaggtagatatcttgcccaatagaggagcatttgagtgttaacactattttgaaaaattatcttctcatgaagtggcctttttggttttttggtgttgctagttgtggctctaagatgattcaactcacccccacctgtcaccattttttttttgttcttgttgttgttttttgttttttgtgtttttttgtttgtttgatgagaggtgatctcctccttcccactgttcttattctccttttcatcaatagtgcttcatttcacaagaatattggattttaaagcagataatattgatgcttgaggatcatgtgaaatgttgtttaaatggatccaactcatgtgatacctatgtaaaaaagatacatttttgttcgtttttggcaacatgctgtattttgtttttattttatagttttggttgtggcttaggctatggtaatatttgatttcaattttatagtgtttttatcctaaaatgcttttgtggagggaagacaaattttggatgttgctttgatagctaacgaggctatagattcacttttgaaaagtaatagttgtgggctaatttgcaagcttgatatagaggcggcgtatgattatgtgagttggagcttcttactcatgatgctaaaaaagatgggttttggtgataggtggattagttggatcgagtggtgcatttctaccttgagattctctattcttgtcaacgattcttctttgggcttttttcagagctctaaggggttgaggcaggaggatcccttttcttcgtatttttttgtgattgtcatggagactttcaattgtttgcttaagagggctaaggttgaaggtttcctgtcggggtggcaggtgagaggtaatggaagaaagggggtggatgtttctcatttgctgtttgccgatgacatgttagttttttgtgagccttctccaaattagttgacttacttgagttgggtacttatgtggtttgaggtcatttcaaggttgagagttaacttggataagagtgagttaatcccagtggggagggtggagaatgtagggggggttggctcatgagtttgactacaaggttagggtgctcccatcctcttacttgggcctccctttgggtgctccttttaagtgtgtgacagtttaggacaacatggagaggtttcagaaaagactaactctttagaaaaggcaatatatttctaaaagaggggaggggggactcaccttaattcatagcactctctccagcttacccatttattttatgtcctttttttgcattccaagattggttgggctaaggttgaagcaaattcaaagagactttctttagggatgagggacccttgagaggaaacctcatttggttagttggtctattgtctgtttagacaaaagaaagggtggattagggtacgggaatctctcgttgctcaataaagcatttttgtgcaaatggagttggtgttttgctaagcagaaaggggctttttggaggcaagttattaacagaaaatacagggaagaggaaagagggtggtgctcctctgaggtgaggggagcgtatagggtagggttgtggaaagccctcaagaaggagggagattcattaagttgcaaaattacctttttggtgaggaatggtaggagggtgaggttttggaaggacaagtggtgtggtgatgagcttttgtgcatttattttccttatttgttgtagctttttctaaaggggtgttggtggaggagatatggaaccattctctcgagggagggtgttgggcccctcatttccctaggtgactcaacgattgagagttggaaattgtggaacatttcgactagaaaggaagagggtgtttagggatagggacgatgaaattttatggactgagtcgaaggatgtggcgttctttgtcaagaccttgtacaaggtgttggagccaggaacaaacaagtgtgatttggaattcttaggtactgttaagggtggttttctttgtttgagaggctacttggaagaaggttctaactttggaccatattcagaggagaaggtggtccttggtgaatagatacttcctatgcctcaaaggggaaaaatcagttgatcacatccttcttcattgtgatagaatgagggtcttatggcatcttttgttctccctatttggtgtgttgtggatgttccttcttcagttagataagctttgctaggatgatatggtttctttgtggtcaagaaaatgaaaaagacttggtggactgctccttatatgccttttttgtttttctattgtttggaagaaaagaaatggtagggtgtttgaaaatgaggggtggtcaattcaagggttcagactctcctttatttgtaatctttgggtgtggtgcaagttgtatatagttcctaatcctctttccattgtaagctttgtggactggttgggttcgggctaaggggggttgttgttggtgtccctctttgtttttgtgtcgcctttaaatgtttctttgtgtacttcctatgtactttggaatacttttttttactttcttttttataaattgtttctgtttacctatgaggaaaaaaaataaataaaatgatttcaatacctaataacattttctgcatcaagaccttcttattctttagttagatatggttcttattctttggctttttggcatgctatcatgggcttaatacattgaaatctctacatggcctttatgattctttataaatttctgggagtcaggactgcttgttatatatatatattatggaatctaattcaaatgcattcttatacattttttcttcagtgggcacacctctactgtttgggctctttctttta

SEQ ID NO: 12291 - DNA, 3362 bp, Vitis vinifera
  Intron number 6 from transcript GSVIVT01025159001 (locus G SVIVG01025159001) derived from phytozome v7.0 (chr-ID chr6 ; pos 3881902 to 3885263)
ttccacgttttttacagcccaaggtattaatggcctccatctgctttcttcattaatggaatgaattgcataggaatactttgagttgcaatcttataatactaaattcctattgatcaaaatgactaaaaatgctctcaagtagctgttgtaaatgaaaccaataaaaaatatgactatagttggtaaatcaactaaaattagtatcaagtaaacaactaagcatccacctttttcacatacacctttgtcatatacttgcagccaactccaaatggttagtgatgatgacttgcatgggaagttataggcatgatgatacctttttgacttaattagtattggtattagtgggtttttaaagcctttagcttattggaggttttcttctaatgaaatgagctctgttttacaaagagaagacagacctcaatatggtttgtaggtccaattttaacttaccttggggaggaaaaataaagaaaactgaaaagaaaaaaggaacagtgatgtagcacagcattcaaagttgctgagtgtaatcaaagaacggggagtcagaactaagacttttaagggtttaaggaagggaagatggaactgtggtttacaaattgaataagggttgaaaagacttttaaagtggtttatgggatgaatttttcagaatagcttgctggaatttttgaacaggaagggactttagggatttcactgttaagatggtggggttaaaagtgaagttagggcttatggaagtacaggtttatgaataaaattagattaagggagggctggctgtgttttaatggtgtttgcagaaataaataaagaaaaataaagaagaagaaaaggagcagaagacaagagggatagatctcactaaggctttccgagagtcccacctaaaaaggaaaatgataagtctcaccagtagaagcttcaaaaatatgttttagacctaaaggaaaaaagtaagagtgaccattaaaaagtgcaaaatctgaagagaagtctaattcattgaattgttattttcacatttcttgcttttgtagaagtacagttagcaaaacctctaacctaaaaattagaaaattttaaactaagaaacttttaatagaaactctaaatagatgcttaggaaagaacaaccagaatttctctgaacatgcttatggaaacaaagcgtagaatatatgcaaaatatattttatatatttttttatgggtaaaaaggagaatattgtaaaagagaaatgccaaaagagtatcccaaagtacacaggaagtatacaaagattgtctataggcgccacaaaaaaaacagagaaggacaacaaaaaacaacccccccaacccagacccaaccagtccacaaagtctacagtggaatgaggacttgaagttataaacaacttagaccacacccaaaaattacaaagaaaagaaagtttttaagcccttgaactgaatgccccttcttttcattctttttcctccctgcaaagtaaaagctacatgtgcactgacaccaaaacattgccaagatgatagcacccatcatttggggtgaaagtgagttttcttctaatttaggatcacaaaactaagggggtatgtcttaaatcaaaccgaccttgcagatattgtctctagtcatggtcaatgacttgacatagaatatagaaaactaatattcttggctgtgttttctctcattacttgggctgctgtgagaattgaaaaccaaaatggagaatagataataatttgactgttgatgttcctttgagggttagctatcgatgagagagagagagagagagtaggaacatgaacataagggggcatgtcttaaatcaaaagtagttcgtagatattgcctctagtcatatcaaaagtagtttgtagatatctcctctagtcatatcaaaagtagtttgcagataccgcctttagtcataattgttgacttttgacttggcatggaatataaacaaatagaattcttggctatgttctctcattacttaggccgctgtgagaattaaaaaccaaaatggagaatagataataatttgactctagaaattccttttgagggtatcaccacttctgcatttcatttcattaggatattcataagatcacctatcaaaaaaaaaaaaagaaacgatattcataagatctcttaagtgttgtcatactttgacgaatgaatattgagagcttttataggatctgttgtggtttctaaatagggttctttgatcctattgaactatacattattttaggtaagaaacatgaacaattctagctgtttggaaatggttgatattttcctttctagggtcttaaagtttttaacaaacaaacacacttgaatatgttgcaagatggtaaccaagttaacaaattcttcctgaaaatgttgcctgagattcacaatctacaaaacgttgaagttttcttgttagccttgcatcaattaccaaatctttggtgttaaataaaatgttaaaaaaaaattaatttgattttggaagaacccttccagaagtcaagttagaaatagaagggtcgtatgcttaatataactttagctatttaatttgacataatttattatatgcacttgttttgactccttttaccactagtgtatgccaaggcaatataacatgccaggttgttgggtggtgtatggttgtagtattgcatggcttacttggacttggttactcattgttataattatttaggaattttaatattttacaggacctcacatgttatatagtttagcgggtttcggtttattgagctttagtaattttaggtctctgtaagggattatgtggataagtaacaaggaaagactggaatattgaatgatctttaagaaagattcttaatcccaggttaaactgcattctaccataagaccaaattttttctctggcttacctaaaaacattgtgaatattgagagccaaattaaccaagccagaaaactattaatgactaagttgttcatcaattatagcattgtagaccataagtctgtttgacacaacacagtaatgagctcccttataggcctttctgcattgaaccaatcatcatgtatctatacagaagtccattacaccaaccttttacatttctctggtcccaaatgttctggcactttttatatgttatgagggtggtagcttttatgcagattgtactggacattaatgaacttgttgtcacttgttcttggaagttttgttcgcatgcttggtcaaacctgtattgtagataataatattttgtagcttgttcataaatgctgaaatgcagggcaagtc

SEQ ID NO: 12292 - DNA, 5365 bp, Vitis vinifera
  Intron number 12 from transcript GSVIVT01028386001 (locus GSVIVG01028386001) derived from phytozome v7.0 (chr-ID chr 7; pos 6902719 to 6908083 reverse strand)
aggaagaaggacagcggtttgggagcttgataaaggtattgacataaatactgctgtgcttatgaactgaagcatggagtttctgaaggactcttgcttcaaaagatatctagttaacctgctttgtctaccatttcattggagataataaatgctttcctgccttaaaactaaagattgacgaaaatataatcagcattaaaaaggatttcccacatggaaattttccacaagcgtaacttatatgattacttcagtagtctggaaaaattttcactggcttcaaactgaaatgatggcaacctttttttacttcgtccttttttctctactttcagttatattgtgcaactgcaattgaatatatgatttatttttttaatgcattatgattttattcttctaccttatgcacattatgtacatttcatggttcacatgcatagttcatttcaagttgtctgagggaacggatagtaaagtgaacagctacataacatggtaacatagccagcaagtagaagcagaaaacagactacaagataaacacgagtttagggtgtttggactagaaagtagaaactcccataccttcaacccaatagaaataaaactctaatagtttcaaaaaggattttgttgccctcccaattttaaacaggtaaagcctatacacagttctatcctaagtacttattagacataattttaagcattcctttatactcagatgcatataaaacaaaatgacgaattttaggatgtattgggcacatttcccttaatgaactcaacatgatttagatacttgcattaaatcaggaaaagtaggcaaaacatagagaaccatagaaataaaacagggactaaaagatagctaaagggtgggatgggtgaatggctctttttgggtgccttcttaccatccactttcatgtggacatgtgctctagtgcctggtgcaggtctgtagaccaaagtcaatttgtctgactattatatccttggacaagtactcaattacttgagacattgtcacccttccattgaaaatataagcatactgttttcaccaacaaaaagcatgctactatacgttccattatttgcagcctactggatgacataaactataacaatgagacaataaacttgaagcataataatgtggaagtatacctgcaattatatttttttaagtttattttttattttttatttttttatggaggcaacaatattttctagttttgacaaagaaatgaatttatttgttttgagtttccatttcaatattagatcatagatgtgcataggatgtgcagagagagaggtggggtgggtggtgggtttgcctgatctaacaattacaaaaactgatgtgtctttgaagcactggacaagtatctagcctcttgcctttggaaaaagatctgatgtttgtgagaagggagctggtagtaaattctagtgtcccaagacagcagagtctatctcaacattgtgcaggtaggaacctccagatgttgtggattaagagatggcgccaggaattttcttagctgatcttgtctgtttgaggatggtttgcgatgaggtggctctctctttgttggttctctccacatagagcccagagaagaagagcgccatctgtagatattgccctcttattggaagtggaagatttggtagttacgttatcgactccatttattttgatggggggtgagtcttctcctttttcctcttctacttctaaagacagtggtccattgtcggggatagccaatagcttggttccatggaggaagcaagatgaagggttttcagtagaatgaaagggtggtgatggttatgggcagttgcgaaattttctagtgagggcttggttgtggacttcctggaggatcatcctagagacaccgagagtacggacctagatgtggcaagtgagaacatggcttcagaaaatggcattcatatcagggatatgatgagagatgggagcttctcttatctgtcttttgggaaattcgtcttctttagcagatttttggattgctagtggaagggaatgaaaaggaatttgtatccttgttgagaaaattggaatccagaaaggaccatagagcagcgtccttaagtaagaagaggaagccgtcctctacatctcaatttgatagggagcttcagaaattggggtgctttgttaattacaaccaatcaaagaagtaaagagaggatcaggaagaatgggtgggaaatggtttctgattgtcaatgaagtttgagattttcagattgctgatagtaggtttaaaggctgagtgtttggctctcctcagaaatgggaatgatagagatgaggtgaggattcaggagggtgggaagaggagaatgaattctttgttttcaaaatttagaagggatttagagaagcgggattgcttgtaacttttaagggggcaaaacgtattgttttagtgggtagatgaagtttgtatttatcttttggattcttagaggggccaatgtcagtgtgaagagctagaatttcaaggctttgattagatagcagcaagcagacttggtttgcctgaaagaaggtcgtttggggactttctgtttttctaggcctttagggtgatgtttttgtatcaagttgtggtttttttatttctcttttcctgttggttgccttttggcactatttgtatgtactttgtgtgccttatataactacttagtttacctgtcaaaaaaatgtccatacactatgatcatagtatatcatatgatttatattatggtagatatgaggcagttgttaatgcaaagggttcaaatatgtaaggagaaaccaagtcccttgagggtttgctcaaggggttggagtggaatgtgaaaggtccaattttgattcccaacaggaaaaaaggggtcatcttttaaaaaaaatgtattaccagtacacaatggcctccctcatagagtttgattttagctttgatttgggcatctggaacatcctggttgaagggaattctgcagtgcatgttttctcggtcccttcaaggagtggagaggtatttgaaggcttctttactgtttaatgaggatttagtattggaggagaaatatttgtcttggcccttggaagcctagatagtccaatcatgtggcttacagtttcactgagtgggatggtagatttacttgagattgttttaggggatctctgtgtttgtgtaggtttagatctaccttttgtgacctgggtatgtacctaagctaacaagagttccatctaaagaggtgagccatttgaacttttgactgcatatgccatactagttacatgttagatatgaataaggttgttaatgtgaaggatagcattggagatagagaaagttcagtcatttcccaacaggttttgcaggtgatgcagcttattgaaaccatggtaaaactttttgttcaataattttaactttctcttgggagtagctacatttgctcttatcatacaaggagtatttcaattttgtccagtggtttattggcaagatttcctgtaatcagcagcttgttggctaattagatgtaaaatttctggagattatatattttgcatggaaacaaacataggacttggtttcaacatgataaaattatggcaacatggaaatgtttgaaaagccatgacatggatatgagggtatttaaccaaatatagattgtgtatgtagtgtagaatttaagaatttatacaattatactacatattatacaatctttctcatccctttcttgtcctcctccaatggaatcagtcattttatcttttgtttctaagaaaggtgtgagcataatttttatgaaaatctttatatatatatatatatatatatatattttccttttaaaactgtactttgtatgatggaagaaaacagtatatccgaagtatatattgcattggagaagttcataatgcaaaattgattaatgaacaagtatcatgactggccacaggtggaatttttggtcattctgttttctataatccattgactgtttcatagaataatttctaaatgataaaaggggactcaacttcatgaatagagcagtttgtttatattactgaataccagggttctcgttccatcatttttctggttttaggtttatctctagattggaagggcattaatatggcaatacaaccttagaagtatagcaaaatgttggtaaatatcaatcatgatttcaagattattgcattctcaaaaacaagcatggaatttgaaatttgtttagttatttgttccatgtaaggatatgttgatccactttcttgaattaatgagaaaaatttgcaactgctgattcctttttctgaattctagcaaccttttcttttatgataaatgcaagttcctctcaataaacatcactattcttattttgcaatcagtcttcattacattaagcatcttagtgcatccattaggttctttctctttaaggttaatgttgcttcattgaggtctcaaggaatagctattgcctcctttttgttcccattttcaatattctatgactaagagggtatttggtaaagtttaatacttgttgcttaaataacttaagttgatataagttaaatcgtttgagtaattaacttaaaacttattatttatttatttttacttttaagtatgaagattgtttggtaaagttaacataaaatttattttaaattatcaaattgacacgtttacccttcttaattttaattaatatttatcttcattgattttaactcatatttattttcattaatttcaagaaataaatttatttgtaaatcatctatatttaaagtattgtagatagttaagataaccataaatatttattataaaaaatgagttatggatatggaatcataattttaaaatatattttcactactatggacaaattaagcaaaaaggatttgagattaaaaataatttaactattttgacttcatacttaaagttaaaaataactttaagttgtaatattaagttattttaccaaacatgtttaatctacataatgatttaaattaaattataagtcattaagttataagctgatttaccaaataccctctaacttttccagatcagtttttgcagtttggtctagatgacactagattttgatattgtgctgagagttcttgtcccacttgctgtatacatattcatttgtgttgtcttcattcttttctatcagtttcacactaaattggaacgttttgcttgtagcaaatcatagaaacattgtcagatcgccggttctg

SEQ ID NO: 12293 - DNA, 6033 bp, Vitis vinifera
  Intron number 2 from transcript GSVIVT01024988001 (locus G SVIVG01024988001) derived from phytozome v7.0 (chr-ID chr6 ; pos 5461816 to 5467848)
catccaagcaagttcctcaacctgccctaagtgatgtgaatatcaagttttgtgaaatgttcatctagccaattaattcattttgccttgctgttcaatgattgcatacttagaaataaacctggaatcgaatgtctttttttttttatatagataaagagaataatattaaacaggaagaggaaacaccaaactaatgccctctaggtatacagggagtatacaaaagcagcccatagacttgaaaccaagggaggaggaaataaacaacaatccctacccttacttagagcctagccactcaaaaaagctaacaagagaagaagggctcaaaactataaacaccctcacccaagaccaaagattacatacaaaagaatgttttagccattgaagcgaaaacacctcattcccaaaagttaacaaatttctttccttccagactgaccagaatatacataaggagaccatttgccaagtctttttacaggttttccccacaaacactccatgccaccccaggagagtttccttaactgaaccagagagaacctaagccacaccaaaaagggagaaaagaagactccacaatgcccgcgtcttaacacaatgaagtaaaaggtgatccattgtttctacttcagaaagacatagaaaacacctatttgccaaagagtaccccctcctctggagttgctccaaagtctggaatcgaatgtcttaccacttgtaaatgctgttatattttatttttttagttggacaatagaatgtctatgctttggatgatttatctttttactttaaccaatctaatgctgttgacttgggtctattttttaacaatttaatggggtagacttctaacatatataaagaaagatttggcttgaataaacattgactaattttaccatgaaaacataaatggtacccaccatgctgccaaactggaagcatttggaagaaaaggaagagcaaccgaaaaaaaaaacactcttatcttaaaaatagaaaagagagaactttaaagtgtaaagtaagtagaatgaatttaattttataagttatagtggatagataataatcaggttgaatttgttatgatctttgaggtgaatttatcatggtcgttatagttaaataataaaaatgcgaaatttggggtatcttgggaagaaaaaaactacaaactcttcatccttttatatatggtatggataaatgaaactaggttttttgtttcttggatttttattcattttgaatctgagaaagctatagctctgctcggttgctgagaataggaaagagataggaggagaaatttttaatcttaggttctcacctaacagagactaacattgtagcgagttctccatttttttttatgccaaagcaatgtgaaacataagattcagagttttatttccatcatttttctcagtaaccaaatggagggcaagggagaaagaaaggagatctaggttataatgaagaacaacttaatgtttgtttcattataattgcaaagaaggcttggattatgggtgaaaattgctaacctaaatggagttctctgcttttagaattgtcttttttttactcaagtgcaggtgacagattttgaatgacattatagataggtgattgttgcaccttatttttgtttttggatcaattttgaatacgtcggtacctttctatctattgtattcttttgacacatcaacacagtcacaaataaaaacaaacataaacatgactcaaaacaagtacatgcatatctacattttatcggttctatgcatacatgtacatatacaagaaaaatttgccgcctttgtcctaagtatcgacctgaaaatgccattagtccttggatgtttatttttttatcattgtttttgtgcatggactattaattctttttattttatttttttataggatgctttctccaaatattgtctttatggcataaggaattatttagttaaagagtgattgatatgatatgcatggagaatgcaatttcaatgatttattatcccattggccaatttaatatacaaggtgaagactagaggccctaaatatttcccggggtgctgtcttaggaaaggtctcgtggtgtatttagttaccacaccactttcagacactcaacatctctataagctagtaaagtaaaggcacttgattagtcgatgccatctatcctatctaatttagatttggattgagtttgatgaagatgatattttttccttttcatattccaattaaaaaaatgtacttgtgaagctagattaggcaaatggtgaattcacttgcttgactttgtttctattttatgggcttaggtttgacttcaaatgcatttgacccaagtccaaagttgtaattattattagtttttttgataggcaatatataagaagagtgccaaactaaagtggcgaacacagtataccggaagcatagaagtaagaaacaaaataaacgaactatggtagccataatcctacttcaagacttgaagcacaaccattctataaaatataacaaagaacgtggacttgtttgactgtcaactagaagataccctcgagaccacatgtatagattagttatgagggggtccttgagagattggatggtgcattgatccccttcaaaggttccctagtttcattccttccaaattgtccaaaaaaggctaagaggaattgttctccaaacctttcttctcttcttgcccataaagcttccataccaaaccattaacaagtccttcactgaaaatggtacccacgagatgccaaaaaaagaggagaacgtgtcataactctctaactatcccacaatggataagaagatgatctaccaatttgtctacatttttgcacataaaacaataacctgccaaaactcatcattccttttgagttagtacctagttaggatccttcttcaagtcgtttcccaagcaaaaaaatctcactttagtaggagttcaagatccccgtattattttttaagggagaggcacttcatccactgcttccaaagcatcacagaaagaccttgctgagaatacgccattttcgttagctttccaaaacattttatcttcctctcctctatttctaccaaactcataaaactttagaataaattttcaacagcatccatcccccaatcatgaaaattccttgagaatatgggtttcaagtgatcatcccgccttcaacctcccaaacatcttccacccatacctccttagaagttgcaatggtaaataatgatggaaaagaatcctttaagggtatatcatcatgccacacatcatggttggaaaaaaatcctttaagggtatgtcatcatgccacacatcatgctagagtttgatttttcccccattgcctacctcaaatcttgtattggctctaaaaatttgccattcttttctgatcaacttccacaagcaaacatcataactttctctccctactcgagagcatggtttgaaatatcagtaaacatggatatatcggtacttggatcttatggatatatcggaaatatcggtggatattttgacaaaaatatcgatgaagcgaaaattattcaaaattcatggaaatatttggaaaaaatccaaaaaaattataaaataagtaaaaatatatatgttaaagttattttgtaagtgtaattgacataggtatgattaaggagaaaaatatcggtaagtaaggatatatgagtcttaatatataaattattattattattattattattattaataaaaggataaatataaaaattttaaaagtgaagtgatagtaattttttaaaataagattaatgagataaatgatgatacatttaatattaaaactataatttatttaattcaaatgcatttaataatgtaaaataaatgatgatgcatacatgattttttaataattatattttttatgtttaattatcatataaatgataggaaaagacttgttaagaaaattataatgttagtttttatacttttattaatcaattaaatataaaataaaataattagaatttttttttaataattaactttaacatatttaaattgaacatatattaacaaaaggaagcttggcctattggtagccaactttcaaccccaacattttgacttgagtttgattctcctcggctgcaacgacaggcaaaaaatgtgaaggggcttgattgcgcgggtgttaaccagtgggctgaagggcttgaccgcgccttgaccaattgataaattgagaattttggatttcctgaaaaatcagccaaaatgccgataaatatcgaaacatcggtgatattgccgaaaatttggcgaaaaatctgtcgaccaattatcggtgtgaaatatcgtgttggccaaatattggtgatattttgccaaaatttcgtgacatttcaaaccatgcttgagagcaccactctcttggttcttcttcaaactttccatctttaagctttttccaaagcatatccctttcgaaggtaaatctccaacaccatttacccaaaagagctttattgatagtagacaaatccttgatatcgagaccccctttctttttatcttttcaaatcattgaccaatttgctagatgagatgtttttctcaagagcccctcctcgccaaaggaaatccttttggattttctctaatctcttagcctccaatttaggaataacgaaaagtactcttcaacaatgtgatttttcctcctttcgaaaagtaatgccttttccaaagggccaatcttttaaagaacctctcctccaccacatcccaaatagctttagctttaaagggagcaacgaggggtaggcccaaataggtggtgggaagttttcctactccacaacacaaggctgatgctagctcctctacattagggatgttccctattggaatatgctcactcttgtttaagttaatctatagcctagaggaagcctcaaaccaaagcaaaacccaagccgtgtattatgtaagctggtctggacgaggatcagaaaaaagaagtgtatcatttgtgaacaggaggtgagaaatctctactcctctacctccttctcttgccccaaaacctaagataaaaccacactcgatcacccttctcaagagagagctaaaagcctccatgaccaatacaaagccttgaggaaccctcttgttggaaaaaggccattaaccaaaactgaaaatcttgctgttgaaatgcaaggctggatccactcaatccatttttgaccgcatcccatctttcacatcacttccaaaagaaaactctagtttacatgaccagttctgacagtagcagcttgaattaatttacaatctttgttgaaatctccaactcctctgttacccattctccatttattctgattctcctaataagatatcttctgtgcctagcattagctattttgtgaaaaaaaattatatttttgtccctttccttctgccctgcctcccgggacttttgcctccaagcccaataattaaactcttctactaccaatcttctagtgtccctttcttccaaagatagtccctctctttgccatcccagtagttgatttgatccaatgcacagcccttacgggctgcaacattaccaaaataaagctgtacaaccccctgaactgataacattcccagcacccttttaccaaatggttatcccgtaacctttctgaaagaatcaacataagtgtgcctgtctgtttattctttaattgaaaatgggcagtaattcaaacctataggaaagaactcccaagttctttctgacttgttttctttttcatgcagagtctacattttaatttttttaaagaaattattttcataatgtttaaaaatgttgattatttcactgtgtttctgatgtttctcaacaaaaatcaagtctaacaatgtcgttcttggacatgtgtagttcaaacttgagaaga

SEQ ID NO: 12294 - DNA, 17679 bp, Vitis vinifera
  Intron number 24 from transcript GSVIVT01026355001 (locus GSVIVG01026355001) derived from phytozome v7.0 (chr-ID chr 4; pos 14827656 to 14845334)
cctctgctaagcctaatttctattgtggcactcaagtaagaatttaccaactaaccaccataatttgattgaagtttataactagtaatgtttcttagggaacaatttgtgaatcctacccttgttaggattaatatttggataacaatcaaagcatttatgtttactgataaaaacttcaagatatgcatcccatgtttccatattctcttttctattctgttacagtagtatgaaatttattttcagtgctagtcttcagaagttcagctacattgaaaatggaaagctacatatcatgacattgttaaaatgtactcaaatgtgataatggcttggcaggtggtttataacatagatacttgatttatatttatcaaaaaaaataacatagacacttgatcttttagtaacttgtcaaaattccacaaagttagtttttctgtttcatcatgcaactatcaggatgataaattgagattaagaaatcttttatcaattgaaagataaaaggaagtatgagaaatccctcaagcaagaacacaaagtgacacaaaagaatgcctaatagaaaaacttcatcttacaatatacaatccaccacaagatactttccagaatattgagttagctaacccaaattcgcatgcaaaggaacaatttaaggttctaaataggtcaataattgattgtacctaccagtcacacacccaagggcctatccctctctacatcacctaggctataagaatgaggtgcttgaaagcatgatagttggataagtcaaattattgatgtgggcaacagtttggtatactttatagttggtggcgttatgccctccatcagccttgggagtatctcacatttgttttccgatattctattttctcttcatgttttcctctcttcaaacacaacctagagatgcttttaagcacaataagctaggcatgtgaaattatgaaaatgtccttgtcttttttctcttccccaaactctaaccatagtttcatcttttattggtggatccatagggatccataattagttattgttgaaaatcctaacaacttgtcgaatttgattaagcaagttgtatgcatctaattgtgcaagctgtttgcaatcaatatagcttgtacaagcagtaaattagtgataagttagttcctagtttgtataattgactaatggtgtctacatttagtgttttctaggttgtggattattttcctttattgtttaccctgtatcatatagatttataatcattgtaaattcttccatcatttcaagaaatacaattccatgattgttcacatggtatcaaagcaaggtttctgttaaaattcattctttgttcttcaaccttaatcgtcataatcaacatagggaaatacaaccttcattgttgtggcggccttcattgttggttgccccacatttattgccaactctctgttgaaaaaaccttgatccattttctcttcttttatttgctttcttgatatgtctagaacatctagtaatgtccaaatctctacctctacctaagattcctatcaaaccataacccactctttcaccgatgaatacaaaatctccaagtgccattcaggcttaatggctagaattatctggtttggtctcaacttgtgaatacattccttaaaggaaaggggaagctaagccatttagttagatcagtaccaagcctagaagacctgaaatttgttacctaggatgaagaggattcaatgataatgtcttatctttggaacttgatgcaactggacattagtggaacttgtaggtttctcacgatttagaaggctattaagcaatcatattcctagctacaagatgctgctcaaatttatgaaataaaaaaagaaaagaaaaaagagttggataattcatccacgaaacagggtattttgtctgtgattgagtattataatatcttaaacagtttgtggcttgatttgatttattatcaaaatttccaaatgaaatgtagtgaagatgtaaccatgctacaaaagttggattaaatgttgaacatgatcaagttagagtgcaaatttttggaaaagaaacactttcatcactcattgaagtgttctcaattgtaaaggcagaagctagtaggagaatagtcatgttagaagccccaccaagtgaaggattgactcctgctgtagtcaagccggataccggtcaatggaaaaatggggtggctgttggagagacaaattggaagaatgagacccatagaccatagaataataaagatgaagtatggtgtacttcctacaagaagctaagacacatgaaagagaattgttggagacttcatgggaagtcacaatctcgacggaagggaaataataaccaaaatggacaagtaggacaacaaggaggtcatgtgcatatggcccagtcagaagattgttcgagaaaagaagcctcgaattccaaagggtctaggggtggaagactaaacaaagaagaaatagaaagactttgaagcttcttgacctctctagaaaagcctagtgcctcatgttcattagcttgcttaggtaagtactcaaactctcatgcctttagtgcttccaaagactgtttttctagtgcttgggtaattaactcaagtactaatcacatgaccaactcttctcattggttaataaaagaaaaattgaagtgctaaatgttacattagctgttgtggttggtcaaggaactatttcctttacatcatcccttactctaaagtttgtgttacatgttcctaagctttttgtcaatctattgtctattcatcaactcacttaagatttgaattattgtgtaacctttttcccatcccattgtatttttcaggaccaagttattgcaaagcgaaaaaaaccatcatcacctagaggtactttgagcattgttatcccaaaagaatgttcctaagtcatattagggagaagtagttttgactacaactcatttgaccaataggttacaatctagagttttggggaataagagtccagtggaaaattttcaaagttctaacacgatttttgtatttcccgtcatcttcctcctataatatttgaatgtctgatatgctcacatttattcctatcattgcagtaaacttgatccccatgcattgaagtgtgtgtttatttgttattctccgacaaagagaagatataaatgctgtcatccagaatctgggaaattcttcataactatggacgccactttcaatgaaaatcaatccttcttttcctgtccttataggttaagacaaggaatctaatgaatgcgagtcctttcttcaagatccatcctttcgacccacgagtcatgttttcgaccctgaagccatttctcctagtcctgctatctctagtcctcctcgtttgagtctagccactgctattctctttgaacccacaatgattaaatcacagtttgtatttgaacttggaaatgagggaactgttagaaagtcgggagccaagccgctccaagtttactcaacaaggaaatagctcactggaattcctatgtaggttcaagaatctaaaccgataataggtatggaaataaatcccactcattgtgcacctgaaatttaagaaaaaaagtgtgtaaaataataaggcttctttaagtaaagacttagatttattgatagctgttaggaaaggagccagaaaatgcacccaacatccaatctctagtttcatttcttttgacaaactgttctcatcacataaatcctttcttttccaacttaaccccatagaaattcctcaaataatctaagaagcacttaggaatgagaactagaggaaagccatgaatgaggaaatgagggctcttgcaaaaacttagacatgagaaattgttgaacttctaaaaggaaaaagaccagttaggtgtaaatggttaattatgattaaatataattcttctagaaccttgaagagatataaggctaggctaggctagtagcttaaggatatacacaaacctatggcgtggattattggttaacttttgccctcgtagcaaaaatgaatatcattcgtgtactattgttcttagcagctgatcttggttggtctttgcatcaaatcgatgttaaaaatgcttttttgcatggtgatttaaagaaagaagtattagtggaggctccaccaaggtttgatgatggttttaaataaaatttgtgtgcaagttgaaaaaggcgttttatggactaaaacaattgcctagaacatggtttgggaaattcactaatgtagtgactaatatgaagattctgtagtgtcaaggagaccacatactttttatcaagcactcaccttctagctaggtaatgactttgatagttttgtggacgattacaagtgatgatattgaagaaatcaacttacttaagaaaaagttagccaaagaatttgaaataaaagaccttggcaaactcaactattttctgggaatagaagttgctcattcaaaagatagaagcttcatttttcaatatgctagttgacactccaattgaacaaaaccatagattgggagaggtcaatgagaacactatggtaaaccatgggaaatactaactttttggttggtacactaatctatttgtcacatactcaactagatatagaatgtgtagttagtgtggtgaattagttaatgcattctcctagagagatactgaagaatatgaagaattaaaggaataaagagaatgaatttttccttgatttcaatttgtacaaacctacatatttatacaattatttctagcaccaaaaatagaaaccttcctaacctaattatatcaaatccctttgattacaggattatcctaattctcttcttaattatagaattataccattataacttccctaattacattcttccacactcccacttaagttggtgaatagatatttttcatttccagcttggataaacttgcttgaaatgttgtaccatttaaacctttggtgagtatatttgcaagttggcggttagtagatacataaggagtagaaatcaatctactatctagtttctccttgataaaatgtctatctatctctatatgctttgttcggtcatgttgcactggattatgtgcaatattgattctagatttgttgtcacgataaattctcattatgccattccatttcatcttcacaacttccaaaatgatcttcgaccgtagtaggtcacaaaatccctaagcaaaattccacttttgcactagatctagccaccgaactttgttttttacttctccatgttactcgattcccaccaagaaaggtgcaatacccaatggtggatcttctgtcaaccacaaatccaacataatctacctccatgtatgcttcaagtaatagccttaagccttgtttaaataggatacccttttaaaatgttgtagcactcggttagctacttgtagatgaacctcttttggactatgcatgaattggttaatcacactcataacatatgtaatatccgatcttctgtgagagagataaatgagtgtccctaccagacgttgatatatctctctatctacaacatcttccttaacctctctaaccttatgattaggatctattggtgtgcttactaatctacatgccaacttcctatttctttgaaaaggtttgttacatatttctgttgagaaataaaaattttctactgagaatgtgcaactgtgattcctaggaagtacttcaaccttcctaactctttaatcttaaattttttggtcaaacattgactttaagtctgtctctccttttcatcattccttctcacaatggtgtcatctacatataccggaaaagtcatactccccctaaatttgaatgcttgatgaacaacatataatttccctgattttgtctatacctcacatttttcatcactttggcaaatcttccaaaccatgcccttggagattgtttcaacttgtattgagctttttttagtttacacatcttttcattgtctagatcacttataaattcaagagggacttccatataaatttcttcttccaagtttccatgcaaaagcgcatttttagcattgaactgttgtagatcccaattataattagatgccaatgataacaaaattctaactgtgctcatcttagcaactaaagcaaatgtctctagataatcttcaccatgactttagataatttgcaccatatgtctgagtgtatcctttagtcaccaatcttgccttctacctctgtaataacctatctgctctatggttaacaatataaacctacttgcatcccattggcttttttcctgtagacaaatctaccaactcctaagttatttactcttctctaaggcctcactttttgaattcatggcttgtttctaattttcgtttgataaagcctcagaatagagtggtaggaatgtaaatattgttcaaactcgtaagaaaactcttacaaagggtgaaaacttttcaaatgatgcaacatgagaaagtgggtataaagggtgtttagtatactccctagtttccttcctaatggcaatagggagattttaatctatagtttcttcatgaaattctggctcagtttgtaagggaggacaagaaacaattacctcatctccacaatttggtttagatttttgaacttgtataagtctcgagactgtggccttcttccttaaaaacacttttctagtcattctatccttaggagcaaccaccacaaactcatcaatttgttcaacaatgggtttaggagatgatacagatgactcaggaacaaagaagaggggtatggataactccgacactttgggaaggttaatagaaaagggatcaataagaaaggaatcttgatccttatcttctttgatggaattatccacttgaagatgaggagtgggaaaataaatctcactttcattgaaagtaacattaaaggaggcaaaaaaaaaaaaattggatggtggatggtagcacttatatcccttttgagttgaagtatattccacaaaaatacatttggctgctcttgaatctaatttcccctcgttttgactgtgagcatcaaataagaacccaaccaaatatcttaggaatgagatggtttatggttttcatatgaaaataaaacatcaagagcattttcatggaacttttgaaacctaagaccatagaaggtaagcaatttatgagatgaggggtgatgaggacgacttgcccttgataagatttagggacattattttggaacaagaaagctcatgttgtatcaagtaggtgaccattttttctcttagcagcttcattttgttgtcgggtgtttatacacaataactcatgaattattccttcctgttgaaaggatggggttaggacttgattgaaatactgtagcgttgttagacctaaacctcttgatcatggtaccaaattggtttttaatcatgctgtggaaatcaaggagaactaaactcacataagatttgtttttaaggaagaagatccaaacgaccttagtataatcatcagtgaaagatacaaatcaatgtgctccaaatatattagagacaatagaagaatcccaaatatcactaagaattagatgaaaaggatctgaacttcttttattgctgattagaaaggttgcttgcctgtgtttggccaattcatatacattacaatgaaagctctcaacatctaatctcttaaatagagaaggaagacaaatgtccaagtctatgatgataaaaccaacctttttctttattgaaaagatggtacttagaaataaatgataaagattatttgcttggtgtctcaaggtagtatagcctgttccatttgctagcaagtctaattgtcttccccaaatcatggtcatgaaatacacggtgagtaggataaaaactcacattgcaacccaaatcttgtgtaagcttttgcatagagataagattagtggaccactttggaacatgaagcacatttctaagtataggactaatttagacatctcctacacctacaatgatggttaatgaaccatcagttgtgattattttcctattacttgggcaagggttatagttgttaaatttgtgtgatgaataagtcatgtgatcggtggcacatgaatctataacctatgatttgtcaaaggtttcatttgagacttttaatccaatggaagtaggaaacttaccaaaaagtgccagtgagtaggtacttaaaggtttatgaaaagttcctgacagaattctcagtttttcaatcttatgtgggttgaatccgccttgttccagggatctctcttcaactagttgtataaaagacaagtgtgcttgcccattatccctcagctgtcctccattgtaaccatgttctttgctagatgttgatggcttcccatggagtttccaacattgctcccgtgtatgtcttgctttctaacaataagtgcaccataagttatctttgttatcatggtttgggacccttgaccgatcagcccttttgtgattggttgtgcttgccttctaatcatttcccttgttagcaaccatagtcaattcttccaaattgtgaggttcgagcatgaaacttctcttgctttcttctctcattcaaagtagggagctctttgctaagtatttgaactctaacttggtcaaacttagcattgagaccaacaaaaaaatcataaactcgatccttttggatacaatatttcaggattattgcatcccaaagacatcatgtctcaatgcattgatagtgaccaagttcttgccatagatttttcagcatatcggtgtactctattattgtcttgtttccctattttgcctctttggtcttgacttttatttcatatacctaggttgcatctagtgccttcgagtatgtctagtgaacaacatcccaaatgtctttagcggtggttaggaacatacatgtgtcactaatttcaggtgtcatcaagttcgatagccatgccataatcgtggagtcttgctcgtcataggcattaaacaaaaggtctcctctcgttggtccaactctcaggagatgacttaatttcccttttcccttaagaaaggtatgaacaagttgtgaccattttaaaattcttcccaataagtttgttttccacttgaatattttgtaattcccttatgatgtgactagttattacttccttagattaagtggtgatagtaggaatttttgatacctttgacacttttttttttctttttgtaaactataaaatgcattgaagacttaaataatcagactgaaggctaagtaacatacaaaagagactcgtattagaaccttagctagcgacaatcaaaggtggcagcagtttatgttggttgtgttagagctccaactttgtgatattatgttgtatgaacgacgcaaagatgagtggtcattgcataggttcatgatgagttcactagggtgataatgcaaggatggtagtgtgaggtacagaccagtgcaacggcaaggcagagacaagggtaatgccacaatctctgttttgttatgacgttgcaatctatatattgttcagaaggcagacatgaaagtgataatgaatgtgattattgagctcttcgattgctttcgtgatgtgtttgtgctctatgtttatagcattgaacgaggttgtgtttgtagcaatggcatgattcaaatgagatggaaacccataaggtcaacaataaaggtcaactatgttctttaaacttgacaatgaaggccaaaaaatcttctcttcttgattcccagatttacgagcataaagctctaattccaactatttctagcactagaaataggaaccttcctaacctaattatattagatcccattgattacaggattgtcctaattctctccttaattacataattatatagttataacttccctaattacattattcaaaaatacatctagatgtggtgtatagcattctacggtatttgaaggctactctagggaaaagaattccttttagaataaataaagattgatattggaagcatacattgaagcagactaggcaagatcagtggtaggtaggaggtctgttgagaaccccgaattactccgttctctagccatgaatcatattggtacatgcaatctaccctaggcctctagatcataagcaatgaaagcaaaaaaacaacatttttacaatcatttgatatagatttgtgcaatagaaaatctaaaatattaggaaataattcaaagaataaaatattatgaaatactttaaagaataaaaaatattctaaaatattctcaatatagatgatacttccaaattttcagcagtggatctcccatttttccgtatagcagtgaatctccaatctttccatatagtagtgaatctctaatccttccatactccccctcaagctggcttgaaaatgtctttcatacccagcttgcgagttatgctatcgaactttccattgtgtaaccccttagtaaaaacatctgccaattgtttgactataggaatacaaggcatgcatatcaatccaccatttaacttctctttgataaagtgttggtcaacttttacgtatttggttctatcatgttgaaccaaattatgtgctatattgatcgctgcttttttgtcacaatagagcttcataggcatagaacttgtcactttgagatcttcaagtaactttttcagccataaaaggtcgtaaatcccatgagctatagctctaaattcagcctctgcactgcttctagctaccacagtttgcatcttacttctccaagtcactaggttgcctccaatacatgtacaatagtttgatttacaccgtcgatctgtaatacttcctgcccaatctgcatgggtataagcttcaattcttgagtgaccatgattctcaaatagtaaacctcttccaggtttcctttttaaatacttgagaattcgataggctacttcaaaatgttcttcccttggtgagtgcataaattgactcactacactcactgcgaacgctatgtttggtcaagtatgagattaataaatgagtcttccaactaacctttgatattgatcccgattcaccaccttatctacacttgctagttgtagtctaagattaggttccattggggtttctattggtttgcaaccaagtagaccggtctcctcaagtaagtcaagcacatactttctctatgacacaaatattcccttcttagacctcacaaactccatgcttaaaaaatatcttagggctccaagttatttaatttcaaattcccttgcaaggaacttcttcaaggcttttagttcccctgcatcattactagtaaggataatgtcatccacatatacaatgagtatggctatcttacccgtagttgagtgcttgtagaataatgtgtgatcggcttgactttgtcggtatccacaccttttgacagccttggtgaatcgatcaaaccaagctctaggtgattgttttagtccgtagagagacttctttaacttacatacttttctagctccaaacatactttcaaaacccggtggtaggtccatgaagacttcctcctctagctcaacatttagaaaaacattcttcacgtcaagttgatgcattggccaactcaaattgcagcaagggatagtagtacttgaattgaattaacttttgcaacaggagcaaaagtttcttgatagtcaattttgtaagtttgggtgaatcctttggctacaagccttgccttgtacctatcaatgcttccatttgcctggtatttaattgtaaacacccacttacaacccacggtctttttatctcttgacagttcaacaatttcccaggtaccattcttcttaagaacttgcatctctttgatgattgtcgtcctccattcagtgtgacctaaggcttcctgtatagttttaggcagtaaaacactagagagattagaagtaaaggttgtatagttttgagaaagtctatggaatgagacatactttgcaataggatgcatagtgcaagaacgtgtgccctttctaagtgcaatgggaacactgaggtcatgtgaaacactatctaaactccagtaatctatttagaagagtggcaaatttcaagactgtagtaggcatcctattaattaagatgccattagaacaacctcaccccataaatattttgggacccccatagtgaacattatcaacctagccacctcaagtaaatgacgattttttctctcagctataccattttgctgtggagtatcaaagcatgtggattggtggataatgcccttttctttaaaggttctatcaaggatagagttgaaatattccttcccattttcagttctaataacttgtattcgagtgtggaactaagtttcaatcatggaatagaactctttaaacgctccctcgacatcagatttttcttttaagagatacacccaacagactcgggtatggtcatcaatgaatgtaataaatctcatggttccagttatgtttgtgactagagaaggtccccatacatcactgtgaattaggtaaaatggtttggattcttgataaggatgagacgaaaaatgaacacggtgatgtttagataattggcaaactttgcattgaaatatcaaaggattcaaatttttgaacaaagttggaaataattatttcaaataaggaaaactaggatggcctaacctattgtgccataccattatttcatctttaacaggaatagaaatcacactactgctcgcagcttgagcttgtccacctttgaggaagttgttatcaaactaatagagtccatcagtcatcctagcactgccaatcatcctccccaaatgctggtcctggaattcacaacaagagtcgaaaaattttgcaaaacagttagaatctttggttattttgctaattgacaaaagattgcaagaaagattaggaacatcgaggacagatttgagaattagattttcagagattattatagaacctttccctgcaaccggagacaggctaccatctgcaattcaaaattttaagtgaccagaacatggagaatatgtggtaaaaaagtgtgactgattagtcatatgatcagatgcaccagaatcaatgatccatggtgctgaatttagggaactagtgaatgcactacctgtttgagccaaagaaccagagggtacacttgaaagttggacttgattaatcattttgcagagatgcttgggttgttctttgctaaatggaatctcagtttctgcagtagcttgcattccactgccattcttttctccaggtttcctttccttccaatttgctggttttccattcaatttccagcacttctctctagtgtgccgaggtttgttgcaataatcacaccatatcttaggcttttcatcaggattattcaaaatctgggctgcaggtctctgattgtatgctgctgcagcagttttattggctggtgcagtagcattaagtactgaattttcactgttggtcaatttttttcccatcatcactcccctacaactttcttcttgtctaacttcaaagaatgctttactgattgaggacaatggctcttttcctagaacatgacctctcacttaatccaaatccgtgtttaggccagctaaaaattccataacacggtccttctccactgtcctttgatattgagcactgttttcagcacatgaccattcaaggtcatagaacaagtcaagttcctgccacaaacttttcaacatattgtaataacttgttacaaacatattcccgtgttgtatttctgatctttgttttcaactcataaacttgcgaggaattgcccaaatctgagtacgtctcattcactgcatctcatagttgtttggcagtgttgagatacatataagtttggtcgatctctggttccattgagttaacgagccatgataaaatcatagaattctcagcatcccaggcatggtatgtaggatcatcatagccgatcttatctcttcctctaatgaacagtttcacggattgtgaccaccgcaagaaattttgtccattcagtcaatgagtagtgatctgcaagattggactttcagcaatctgagtcaatgaaatctaaccattctgagaggtctgaatgttggaggaatcccccgaggtttcatcagaaaatactctagacattgtagaggaatcatttaaggaataaaaaaaatctggtacacaaccagattgagaaaagaacaaaaaatctggaatacaaaccagattgagaaaaaaaatctggtagaagactagataaatgctgaattattttattttattttattttattttgagtgatcaaccaaaaatcactcaaaagtccaacacaaagatgcatgtagaataaatttatgattcatattgctaccattacatacacctatttatagatacaatggtttaaatccatttaagggaataacctatttacatgaaataattcaaagaataaaatattatgaaatattctaaaatattctcaatatagatgatacttctaaatttttagcagtggatctcccaccttttcatatagcagtgaatctctaatctttccatattaggcttaagtgacttgagcccatatgggcttgagtcacttattttaactcaaaaagggtcgtaattgattaattaacctcacagagccatctaattaatcaattaacccaattcaaagaccctgttcactaatccctatacaaccttgcataattatcaaaacgctcttatgcacaaaagtgaacctggagtcaatccaacccttatagattgtgtcatcaaggtatatgagctcaaagggggactactaggacccatagaagtattggctttcttagaatccaattttgatgctgatttaacatcccgctacaaagaatcaactacattccaatacctactattcactgtgtatagactccccatgaattgttgtccataatctaacaaggtggtgatttcacctattaagattacctctccaattcttgagttacagatcttttttattatgtaattaattgacatactctaactctaaggagcatatgtcaagtttcattaagtcaaatgttgtggtcatagtcttgtagatcatatatcttttgaatcatccaaggggatacattgtctcaaacccatgaggtatcatgatgtctttattgagaatacttattgccaccacccttcatcaacagtgacccaatccataaaaatatatgaccaccttagggtctcagttataaatcaaagcctcatgttgattttggcatagactcaatgtcctcttaagattaagagtccatgcagtatagtaacttggtgaatctaataatcttatatcatgattcagtgtaggtcttgtctagtatgcatcatatatattagtgcactcaccattggaaaaccatcctaataaccaagataggtcattcctcgagttaggaggtagtggactccaatttcagatggattgcccaaatccatgaactgactgtagactactcattactctgcaagaaacccatgacttggatcttctttgcaactccaaatacgcccaagtcatgtacaatgcaagtgatgtaggcgtgtatgctcaaataatcaattaatgcatatgagataataaaagggaaaccaagaaacatagataaataaatcttaatctgttatatcatgtcatgcttttcagggcttaatcccaacaaggtcaacttcaggttaatatacttttcttagagggaatcaatgacatagagaagtaagaagctattgattgttgcgtgatcaagtgtaaaggttgagtttagatctataactcatggagtatgtgaattgttgttgctcttagaatcaaatgtgaagaagtatgaaggtatattgtgataataagttagcattaaacattgcgtacaatcttatctagcatgactgcactaaacatatcaaggaaaaactagatagtggcttgatttgtactccatacatttcaacagagcggcagttagctaacattgtaaccaatggactagccagttattcttttcaaaaaatcacaagcaagttgggaacataaaatatctactcttcagcttgaaggggagtgttggcaggtagataggatttcagagttagctactttcgaaaatcttgatagcttgtttgatttgattgagcaagatatatcatttgactgtgcaagctgtccacaatcaatacaacttgtataagctgtaaattaaggctataaatcagtgataaattgtggctgaaaattagggattccttcattgtttgtataattgacaaatggtgtctacattcattgtattctagattgtctgtaggattattttccttgtaaatcctatatattcattgtaaattcctccatcaatacatgaagtacaattccatactggtcacatctatatcctcttcctctcctccatcttcctggttttttctttttaccttttttttttttttttccaaaaaactaagtcttgatcaatccgcttcaagaccttggtggatcaagcttctttcaaacctttttgtcaaatactactaccttgattgattaacataaacctgtatcttcaaaaaaacatttcataaaattaatttaggaaacgccaaatttcatttatgcccctatttggaagcttttaaaacataaagaacgtgaatatgaatgcatgcaggaagccccaaaactcatcatctcacatccttacctttatctagaaaaaatattcatccagtgattatcttgaacctcttattctccatggcgataaagtcatggattggatatgaaggattctaaaaactcccttcaacaaatttggactgaaattgccaaccacatgaactctggaataagatccctagcttactagattagcctgttttgtaagaggctgtcaaatgcatcattggatgtctttttcctctaaaaaattcaattagattattagatggatgcgaaagggtaagacccacatgcatggttgtctacattctacaccaaaaaatatgaacgtaagaaaactaataagatcaattagaagctacaaaaaaggaatgtctccttaactaggggaggtgaaactgtcgaaaaaattgagaagggagagaggaaatgaattcaatcctcacatgcttacattcctatgcaagttttgttgttttgctcgcataagttgacgcattcttgttttccattttattacatgcacttgcagtgttgcatttatttttgtaattcatatgaacttgcatttacctgtttgaataaagcattttctacatattactcatgactatataaagttatagatggtgttttatctttgtcctaaatggaaattttcctgacttgttctttctcccctttgttgattcttctggtaggatttaaattctgcacatcaaacttttgcacaact

SEQ ID NO: 12295 - DNA, 918 bp, Vitis vinifera
  Intron number 4 from transcript GSVIVT01025813001 (locus G SVIVG01025813001) derived from phytozome v7.0 (chr-ID chr8 ; pos 11590702 to 11591619)
ccatcatttccaccgtcaccatcctcatgtaagtttaaatttaaaagaatgattttagttcagcgctttttcacattcacaagtgcacatatattagcttcttatcaaatctcacttgcttaagacttaattttttctcagtagcctttcttgtgcatccaaaattggtaaggtttactattaaataagatgtttctctcatgcccatcatgcttatcaaatattaaactgattggaggttaagagtttagaaaaatcatatagggctctaataagagattaatttttagggaaaaatatgaatctatggattgtatggccactgatcttgtgtttcatgctttcaaagatgaagttgattggggattacgtgtcttctaagaattttatcatgatgtttttagaaagatgagactttattgattgggtggataactgacatttgactgacttggtttttagcaattatgatggcaatgaggaaatcttatctaatggtaggctttacaaaatgtggattcatataaacttaataagcagtataaagatcagataggaagttctatcccaggtgaaattgcaatgttggagattatttagatctgggcaattttatcttctgaaattgttgttcgagtattccttttgtgtagggtattcatggagttgttcatgtggctattgttcatgtgttctttaataatctgcttctttcttacaagctctcttattgcctgttggttgttgaagcattatatttgtttgtttgattgtatttgtagatagatgcttaataaatgtagcactagtttctttcttttgcttatcatggtctagttagtgacttaaacccttaaaatcaatgcaatgttttgtttagaagttgtcttttggatgccaatatgctgtttcttgcag

SEQ ID NO: 12296 - DNA, 2689 bp, Vitis vinifera
  Intron number 3 from transcript GSVIVT01015381001 (locus G SVIVG01015381001) derived from phytozome v7.0 (chr-ID chr1 1; pos 3149345 to 3152033 reverse strand)
aggtgacattttaaatcaaagaaatgcttgtgctagtatattgttgtctctggattttccagttttttcttaatttatttccagtttcttttttaaaagttagatgcttataatcaatggatgtaatgatattaagtgagcattttaaaagaaactgtttgagagctccttcaattttttatctaagaactcttcttcattgaaaatccttcggttatgctctttccatatacatcaaaacaagcaaattggagccatacaccagaaaattcttctcttcttatccaaccccttaaatttccactcaaggaggagcttttttcccttctttgtactcttaagaaattttcgtgtctatagattttaattttgtgaaaatcaaccattttttccttaattatctttcataaaaatcaactatttttttctccaacttatcttcaatgggagccatttgcaaaatataaggaattttttttgagtttgtctatctcatcattaaaattgctcctaagtctaagtctaaaccaattcatgttcttgtcccaagctctctgagtcattcccaaagtcatcctcaagacttactcaggcccaccgactctaaacccgtgatttctcaatccattaattcttgattttgttgtccaaaatgagagaggtggggagatacgctataccactcaaggtttacgttaggaggataaagtgtgctcttgtacctctttaagtgcaactccaattattaactcggaagaaagtactagaactcaaattgagcctagttccaatatgtttaatgatcttcatttacctattgctgttagaaacagtaagagacattgtactcaataccctttaaccaactttgtttcatttaataacctttctacatcttacaaaacatttgttaccaaactcaactccattgacatttgtcaagaggttttaggggacgaaaattggagagaggcaatgcaagaggagatgattgtgttgaaacaaggtaatacttgggagattgtggatcttccttttgggaagaaacaggttgggtgtaagtgcatgttcatagtaaaatattgggcaaatgagacttgaaatgtatgaagcaagattggtagctaaggggtgcactcaaacttatgggatagattaccatgaaaattttccttgggtggcaaagatgaataccattcatatattactatctcatgctacttactttgattgactcttatggtagtaaagaatgcattcctccataggaatttggagaagcaggtttacatggagataccatttggtctaaaagaaaattttaagaggaaaaagatctgtcaattgtagacgactctatacaagcttaaacaatcccttagagctcgtttagaagatttgctaagacaatgaagaatacaaattatatccagatgcaaggggatcttacgttgtttgttcaacacgctggaatgggaaaataattactctcattgtgtatgttgataatattgttgtgacaatagatgaattagaataaatgggttaataaaaagagaagttgaaattaaagacctaggaagatttaaatgctttctaaggattaaagttgctcaattaaaaaagggaattataatttcacaccttaagtttagatctcttgagtaactagattgttagggtgtaggctggttgatacactaattgaggctggtcataaacttgatgaaggttcaaagagtccttgaggtatcaatgcttgataggtaagtttctgatctagcatatgcttctagtgtagtgagtcaatttcccaaggagatacaagtggagatggttgcttggataccaagacacttaaaattaattcttggtattttattctagaaaattgggaggatgacacttttagtttatacaaatgctgattgggtaggatcagcctctgaaaagaggtcaatatctggctattgtatgttcttggaatggaatttggtaacttggagacgtaagaaacaatttgtggttgttaggtcgaatgccgaagcaaaatttcaacattggcgtatgggccatgttagcttctcttgataaaaattattcttagtgatctttgaataagttaggaaggtcctctgaagccctactatgactataagtaacctatcagtatggcccacaatccatttcaacataattgaaccaagcacattgaagttaattatcatatcatcaaggagaaattggatggtggttggtgtgcacttcctatatatccttagaaagatggtcagcagacataatgatcaaggaacttgcagatcaactgttccaatccatcacgaacaagatgggaatgaaaaacatttactcactagcttgagggggatgttggagaatccatgtagtaattgtcaaatagattgtgatttaatttggatatgtttctttttctttgtagttatttggtatttatttcttgtaattaatagctgatttatttcttgtaattaattcaatagaataatcttaggaatagaatagaataattttcttttctttttcccattttcaatattataaatagattgtaaatatatccagtgaatccaagtattattcagaaataattctctgttttgaggaacttgaaattaggttttcactttcaggtatcaaattttccaaa

SEQ ID NO: 12297 - DNA, 2139 bp, Vitis vinifera
  Intron number 2 from transcript GSVIVT01000249001 (locus G SVIVG01000249001) derived from phytozome v7.0 (chr-ID chr7 ; pos 20524385 to 20526523)
cttggctgctggtttaacttgtacactcttggtaagttcagtcattgaatactttcagtccatcttttatttcattgtcagttatcatatgttttctggttttctatattgttggttttaaaaattgaatacaagctcacttcgcttgtctgaacagaaacctatttattctgggaattaaaacttctctattctgtgaaatctaagataagtagttatgttattgaatgaaggttttctgttttattaatggatcagggctttcaaactctagtttactactcttggtttgactcttcctcatttgagttttcaagttctagttaatgagctgtgcctatcaaaaaagaaaaaaggaaaaggaaaaaagattctactgaatgagctcaggttctaagcctgaattctgctattctttattttcttcttttttcttttctcttaattagatgttaccactctttctcattctatgactttctcctataatgaattagtattttgcatttggcattgtcaaagaacctggaagacctagccattagaacttgtgtgaagtgattatgtaggaaacttgcctaatgtagctagcacttagtttttgggatttgaaaaatgtcaattgaaacttctagtcttggctttaagtttaattgcgaaatttagcttactgttgctttttcacactttttatgactagaaatgcaagtaaaattgaaaaactgtccatgctgtcgcacaaatatataattaggtgctgtttttaatatttgtgcccctctcctgaccttgtaatacatatacaattttacaaattcataattaaagagcctatccttcgaggatcagtcatggacgtaaccaattcttgttaattttgaagactgatgaccgtcaaggtgatctgtgcagagtagaactgattaactcacataaaccccaagactggtcaatgtgaaataagctttcccttgctgccttaaccttatagtggatgtccgtagagttgaccttatagtaacttctctttatcttttccctaattgggtatccatgtctattgggctgctaagaagctcaagcttccaccagaagggtgggcatctgggctatgataccaccttgctttggtataaggagataaatcatattttccaaagtgaatttctggaatggagtgaatatgatgttctaattctgatgtttgattaaagttaataatttaatatttctagaaagtattgtttcctcttctagcatttgattatgttaggaattgcttaggaagtagtgtaatttcacataagagtcctctaaataatatctactaaaattattttagttttaaataaaaaaagaataaaaacggttgtccacttcctttttattttcactttataagggtagtgcgggactgggtgggggaagaggctgagcaaagcgaggcttagaaaactaagtgcatcttaaacagggtagtccatgatctcatacttggatataagaacatatcccctagtcaagttaccaattaaccaaacgcacccttagttaacatgatactgaaatgagacatcaacacttgtatgaacatccttgaatgtgttccactttcaacaggattgatatttaacttgaggtagtttgtttgctaaaaagagatcaaaattcttaaaattagtggaactgataagaaagaagaacttctctcaattgaggcttctgtaactatttgaatcagttgagataaatctttcaatttaagaagaaaaacaagggacagcatataacttaagattttcatttttattgtttccttttccttgattttcagcagctaatcagatggtaaaatttaaaattctggataccaatgtaatcctccaatgttgtatcaaacttgtctatctaaaccccttatgtttctgctgcaaagattgaaatatttcaggttagctcacttgccattgcttgtgttgacaaaaatttgtttagctgaattactagcaagtcttcaattttgataattatgtggtgtcatggctggaaaattggttttactatcaaactggagatggatattagtggccttgaaaaaatctaacttgcctatttttgttctttcccctgtgacagtca

SEQ ID NO: 12298 - DNA, 2018 bp, Vitis vinifera
  Intron number 4 from transcript GSVIVT01007738001 (locus G SVIVG01007738001) derived from phytozome v7.0 (chr-ID chr1 7; pos 9715277 to 9717294 reverse strand)
ctgttcttggaattgtggtagattctaaagcagatgtaagcacttctgaagtactctaatgtcatgtttcagttacactaatgaattttttggtgttagtataggaactacatacctgatttagcttaattgtttattcaaattggtggaattcttttttgttttgcccccttttcactggagatgcaatataaataagcatctttgcattatagacatgatagtgtttgatattatattctaaagaatgaaatatactatatgaggagcacatgaacaaatgatagtttcttgtcaacatttgatttatcagtcatttttgtttctggatacagtttggcatagagaattagacatattcttgtgtttcagttgtcattgtggtgcttattgggaaattggatgagattcaccttttttcattctattatttttcctccttttcactgtaaatacaatataaataagcatctttactttgtagacatgatagtgtttgatattatattctaaaaaatgaaatatactatatgaggagcacatgaagaaattgtagtttcttgttgagatttgatttgtcagtaatttttggttctgggtacagtttgacatggaggattagacatattcctgtgtttcagctgacattgtggtgcttattgggaaaagtggatgagatttaccctttttcattttattatttttttattaacttctggtaagtaaaattattatgcacccacagtacccagtcggaacatcacctcaaaatcctcaaggatcaaatccattgccaactgagaaacccccttcaaccaaattttaatcttcatgaacccagtgacccagattggcaaactcatcaattcattgatttccttatgttgatattcttgtatcggatgttcactcttgagtttttaatttagcatttattagttattattattcttccaagggaattctactattgttctccttgctttagattataatttgactccccttctgcaattctatacttcacatgttctatattgactaccagcatactgtgcagtagtgatcttttgcacctaaccaattagtttttggaaaaaattagcttcctgtgcaattgataagattgaacttcaagctccctcctttctatctttaacttgtaaattgaagtttacttgaatctgcaaatgtggggcagagttccgcctaatttaccaaattagccaatatattttggattctgattatccttcaggatcctttattgtagtccaaatgcattcttatcattttccccatggctttagaagcattgagcttaaaatcttggaaagtaactttgtttttctgtaacagaatattttgggaagattctgtacacgcatttttaaaccctatcatttgagtgtaattcggcttaattggttgtcgatttgcaccccttagagtagggtctacaaggccaagagtagtcacacctgtataggcttttgtttgttttgtatagccccatgtatagaggacgtttacttagctctttttgatcaggtctctatttcgtgaggaggatttctcatccttctcatgttttatttattcttaattaatacatatgtttgtttctgataaaaataaataaaaaattgggtaagatttttaccacatttttctttcaattgattttttatttttatttttttctcgaaaggagaatgagttagaatatttttcagatgctatgtcttttgtcccaagtgttatttctacagaatatccatgtatattctgctgttttttttttcctaattatccccatggtacataattttgaacttgtgtattcatgtttagttttccttggataaataatttcaaaatcttatttagagcatcgtttacttaccaaaagtaaataattttaaatactatatttactctcacaaactctaaaatgattacctttgttcccatcatttgcagaattttcttgtggacatcaaaggacctgcattggc

SEQ ID NO: 12299 - DNA, 30803 bp, Vitis vinifera
  Intron number 10 from transcript GSVIVT01036946001 (locus GSVIVG01036946001) derived from phytozome v7.0 (chr-ID chr 2; pos 17096649 to 17127451 reverse strand)
aaccctggtcttttggggaagaggtttgtcattgtcccaatactatgagagcaattattttcctgtcttcaaaatgataaaggtacaactgtttcagtaaggaataaatgacatttgcatcattgaaacaatgcttaaacacctggaaatcatgtttgtaagattgataatagctgcatctggatgagaaagctcatgccttgtttcttttagtagattggctttcttagtgtttcttttcgtatgttacactgttaaggatcactacacattaaattgaacatgtggagtgtgtttttcatgtcaaactcctttgcattccatctccattcttttatgttaacatgtgatgtaattaccttttgacaccattctgattggttacatgagacgtcagtccttatgtcagcatttcaagagctcatataagtaaagttagatctggaagataattggttgagagagacaaaccggcatgtaaacagtctggttgcctctagtttggagcttaaatactttgatgctggaaacttaatgctgtgaggcaagtagaattataaccagaattttttaatttttttacttctaagagtattttttatttgttaggatgggtgatgataatcagcccttcaaaacaagggcttgatgaaagaaaatagaaaagggaaagggaatcattacaggaactatggatctcaagataagtggatgtggatagtactcttggtgggtgtggttgatgttaataggatgtgtggcaacctattagttaggtttgctgcagcttgtgcccaaggccaattaggcttgcggcaggtctttaagtgccgcagcttgagcccaagcccattgaggcttgcggcaggtctttaagccctattttctctatatgcggcaagtcttcattatctatattttgtacagttgggttttccatataggagtagcatgtacagctagggtattgggagaaaatctctattgtaattagcggaaacgctattaaatcttgttgtatagttcttatatatacgaaaggtctaaagatgtgaaggccattcagacaaattgacatggtatcaaagctactttctgaaccagaactctttgctgtctcaatctctcgtaatctcttggtttagcccttcgggccctttggttttttagtcaatttgtgggtctcggtggtgtgttctcttggaggatttctggaggttcttgagagttttctgggtttccttttgatctgcagagggtaatttagtgtgttgcggattgcctgaattcgtttatggagtttctgtccattagaagttaatacttttgcatgatgttaggagaaaacactattgtgcgttttagtggaaaaaattacttggcattggagttccaatttaggaatttagtgaaagggaaagagttgtggagccatatagatggcaagagcgaagctcctgccggcggaacagatcttgctcaatgggacaacaaggacgcaagaattgtttcttggcttttgggatctattgagcctcacatggtgaataaccttcgttgcttcaccattgctaaagagatgtgggagtatttgaggcctatctacaatcaagacaacaatgctcgaaggttccagttggaattggagatcgctaactacagccaaggaaatctgtccattgaccaattttatggtggatttttgaatttatggagcgagtattcgagcattgttcatgccaagattcctcaagcagcactaagtgcacttcaggatgttcatgctgagagtcagagagatcaatttctgatgaagttgagatcagaatttgagactacacgggcaggtttgctaaaccatgatcctgtctcctcattggatgtctgtcttggtgaattgttaagagaggagtagcggctgtcctctcaacttggaatgactcaagctaggattcattccgaggtggttaacgtggcctatgccgctcagggaagaggaagaaaccagacaaaaattcaatgctacagctgcaaggaatatgggcatattgcacggaattgcagcaagaaattctgcaactattgcaggaaagatggccatatcattaaggaatgccaaatacgacccgaaaacaaataggcacaggcatttcatacggatgttcagatcccaccagtggctttagatctttcacagaatgttgcatccacttcaactgggccagctggcattaatcaacctggactcacacccgagatggtggaacaaatgattatgtcagctttctttctttcgaacttcaaggtaagagtttccagctcacaccttcttggtttgtagattcgggagcctcaaatcatatgactggcaacgaatatatgttacatggtattcacaagtatgaaggtgcccaacacattcaggttgccaatagcagtacttcctattactgctgttggcactcttggccatggtttcaatgatgtttttgtgtcatcggggttgtctacaaacttgatttatgttggccaattggtggatactaactgtgatgttcatttttctcatggtggttgtattgtgcaggattaggtgtccgggacggtgatagcgaaggggcctaaagtgggacgtttatttcctctacatttttatattcctagtttaatgtctttggcttgtattatagtagcaaataaaagtgaggtatgacataaaagattgggccatccaaattctgtagtattgacacatctaatgaaacatggtcatttggggaataagggcctgtttggttgctgtttttaaaaactgttctggaaaacagtttttgagaacagtttttaagaacagtttttggtgtttttagaaaaaaaattgtgtttgggaactgaattttgaaaaacagtttttgttctcaaaaacaaaaaaaacatatttggcttagttaataaaaaaacatgtttgaaagatgtttttttttctttttcaattaataaaatattttcttcaagtaactttatattataaatttataaatatttttaaatacacatttcatttaaatttaaaaaattatttaattttaaattttttatataagttgataaattattaaaaataaaataaaatatgatgtatgtatttcacatgggtcttttgtccatcctacttttacaattataaattaaatttataagcaatatttaatcattagaaattaaaacaaacatcacataacactaatgagaactagttaagttagcaaatatatataaattctaacataacactaaagtgttgacaaatatttaaaattaaaaataagacaagtcatggattgacattaatataatttgcccacatcacttcagcaatttgatctctacaagctgccatagctgctgcactctcatctgataaatcaattgaatggtttctgctacttgtgctctcttcttcacattcgattgaaaggtcttctacctcatattctctaaacaattgatcatttcgagttgatagacgaatccaattatgaagggtacaacatgcaacaacaattgatggttgcctacttggcttataacaaggcatcatctttaatattggaaatcgggtctttaaaacaccaaaacatctttcaataatatttcgaagagatgaatgtctataattaaaaagttctttatacctgataggttgattacgtctaccccgatattcttgtaaatgatatcgctcacctcgatatggtggcaaaaatccagatatacaaggataaccagaatcaactacataatattttccttcacttggccaaggaaaattgacttctggtctagtcaatgcatctaaaaagacacgtgcatcgtttgctgttccttcccaaccagcataaacaaatgtaaacatcatgtcaaaattacatgcacacataacattttgtgttataactgtttttctacctctaaaactggtttgtctatcagctgggacccatgcactaatatgagtgccatcaattgcaccaatacagtcctacaacaacaaacatttattattattaaggaaataaattaaataatcgtcatgaaattcacatttataaatatttttttataaactcttaccttaaaccatggaaaatatttaggattactagcaacatatgaagacacctcattggtcatattgttaggacatatgagaattttgccaagtcgacataatgcacgtctaacttctttaaagtgtcgagcgacagtctctgtggagtgttgaaaacggtctgctacaaccctcattctcacattatgtcctacgattagtaagaacatagccattgcctcttcaactgtgacaaatcgtgtatcctgtaagttttcatgtctcttaagatgatcacaaaggttcataaatgtttctttatccatccgaaatagttcatagcatgtctgaggatgaccttctatcatatctcttacaaattgtgcaccacttaacattgatgtcctttgaggtgtcttgcataaaaatatttcctcatactcattcataatgtgagcaataaaaatttcatctaaatcatcaccctcttcagaagatgaagttgagtcatatagttcaccactgcttgtgttattatcatccattggttactacataaaacaaatgaactcacaatataaaatagcacgaaatgaatattaaagtagttataatataagtttcataaccataaataacatccatacaatgacaaactaaagagcatggtaaaagattctaaccaaaagataaatagtacatattacaatgtcatcataatagttatgcatccaaacattcacatttaaagtctattaagccatgccattttcctctcatcaggcatattcataaatatctctctccactccggcactgtgaatttctcaacagcttttaaatatttgtcattatctaacagttcaatggtttgtaaggctgccatacaccttgttatgctaaaatcagtggtacctccactagtagcttcactactagttccactcttatatctgtccactctagccaataatgcctcagttctagctcgagatgtttctgttctagcctttgatgcctcaacccaagctttcaaagcatctcccatttgacttaatctggattctttcttacctttacgctctaatagagaatcagttacacgctttccagaacgggtggtcactcctcctgccatttctggttgtggaggatcatcagggatctcagtatctacatccacatgcactccaccatgttccaaattgtcatccatctcatcttcatcatcagtgtttggtggatcttgggtggaagagtagtggagggcaccggttgctgttgatggattaaagatcaatcccaacaagttgtagtttgggcatccctttgagcggaatctttttgcatttgggtgtgcctaatagaaggaaaaaaaaaattcactcttagtgtttaccaaatatttaaattaaaaagtaattagtttaaaagttatttttacccgaatgtaattttgccaggtttcctctagagcatgcactgtgttagtttcagcatcccaaccaaatccagtatgctttaaaagatcagagaactcacggtgcattgcacgtagtctattaaacttttgtttaagctgcttcaagttgaaatttcttttcccttgactattgacctcaagtaagatccttctccatgtgttggtactaaatgtaccactatccatgttacctttattaacttcatttaccatgatgtcaataaagattttctctatattacctctccatgttcctgcatcctcaacatctgttatctcagttgtcatctgtacaatcccatcacaaataagaactctatgaggagacagcttttaaaaccaccaatagaacttaaggctatgtttaaatgagaattaagattgttgacgtatagtgtagtgtataaaaatatgaaagaaaaataaataaaaataaaattagatttgatattaattagattttaaagactttttttttttagtttttataaaatttgaaacaaaaattgggggaaaaaaaaagaaagaaaagtaagtttgattaattttatatttgattaattttaaaattaaaatattttttatatttttttaaaataaatcaaacatgataaaatcatttttattattttttattgatttaatatttaattttattaaaaattatagtatattctattaagatgagataaaaaaatttaaaaagaattaatttaatatttataactaatctaaataaaataaataagacatcaaaataatttaatattttaaaaagtttgatttcaataattttgatttcaataatgttaaaaaattaattttttaatgtttgatttactacaaaaatatacaattaaaattaattaaaatttatatattttaaattatataatcatatgaaaaaataaaaataagtttgaagtagtatatagaaaataatttaataattttgattttattttttactttattataattttttaattatttttgctttcatgaaatcggaaagtgggaagaagtagctttgcttgggcgccatagcatttctaaatcagacaagtatacaaacaagcaacaaaaaatagggaaaatggattatgaaggatgtttggtgaggtgtgggaatttggaatttataaagggcaggttcaaagttcaaacacgtggagggtatgttgcttcacgctgcattcaacccccaactcttaaggtctgtttgtttagtgcagcatccaaacaggcccaaagaatagaggttaaccgggctttggagtctggatgagagagaggaagagcagatttacagagagaaaaggttcttggtgattcaacacctcatcctcttctgattctctttattttttccattttccttgaggtatttcacccgtcaagactcaagcttggattttcccgtttgatttccatgtctttaagtaaggtttttgtttttttttaacagaacaactcaacaaaaatcaaaacgggaaaaaatcaggaatttttgggcttattttcattctcgtttcctagttttctcagcatccaaacaggaaaatataaacgaaaaaaaaaaaaactaacaggtgatcaaaaaaatctcagatctcattctatattccttctcgtttcctagttttctcagcatccaaacaggaatatataaacgagaaaaaaagaaactaacagcaggtgataaaaaaaaaattcgaataacataactgatatctctttatcagatctaacattttcctcaacaaatattgccaaaaaaaacctattttattagatctataaaaaataacttcaacatctgtggaaattacctttgtttcttgctggagatgtcgcgactgtgctggagaagaggcgccacgactgtgctggagagagatgagaacgggaagaaaaagaaaaacacggagaacagatgtgttttttgttctttaattttgttctataaacagtacaaaaacggggaaaacaacattttgttgttctctaaatagtgccattttgagaacacggggaacaacaaaaacaaaaatgactctttcaaccaaacaagtttttggtgttttttgttttcaagaacagaaaacagttcttgaaaacactaaacaaacaggccctaaagatcagttttcatctcttaatttgtgtctcgattgtgctacttgtaaacttggcaaaaacaagaccttaccttttcctatgcatggcagttgtgctacaaaatgctttgagataattcattatgatgtttggggtgttagtccggttatttctcatgctcagtacaagtattttgtaactttcattgatgattatagtcatatcacctggttctactttcttcgatctaaggtagatgtgttctctgtgtttcaaacctttgttgctctaattgaaacgcaattttcagcttgtattaaggtcttgcgttttgatttaggggaagagtatatgtctcacaattttcagaactacttatagtagaagaggatcctttctcaatgctcttgcccctacaccccataccaaaatggggtggttgagttcaagaatcgacatctcttggatgttgtttatactttgttaattgaatcctctgttccatctaaattttgagttgaagccttgtctactgctatctacttgattaattgcttgcctatacagaccttgtagtatgaatctccttatctccgcttgtttggtaatcatcttgagtatcaatcccttcatacttttgggtgtgtttgttttgtccatctcccacccactgaacgtcacaaacttattgctcaatctacatgatgtgcttttatggggtatagtaatgcttagaaaggttttgtttgttatgatgctattgctaacacttgaagaatagggtttcacgggaataattttctttcattgagattgttcttttatagagtttacgacatatacaaatccttcaaatcaggaaactaaatcattgattaaagggaaagaataactcctaacaattactttcctaaaaatacaaagattgacaactaatagctaatttacagctttacaaagttatttctttccatatcagtttcggttttccaacactccccctcaagctggcttaaagatatctttcatagccagcttgccaaatagaaaatcgaattgcctcttgtgtagtcctttggtgaagacatcaaccatttgttcctcagtagggatataggtcatacaaaccaatccgttgtctatcttctctttaatgaaatgcttgtccacttccacatgtttggtgcagtcatggagaatcggattgtgagctactgaaattgttgccttgttgtcacaatacaacttcataggagaagaacctgtcatctttaactcttctagtaatcttcttatccacataatctcacaaataccatgagctatagctctaaactcaaccacagcactgcttctagcaactatgttctgttttttacttcgccatgtaaccaagttgccacctacaaatgaacaatacccagaggtggatcttcgatccactatgcttctagcccaatctacatcggtgtaggtttcaatttgtaggtgtcctcgtgacttaaacagaagacctctacctggtgtcccttttagataccttagaatcatataaacaatttcaaaatgctctggtccaggcgcatgcataaactgactaaccatactcactgagaatgctatgggataggtaaatcaatctcccaacaaacctctgataacgatcccggtccttcacatttttggcttttgtaggttgcagttttatattcggctctattggtgtttcaacaggcttacatcctaacatacctgtctcattaagaagatcaagaacatacttcagttgatttacaaagataccttctttggacctagcaaactccatcccaagaaagtattttaatgcctccaagtccttaatctcaaattcctcagcaagtttcccgttcagtttctctagttcattgcaatcatccccagttaacacaatatcgtcaacatacacaattaagatgactactttaccttcatttgaatgtttgtagaacatcgtgtgatcaacttgactttgagtatatccataatgctttattactttgccaaaacgctcaaaccaagctctaggcgactgcttaagtccgtataaggacttcttcaatttgcacactttcccaactccaaaactttcttcaaaacctagtggaggactcatgaacacttcctcctctaggtctccattaaaaaagacatttttaacatccaattggtgtaagggtcaattggaatttactgcaagggacaacaaaactctaatcgagtttattttagctacgagggcgaaagtctcttagtagtctatcccataggtttgagtaaaaccctttgccacaagtctagctttgtatctttcaacacttccgtatgctttactctttattgtaaacgcccatttgcaccctacaacttttttttcccttggtaaatctacaacctcccaagggccattcttttttaaggcattcatttcctcaaacactgccaatttccaactcgattcatgtagtgcttcttaaatatttctaggtatcacaagttttgaaatatttgtagtgaatgctctatagttgtcagaaaggttactgtaggagatatatttggtagtgggatgtttagtgcaggctcgggttccctttctaagagcaatagggagatcaaggtcaaggtcctgtgcaggaacaactgaggctaatcctaaaccaggttcgggtgcagatatttctggacttggaccaaagtgtgatggtaaacttagatcagtaatagaagaagaagaagtatgtataggagtaggaatagaaggagggttacctgagacatttagagagccatttcctagggcttttggttgaccatgtgttgggatgatcggctggtctttacttcttccagggatttttttccttgaataaaccacaggcttaagattgtttttatttttttttcatttgtagtatttctttttctgacagaccaatttcatattcggattcagtaggcttagtttccttattttctttttcaagagagatatcaagaattacattaggcaaaggttcaacaatctcttaaaaatttggttctactaatttctccccttgaagtaaatttttggtaaaatatgtgacattttccataaaagaaacatccatagttgtgtaaaaatgttttgtaaggggattaaaacatttgtaaccctttttatttggaatatatcttacaaaaacacatttttctactcttgggtctaatttagatcttaacctttttggaatgtgtacatatgcagtgcaaccaaatattttcaagggtaactcagaattaattcgagattctggaaatacctttttcaagcacttcaaaggagtgctatactgcaaaatttttgtaggcatcctgttgattagatatgaagcagttagtatggcatcctcccataagtattttggaatattcatgtaaaacatcatagcccgtgctacttctaacaagagtttatttttacgttcagctattccattatgttcaggggtatcggaacatgaggattgatataaaattcctttctcgtttgaaatggtttccaaaactttattaaagtactcagtcccattattagatctcaaaatactgatttttgtttgaagttggttttcaatcattttgtaaaattctttaaaaatccttttgacttcagatttttccttcattaaatatacccaacaaagacatgtatggtcatctataaaggtcacaaaccatttttttcctaaaattgtggttacttttgaaggtccttaaacatcattgtgaaaaagataaaatggttttgatgcatagtagggttttggaatgtaagttttacgttggctctttgccaataaacaactttcacattgaaatgataaaggatcaaccttttgaaataacactggaaataaatgttttaaataagaaaaactaggatgacctaatctgcaatgccaaaccattatttgatcacgaacaaaaagagaactaatactacttagtccttgagaaattttattattaggtaaattatcctcgaaataatagagaccattgatcatcctagcactgccaatcgtcttccccgagctccggtcttgaaaaatacaataggattcatagaagataacacaacaattagaatctctagataatttgctaacaaacaagagattacaagtaagtttaggaacatggagaacatatttaagatctattccctcagagatttttattagaccttttcctacaataggtgagaaattaccatcagctatccgaacctttttatttccaggacacggtgaataggattcaaacatgtttgaggaattggtcatgtggtcggatgctctagaatcgattatccatggagtagatttaaaacgacaagatagagcatataattcattacctgtgtgccaaagaaacactagaagtaccggatgtcaagttggattttagtagtgcaagaagatgctccatttgctcaatggtgaaggggctggtcttagcctcattagtagtaggaataatggctcggcctggtttgtcacctgtttttcctttccaatttgtaggtttcccatggattttccaacagttctcacgagtatggcgaggtttgttgcaaaaatcacaccaaacccctagtctttcatctgatttgcgctgaaatgcagcaactttattatagcttccacccgtggtaaccaaggctgaaccttcaatagcaactccaagtcccttcttgcccagcatcacattcctccgactctcttctcttctaacttctgaaaaaacttcaccaattgaaggcaggggttgtattccaatgattctcccccttacctcatcaaacttgacattaaggccagccaagaatttgaagattcgattgtcttccatggtcttcttatgatgacgtccattctcggtagatttccactcataggtgttgaagaggtcaaggtcttgccagatccggttcaaggagtttaagtactttgtgacgttgtcctcactttgtcgtatctcaccgagtttgagggttaattcaaagatctgtaattgattccctaaatcagaatacatctgatttacattctcccaaagctcttgtgttgttggatagcacatgtaattagagctaatgtcttcttccatagaattcacaagtcatgtcattaccatggaattctcagcatcccatatagcatagttcggatcatccactgcaggagccttcttttcacccgtcaagtagcccatctttccacgtcctctgatgtacatccgaactgattgagaccatcttagaaagttgtcactattcaagtgaatcgtggtgatttgaatagagtgagattccgaggtggtaggactgatttttgaagaatcagtgatgatgggattgttcaaagaaggttgaggaacaatagtggactcgtttgaaatatccgacatggtttcagagagaacagggattgaaagagaggaagaaggaggatttcggcaagcaaattgctaactctgataccaacttgaagaatagggtttcacgggaataaatttttttcattgagattattcttttatagaggttacagcatatacaaatccttcaaatcaagaaactaaatcactgattaaaaggaaagaataactcctaacaattactttcctaaaaatacaaagattgacaactaatagctaatttacagctttacaaagttatttctttccatatcagtttcggttttccaacactaacaaacttcgtgtatcctgaaatgtgattttctttgagaatcaatatttctttcagtctcaccttattttgcaatctgatcttgccatgcttcccaattttgatgatgtgtcccatgttgttgaatgctttaagctaggctttgtataccagcgacgttggccacgcccaacaacgccccttcccgccaccgattccccacttgatctagtggacattgaacctcaacggtctagtagattactcgacctctggataaatgagctatgcaagaaggactttaggcactacaagacaatcacaattgggatattgtgtcttgtcctcttggtgtgaaacctattgggtgtaaatgggtctattatgttaagtattgatttgatggatccttagagaggtataaggctcgcctagtggcctttggaaatcgataggagtatggtgtggattatgcggaaacttttgcacctgttgctaagatgactacggtacggactatcctggccattgctgcctctgaaggctgggctttcttacagatggatgttaaaaatgcttttctacattgggatctcaaggaggacatctatatgactcctccccaaggtctgttttctacaccatcttcagatgtttgtcacttgaaacagtctctgtatggcttaaagcaggcaccgcgtgctttgtttgataagtttcgtttcactcttcttgatttgcatttttttaaaacaattttgattcatctctctttccctgcaagactgctatcgggattgttgtgcttttggtttatgtggatgatatcgtgattacaggaacggactcccagttgattgagcagttacaacgacacctcacaacttcctttcatatgaaagatcttggccgtatgtagtatttcctcggccttgaggttcaaaccacactataaggtacatatctacatcaacacaagtatacacaggaggtgattactttggctggtcttcaggatggaaattcggttcttacacctttggaggtgaatttgaaattgcaacgagaggaaggggaactactttctgatccctcatcttaccagtgattggttgggagcttaaactatttgacgattataagacctgatatttcctttactgtccaataggttagtcagtttatgcaggcgcctcggcaccctcatcttgctactgttcgacgaatcattcgccatctctaggggacttcttgatgtggattgttctttccgattggttcttctcttttgctggccagtcatagtgatgctaattaggcaagttgtgcagacactcgtcattctgtcatagggtggtgcatgtttcttggaaatgctcttatctcttggaagaacaagaagcaggctcacgtttcaaaatcctttacagagtccgagtatcatgctatgtcctctacttgctctaagattgtatggcttcatgggttgttagccgaacttggttttccttagctctagcctactccgcttcatgctgacaacacgagtgctattcagattgctgctaaccccgtatttcatgagtggaccaagcatattgaggtagattgtcattccatacgtgaaacttttgatgagggtgtgattactcttcctcacatttccaccgttcttcagactgctgatgtgtttacaaaggctcttacccaacaccgtcatcagttcattattgacaaattgttgcttcttgatctgcccgcatcaatccctatttttctctatatgcgataggtctttattatctttattttgtacagttgggttttccatataggagtagtgtgtatagctaagggattgggagaaaatatctattgtaattagtggaaatgctgtgaaatcttgttgtatagttcctatatatatgaaaagtctaaagatgtgaaggtcatttagacaaattgacaattgaacctacttggttaggagaaattaaaatacttgatcatgttcatgtgaccttacaaaagggctctctcacttgaagtggtggattgaatagtatgtccaagtcaagattggacctttctttagtttctggagaccgggagtgtcactttagtgggatggtgtagagtgtcttacctagatcagtgtcaaatcattttcctattttgttggatggaggaggggtaaggagggggtttgtttctttccactttgaaaatatgtggctgaagaaggaggagtttgcggaattgctaaagagttggtggaaggggtttattttcagtggctcttgtaggtttgttctagtagcaaagttgaaagctttaaaggctgatttgaaaatatggaacaaagaagtgtttggcaaagtcatggtgagaaagagtttggctcagttgagaaattatttaaagatttttacactatggttgaaaaccaatttcaaagataaatatgtattcttcatttgataatggatcagaatattttaatgagctcttgagaaattttttgaaagaaaaaggaattcagcatcaatcaccatggcgagatacccctcaacaaaatgacattgctaagtgtaaaaacaaacatttactcgaagtagcacgtgccataatgttttatatgaatgttccaaaatatttatcaggtgatgttgttttaaccacttgctatttgattaacaggacgccgactcatgttttaaagtacatgacacctctcgggtgtttaaatttttttcccctaaaacacgaatatactttgatttacctctaaaggtcttcgattgtactatttttgttcacatacccagtaaacttcaatctaaacttgaccctagagctgaaaaatgtatttttgtgggctctgctccaaacaaataaaggatacaagtgttataatccacaaaccagaaaattccatattagtattgatgtttcttttttagaaaatcaaccttactttcataaaaaaaaaaaattcgggaggagaattaaggagtagaagataatttttggatatttttgtccctatactgaatactattttaccaaagtattcttatcctaataatttagaaactcagactaaggaattaaatgttccagatatagaaaatccttgcttgtccttgcctagtatagatgtttcacaaatagggggagaagtactacaaatgaatgtaaatcatttgaattttgagtttcaggtttatacttgaaggaaacttcatcatcaagcacaagacccaactatcataccaacataggatcaataaaaaactatgggagatggtcatctaaatatttcaagtactctaaatcctcctatttcttcatctattccttctaatactttagagctagatgtgcccatagcaattagaaaaggaacccgttcttgcactatggatcctattgccaaatatctatctcatacaaaactgtcaaaaaatcatagggcctttatctctaagatctctcgcttgtttgttccaagaaatatacaggaagcccttggtgatctgaattggaaattggtagttatggaagagatgaatgctattagaagaagtggtacatgggaaattgcaaatttttcaagagagtaaaagatagtgggttgcaaatgggtgtttaccgttgtagaccctctattttgtcttactagcaaatgttctattatgtgtccatttgatactttatgataattctctgatgacccattgggcggcatcttaggcccacttttgcacttggcccattaggtccactcctaggtcacttagcacattttttttaatcacttagacacctccttaatttaatttcaacctaattcaccttgacactctccacttaggttacctgggtcacttagatgttttctttaggcttaattctttaagactaacttcttgattgatttattttaagattagacgagtatttggcttgatttttttattttttatattttttgattgcttgggatgaattttcaattattgtgattgtgtcaatttgatatcttgtctatttttattttatatttttatctgtgttacagtttaatgtttagattattgttacgtccattgggcacttatttatttttcttgctttattcacttatccatctacttatttattctcaaaaaaaaaaaaaaaaattgcaggtgattggggatcttatattattattattattattattattattattattattattactagtattattagtattattattgttattattagtattattattattgttagtatcattatcattattattattattagtattcatttattgtatgttctctttatcattatgttattcatcttattttagcttcatttttatttatttatttatctttatttatctttatctttatttttttattttctcattttattaactaaaaaaaaaagggaataataataataataataataataataataataataataataagcaaatggaagggtatgggagttgggcagccacataaaaaatatgtaaaataaaatggtggagtagggtttgaaaaaaaagggaagggtcagcaggctgcatggaacgaagaagagcttgaaaaaaggtgagggggagtttcgaagagggggtacaggaaaatgcagagaagggaagtcttgaagaggaagaaaatgatcagctgcaaaaggaggttttcgaggagtctgcatgaaaaaggaggcgggggccattttctagagagaaggaagagtttctcaagagaggataaaagggggactgaagagtttgagggaagtaaggaagtgggagaggtttgaaaaaaaacagagagaacagaaaaagaaaaaaagaaaaaagaaagaaaaaagaggggggagcgggctgctaggaaagagagattttttttttctgatcaccggattaaggaaggctagccgcatcattctggggcccgaaagtcgcagccacacctgcaagtgaacgcatacacaggccgcatcatctaccacataatccaggggaaattcacgtctttaagagacgaaccatcggctggttgcaccgttccccaagaaagggagaagatcctctccatcttgcattttcggtattggaaggagcaccatcatcatttctgaaaagggaacgcacgcaccagactcttgagagcatcacacacccaatttctcttgctgattctaaagagtgcatggtatccaccacaccaggtggaattgattttaaaaaaatcatactgtcactaacaaaagtagcccacgcgtctttgaccaaggtaaattgatttttcctattttcatttggattcatgactattcaactcaatttatgtcagaattttatttatctagttatttatttccaataccaatatattcatgtttttaaattgttaaatttggttttgtattattcccgttatgtattttaagttctttttattttttattttctagtttaattaatcttatgtgaatatatgtatgttggcaagccattaaatttgtttctattaatttttgtttaatttaagatttttgaggttttttattttattttattttattattattattaatttagattactcggtgtgtgcacttcataaaattatttgttattaacttggaatatccatattaattcatttttgttccttaaactattagtttttttagtcttgattgatccataactatcacaacatgcatcatagaattgactttaaaataaataaataaataaataaataaataaatcgtactgtcacttttgttggagagtagcccacgcatctttgagaaaggtaaattaattcttcctgtttgaattttgattcatgactattcaatgccattcataattatttcagaattttatatatatttaggtactcattcccaatgttaatgtattcatgtttttaatttgttaaagttagttttgtgttattcccattcgacctatgcattttaaaattttattgtaaattcatatttagcttagatgttaatttttaatttttcttagctaactaaattaattattagtgatttatcattcttgcttgaaaattatgatttatgtttaatgtagttacaatttattttcttagttcgacaaattagatttttttatttatttacttattattattattattattattattattatttccaagtattggtttgagcaattttgttgataatggaaaagtcataatttttttagagtttggataatttgtgataatggttaaaaatttagaattttgattggcactattttggttctcaattaggaaattcataatttcttttagtttaattttaatttatcttttagtttagatgttattaaaattcagtttattagttcaattgattccatgtcacatcttttcatatctaaagtttgttaaatttaattcatgattcattcttttagtttattaattttagaatttaagttggttaatttattccatttcgcgttgatatattcatgttttaaaataaataaagaaaaagaattattttagttttgattgatcctggtttagttgatattctttagagttttaattaattcgattggtttcatattgtttagtttatgttaagattttttttaattccatttttctattaattatgtgctttcaaattgtaggctattagtttaatctatccccatgttgtcattttgtgcttaaaaaatagttcattttagtttttgattaattttatttatgtgtttgttttttttattattcatttgtttagttagtcgattaaatttatgactccaaatcgtcaatattagttgatacgtatcgtttgtactattttaaaggtcacataatatttagtacttgattaagtttatcttaagattaaatgttattaaagtttcagtgcttgtaagatctaaggtttcggtttatcactttggttatcctttgtcaaattcaattttcggaggctattggaaaatagtgaagattggcctccattcccaccaactacgtaccatctgtttatttattatttttatttttattctcatacataaaaaaaaaaaatataattttcaaaactttgatcttcacgtttcgattttcaaaaattccaattttccaaaaatttctattttcgaaataattttccaaaatttcattttttttttttagtttaattttccgaaattccattctagaagtcccaattttccaaatttacaatttttaaaatttaattttccgaaatttcatttttcaaaaataatccttccaaattttcaatttttttaatttaatttttcaaaattccattctcaaaattcccattttccaaaattccaaatttatttatttatttttttattatttaattttattttaaattattattttttatttatttattttgaaataccattctcaaagagacttccaaaattttcaaactcacttttttttaaaataaaattcacacttccgaaatttcaaatttaattttgaaaattccttttttcaaattttttttttttaaagtgaataagctttcataattccaaaatgatggaatttatgagaattaattcatagcaaatattaattgggctttggtgggggcccgacattcataacattcttttcgaaaataattcaagtaagttgtgctctccattttgttggattttgatttggttttgtatgagattttttttacacttgtcattgtacactaatcttattttcatgatagcgctttattacctactactaaggtacactctcattcccacttcgtttatcatttcatcatcatgacttatttttgaattatgatcattttggtatccattgatcttctagttaattgtcatgtctggttcaccttatttagtagagacccatttttttaggggcttagaggggtgctacggtctttaccgtaccttcccaataagtaacctgatccccgaacccaaactcaggttttttgcagacagcttttccaaaaaaatcaggagtccatttaggggttttattcttacttgttttcccctttaaaaataaataaaagtaagtgacgactccaagtcttttctaaaaatcatatttttcacctaaataaacgaaaagcgagtctcgccgatcgagtgggaacgacatcattaaaaatgcgggtccacaaccgtaaagtgcaattctaatggaagtatagaaaggtacaaggcaagacttatggcgaaaggctttacatagacttatgggattgactatcaggaaacatttgctcttgttgcaaaaataaactctattagagtttattttccttagtagttaactccagttgcaccttgtaccagctggatgtaaaaaatgcctttctcaatggcaatttggaagaagaagtgtttatgagtttaccactaggctttgaggagaaacatgggagtgacaaagtctacagattaagaaagtccttgtatgggcttaagcagtccccgagagcttgatttgaatgctttagaaaaactatgaccagttatggttttcagcaaagtcagatagatcatactttgttctataaatactcaaaggatggaaaagttgaaattctaattgtttatgttgatgagataattctaacagatgatgatattgacgaattggaaaggctaaagaagagacttgcaaaagactttgagatcaaggacttgggtatgttgaaatatttccttggaaaggagtttgcgcgatctaagaaaggtatctttgttaatcataggaaatatgtacttgatttacttggtgagacaggcttgcttggttgtaaagtagctgaaacgcccattgagcctaacttgaagttacacactgccaaacctaaggatgtgaaaaatatagaacaataccaaagactagttggaaggttaatttacctgtctcctacacgcctagacatagcctttgcagttagcatggtgagccagtttatgcactctccaggaccaaaacattttgacgttgtttacaggattttaagatacttgaaaaggacaccaggaagagggttattatttagaaaatgtggccacttacaagttgaagtctatactgatgtaggaaatattatggataaaaaatcaacataagtgattgtacctttgttggaggtagggatttgtgaagtaatgtggatcaaaaggatagatgaagagttaaagattccatagttgtgaaaggcatgtttcaggcgctcctgaaactatcagtgcctcaccttactccaggcaatgcctattgaaggaggtgcggcttaggtgcgcaaggcgctcttcttcggctaggcgcaaagcctaaaaaaggtatgttttttcttctccctccttcttctttttcttttgtttttttttcctccacaaaccttaaacgagtcgcagaggcggagtagagagccctaatctgggtttttttttttttttctaaaaaaaaaaaattaggtcaaaacgcaatgttttgagctgtaacatattttaaagaaaaagaagccaaaacaacatcattttggccctttttccctttaaaacatctatagcccaaaatgttgcattttgccccaacaaaataaaaataaataaaaataaaataaaaaaagggcccaacctagaatggggttttgacccaatatatatatatatatatatatatatatatatatttaaaaaaaggtccagcttagattaaggcttaagaaaaaatggcctaaccagttttgacccaacaaaaatttgataaaaaaaaggctcagcccatattagggttccttgtctcatgcgtgcaaaagaagaagaagaagccattgagtagaggaagaagagaagaaaaagaagaagcattaacatatataaactagggtgtgcctcacttcacttaagtctgcgccttagttgcaccttgcaccttaggctctaggaggactttgtgccttggtgcaccttgagccttttaaaaatatggaagattcctagtccatctcccatgaaagcttactgtgataataaagcaactatctcaatatcacacaatccagttcttcatgacatgactaagcatgtagaagtggataagcactttatcaaagaaagctttacaatgacttgatttgcatgacatacattccaacaactgaacaaattgctaatatactgacagagggactacatgggaagcaatttgaaagtttagttgggaagctgactatggaagatatttttaaactagcttgaggggagtgttgagaaattaaagatttggttcaattaactgagatttgagggatatgatagttgttgtatacatttttgtatttatgttgtttagtcaaccctgtaaattagggattttagctggacattatttattctttcctaattttgtgcattttctttagggagtttcacgagaatggaagttttttgtgaagagcttgaatgcaacctttctagtgttaatcccaaagaaagggaaggggaacgaaggatttaagggattttagatcaatcagtttggtgggtggtttgtataaatggttggctaaggtgttggccaatagactcaaaaaggtggttggaaaagtgatcttagaggctcaaattgcttttgtggagggtagacaaattttggatgcttctcttattgctaatgaggccatcgattctattttgaaaaataactattgtggcattttgtgcaagcttgatatagagaaaacttatgatcatgtgaactggacttttttgctttcggttttgcataagatgggttttggtgaaaagtggattaggtggatgaaaaggtgcattgttttgttcaacgacacttcagttggtttctttcagagctttagaggcttaagacaagggaatcccctatcaccctacttatttgttgtagctatggaggcactcaactgtttgataaaaagagtagtcaataagggcctcttaaagggctgccaagtgaggggtaagggtggagaaggggtgaatatttcccatttgctgtttgcggatgacaccttagtattttgtgaagcctctgaggagcagatgacgtatctaagctgattgctaatgtggtttgaggctatttccgggctgaaaataaatttggagaagagtgagttaattccagtgggagaggtgaatgatattgaggagttggctcttgagatgggttgtaaggagggtgggcttccatcctcttatctgggactctgacttggtgccccttttaagtctgtagcggtttggggtggcgtggaagaggtttcgaagaaaatgagccatgaggaaaagacaatacatatccaaaggagggaggattactcttatttcaagcaccttgtctagtttgcctatttactttatgtccttgtagtgcatttcaaggcccgttagattgagattggagtagattcagaggaactttctttggggtggtggggctcttgagcggaaaacacatctaatgcggtgggatatagtttgccttgacaagaggaaagggagcttgggagtgaagagtctttccactctcaatgaggctcttctgatcaagtggagttggcgctatgctattgaacaagaggtcctttggaagtgtgttattagtgggaagtatggggaagaagaagggggttggtgctttagggaggtaagggtttggtgtaggtgtttggaaagctataaggaaaggagtgggggcttgtgagtagtaaaatctcctttgaggcgggtaatggtcaaagggtcaaattttggaaggacaagtggtgtgggattggtccgttacaggactcttttccgtcgttattttccttagcatgttctaaggatatgtgggtggaggatgtttgagatttttctatccttgggaagggggttggagcttgcctttctctaaacccctcaatgattggaaagtgggaagcgtggagaggtttctttcttgcttggatgggatgagggtgaacagggatgaggaagatagggtgcgttggatagagactaagaatgggaagtttattgtgaagtcgctttatatggctttggagtcgaggactttgatttcttttccttggagtaacatatggaaggagtgggtgcaccctagagttagtttcttcgcttgggaggcgacttggggaaaagccttaactttggatcaagtttagaaaaaggggtggtctttagcgaatagatattttttagtcatgttaaggaagaatccataaaccatctccttgtcccttttgtaaagacaagagtcttgtgggagctattgtttgccctttttagggtatcttgggtgttacctttgtcggttagagaaactcttctagggtggcatgggccatttgaggacaacaagcataggaaggtgtggaaagcggatcctttatgtttgttttggatagtgtggaaggcgagaaatagaattgcctttgagggggaagagctctctatccaaaggctaaaaagttcatttgttttttatctttggtcggaagcaaaggggtgcttagatgatgttcctcaaacttttttcagctttctagattggttgggccattggtgagggtggactagttgtattccttttattttgtaacttggttttattgtggtggaggttggtgatagctgcttactttttgtataccttgggctgctcttttggcagccctttgtaatatattttcctatttatctataaacaaaatatataaaaaaaatttgtgcattagactttcctataagaaggaaactgtatagctgtgtaaataatcgattttagttaagaaaagaaatattctttttctttaggctcttcatcaagtgtctttttgggatgagcaggagaatatgagagccttaatggtgtaggaggtggaatctagaaaggaggcgagggaggagttcaaaaaatgggtcttggagacaagaatcaagagatgtgtggctgaaagagagtcatagaaacacaagtttctttcattggatggctaatgctctcagacaaaggaactatttggctaaaataaagataaattgtacttagctttcgaaggaaaatgaaatttaggatgtggtggcttgggcatttcaaattttgttgattgatcctaaggattggtgtcttagtttgagtgggatgacttttgatgaggttagaaggtgagaatgctgcaatgttgaggggagtaattcacaattgaagaggtttcctacgccctgtcacagttgagtggggataaagtgcttggtcttgaggggttctccatgacattttaccagttcagttgggattttgtgaaggaggaggtgattggattctttagagaattccatgagcagggtagatttgtaaaatgcttgaatgctacttttctggttttagtcccaataaaaggggatgttgaagatcttagagactttaggcctactattttggtgggacttttgtataagatgttggcaaaagtgttagctaataggctaaagaaggtggtgggcaaagtcgtttcttcattgtaaaatgctttcatagaggggagacaacttttggatgtggtcttaattgctaatgagtctttagactctttgttaaaacggaaggagtgtggcgtgctttgcaaattaaatatagagaagttatgtgatcatgtaaattggaatttcttacttatgctacaaaaaatgggctttggggataagaggattagtttgataaaatggtgcatttctacaactagattttttgtccttgtcaatggtaccccatctggcttctttcctaactcttgggggatcatcttttgccctatttgtttgtgattggtatggaggctctcagttgccttattaagagggtagtgagtgggatttttgtgtctgtttgcaggatgttaaggaggggtggtgagggctcccaatatcacatttgttgtttgttgaagatactcttgtattttgtgagatttcacagaattaaatggttttcttaagctggttgttaaatgcggttcaaggttatttcagggttgaaaatcaatttggataaaagtgagttattaccaattagtagggtggaaaatttagaggttttggccttagagcttgggtgtgaggtggttgtgcttccttcttctcacttgggtctttctttgggtgctctagtcaaatccacgatagcttgggatgggatggaggagaggtttcgcaaaaggttagctatgtggaaaagacaatacatttctaaaagagagagaatcacacagattcagagcactctcggtagtatgcctatttattttatgtccttgttgaccattcctaggtcggttaggttgagattagagcaaattcaaactcctttggggtgggagggctcttgtgtggaagccctactaagtaaattgagggattgtttgctcggagaagaggaagagtggtttgggtgttagatgtctctctttgcttaataggactcttctttgtaaatggtggtggcgctttgcggatgaaagggggctctttggaagcaaattattagtgggaagtatggaatagaaaaaggggggtggtgctcccatgaagtgagagtggggtatggggtgggcctttggaaagctataaggaatgaatggaatctcttgagtgacaagattgcttttgaagggggtaatggtcgaagggtgagtttttggaaggataaatggtatggtgacgaggccttgtgtgtttttttccctctatatttgcacttgcctcctcaaaaggggtgcgagtgcaaacgtatgggactccatgattgagggtggtggttggaatccaacgttctctaggacttttaatgattgggatgtggatattgtggagacgtttctataaaaagatccaacagaagagggtgtctcaagacttggaagatagggtgctttggatagtgacaaagtgcaggaagttttctgttaagtctatatatgatgttttggagccaagtgatgcagtcctttttccaaggagtatcatttggagcccgtgcgttcctcctaaggcgggtttttccatttgagaaacaacatggggcaaggccttaactttggatcaggtgaaaaggagaggatggtctttagcaaacagatgcttcatttgccatgagacgattgatcacattctgcttcattatgttaaggctagggtgccatgctgcttcgaacttatagtttgagaaagaaaagcaagcaccacacaatcttttattcttattcactaagtcttttccctaggttctttgatgcgacttttcgttcttcaccctagctcggataagactgaaagaacaagctcccgcctactgactgaataaaggctggtgcatatggctctttgctctctttggagtgtctcgggtcctatcctcgtcggttggagaaattcttcttgggtggcatggatcctttgtaggcaaaaagtgcaaaaaggcttggaaggcaactcctatttgtatttttttggatagtttggaaggaaaggaacatgcttgcctttaataatgaggagttgtaggttcaaaggctgaaaaactcctttatttgtactctttaggcttggactaagttgtgtgttgatgaaggggcctcttccttaatcaatttttttgattggttgggctctagatgaaggcaggtggtgttttttgttacccctttttttgtggattcttctttttggcaatagctgtatacttcctgtgtgcttttgattgccttttgagtgtcttttctactttttcaatacaatcttattttacctataaaaaaaaatgtatggggaatttggcaatgttatggtttaatattgttgtctattgtcaagtcagaaggcattttcttgtgctttacgttaatcacttcttttgtttgcatttagtttgggtcttatttaattatttatgttttcagatttggcaatctggaaaatctctgtttataagcaaggctcatagaggtttctttttctatttgatattctttagatttgagttctatttagagtctagcaagttttctgctagtagtatgaactaattttttaattttttaattttgaggagttggtgcctatacgtctatattagcaaaactattgtggtgatggagcaaattatcagagacaatcatgcacatattttgcaatccatcaatgatttgtctgttaagttctcttcttctgagacacctaaaagatcttggcaagattcccatgtgtatcttctctctaattctttttcgttattttatttttctgctttgttgtagacactttgaaagaagctctttcttaacctaaacactatatctttcgagcataaggcctaaatcctatattcatggtactaatctcacactaaaatttatcttttcctctaccatccagaaattgtgcctgcagttgccagctggatgatgcttagtgacacattttgactagtgggatcaataggtttaaggtgttgtgcttggttcaagaaagtcatttggtgtggatttggaacttgtgttctctaatgatgtgtctagaccttcttcattgctcttggaaaggcgaaacatgagcagaactctagtaatgcttaacatgatgagaagaactttgcttcttttgtggcccaaaaatgagaagagttgtcatcctacttaaacttgagtttgagttggtaaacttaataatcatacttgtctaaagaatacatatgactattatatggtacattgggttttcaacactgcactgacatagagttggctgaagacatccttttatgttggatatggagtactttcaatccaaataaaagagtgccaatattcaatcaccttctttgatatgtagttttgggttgggacatggatggtttttgtaaggagatcaattttctctctatttttgtagtagccatgtacctcttcttccatgtttctttttgtatctttctatttcttaatatgaatgcaagaatagtttcttatatacatgataatgagaaaaagaaattgtcatgatgctttttcattttagttttttatctttgatgtgccaaatgattttcgttctcaactaactctatttctatcaattagtgtgaagaagtttgccgtttggcattgaagaggcg

SEQ ID NO: 12300 - DNA, 4785 bp, Vitis vinifera
  Intron number 4 from transcript GSVIVT01035919001 (locus G SVIVG01035919001) derived from phytozome v7.0 (chr-ID chr4 ; pos 5833032 to 5837816)
ctcagaggtagttgattcttattttggttttatagatggaattgcttttgaagtggttgtgctactctgtatctgtgaacatgcaaacacacacatgcataacttcacagtttgccttgatgatgtagtgaatgtagattagatgtggccttttctcttcaaatccatttctacatggtagttttggcattttacccatgttttgattatgattgtttggttttcatttaagagtgaatctttcttttacgatcatcttgagtgcatgtatctcaattttttacaaaattttatgctatacacaaagaactccagtaaaatatgtaaacttattaaatccaaaatgaatacgaagagatgctggtatctacaacgggatgtgctatactgaatacatacatgataaaaattgtgatgaacatacatttttttaataggttaacaaagatataataaacataaaaaaagtagggtgcaaccatatatacatgaagtatacaaagggaaccataaggggaaatgaagaaaacaatacaaaaacccactattccctactcaagccattaatgaaatcccacccagaaaaaatcattctcattgagatctagatcatccttagagggatttgattaaagtctccttcaatcttggttagagaattcctccttattgaaaattctattactatgctctttcaatatgccctaaaataggcaggagccggatgtcatgttagaagtaaaaatttatgagattaaggttatggtttccttgtggggagggatagaactagagtgtccttgttatagtttgctgatgataccatatttttctctaaagcctctttggaccttcttcaaaacctcaagattatccttttggtttttgggcaagtatctggtttaaaaatcaacttagaaaaaagcaccatttcaggtattaacactaggcaggagctgttgtctagttgggctttggttttggattgcagagtgtcagagtggcctttgtcttatttaggccttcctttgggagggaacccaaagacaataggcttttgggatccagtggttgagagaatttcgaggaggctggatgggtggaaaaaggccgatttgtctttgggagggaggattactttaattcagtcttgtctgtctcacatccctagctacttcctctccctctttaaaatcccagtatctatagcttcaaagattgagaagatgcaaagggattttctttggtctggggccggggaagggaataaagatcaccttatcagatgggaggttgttagtagaccaaaggagatgagaggtttgggctttgggaagacttctatgagaaatattgccctcttagggaaatggctctggaggttccctagagaaaggagcggtctttggcataaggttattgcgagtatatatgggacacatcctaatggatgggacgccaacacggtggttagatggtctcacagatgtccttggaaggctattgctcgagttttccaggagttctccccttttgtccgcctagtggtgggcaatggggagagaactcggttttgggaagatctttggtggggaaaccaaactttgtgctctcaatttgctgatctttacagagttatttctgtgaaaaacctcactgtctcaaatgtccttggcaattccttacccctgtcttggaattttaattttcgccgcaatctaacggattcagaaattgatctccttcagagattaatgtcctcccttaattctgtgcttttttccccttcttcatcagactcaagagcgtggtctttgtcttcgtcaggcttgttttcagtgaaatcttttttccgtgccttgtcaaaagtttcaaatcctttaatgttccttccggtcaagtttttatggagctcaaaagtcccttcaaaggttaaggcctttgcttggttagtagcacatgggaaggtaaacactaatgacaagttgcaattgagaagaccctacaaagccctctctcctcaatggtgcattctttgcaaaagaaatggagagtcgattgaccacctttttcttcattgtcccgttaccattggactttggcacaggttgttcaatctagtagggttgatttgggtccctccaaggagccttgaggacatgttggttatttcttttaaaggcttggggaactcattaagaggcaagacactttggcaaattgcttgccttactttgatttggatggtgtggcaagaaagaaacaataggatctttgaggataaagggagaacggaagagatggtttgggatttgatccggttttattcttctctatgggcttcttgtactgaagcttttagaggagttcctctaagcattctataactcaattggattggggtttgcatttcaagagtttgaagattgatggggtttctctttgtttttagagttctattgttgggagttttttccttgattaatttgtgtaggaaggacctctcatccttcccttggtttttttctctttctattgtctcttttcctgtatttgttcttatattaatataatcttcttcgtttctgataaaaaaaaaaaaaagcagagaaaatggtaagtgcaatcaagaaatggtcaaagtttgttaatgaagctctgcattctatcgtggaatgttagagggatcaatgaataggataagcaaagagtggtcaaatccctgatcaggttgcatgctgtgggcctggtttgcttgcaagaagctaaactccaatggatgtcagtccagatggtgaggaggttgggagtctgtaggtgtcttgattgggaggctgtggattctaggggtcaagcaggggatatttggttttctgggatagccgttaggtggagctcatcaaaatggaagtgggagcttattcgatttccttttgtttcaaaaactgtgaggacaattttgtttggatattctcaggagtttacggtccagttcagaacgaggagagagagaatttttggaccgaattaagcgatatcagaggtctttggcatgacccttggtgtgtaggaagggattttaatgttgtgagatttcctggggaaagaagggactgcctaagaggatcaacaactacttcctacctaattctcaattaaatctaacaaggaaccattattaatattcaaagaaactacaaacccagaaaacaaaggttttcaaaaggtgcttttcactaacacttctgaaaattcctcagccttgaagcttctcctattttactctctgcaaatgctgcatatggtgcacaaaggagccagtgtctgaacctttttttgcttccttcgaacaaaacttcaaatccaccctagtagcaagtccgtccctcattgacctcagagcactcaaggaaacccaaatatagtaaataacaatgtctacaaactgctagctaactcacaatggatgaagatatgattagcttactcctcatcccctttacaagaatcacaccagttagcaacagaccattcgcctttcagaagctggtctattgtaaaaattttcttctacatggcctctcaaatgaagacacttatcttgccaggtgccaaaggaacccatatctccttcactggaaaagatcccaatcacattggatccagaaagctgtaaaatgattaaccaagaaggtaccattctttattaacttccagatatcttttcatctcaaccttctttgaccacaactgactgtagacactgtagaaatgcatgccccattccaactctttatttgtttattttttgaatgcacaaggaacaaatgtaataataggtgcctgacaaacaaagggggtgctaccctagcacacaagaggcatccaaggtacaacaaggtaataaaaaaacaccaaaaacaacacctatgactagtccatacctaaaaccattccccactctttattatggaagctcctctataagtgagggagctagtaactatgatccaccagcccatctcaaagatcagttacctatgcaaagcaatctcagacaaaactagaaaggagtctttcagtggatgttctccacaccacatcaagccaaaactttgtataacaaccatagcctactctgaccagaagatttccctccgtgcaaagctcctgcagcattcattatgaaaaattgcagtaatagaaattcatttggtttgtttggctggtctttctacactagtagaactcttggacccatagtagatgacaacatgttttgtattattaacatgcatttctgtttagatagatttgaattgggttagaggttgcataacacaataaggggaggaagagagatggtttaccaatattgaggcttggggaaaattaacttttagcatatatgcctttttaggcttgttagccttctgccagcatagtctatccatttcttttactaaattttagaaatttttagaaaatcttatgtttttggtgcctgttctcctgccctggtaagggaatgagtttaatttgcttgctcagttaagaaaagtagcaatagctttaacatcttttttgttatttttttttttcttgagtttaactttcttgtttaatcagttgatgtaaactatatgaaaatttgatgaatacctctgctcaaatacaataaaaaaagtatgtgaatactttttgttcttataaacttttatttgattcctaacatgtattttgtatgcagagtttcacccttgagctttgaacttgaggctactt

SEQ ID NO: 12301 - DNA, 4635 bp, Vitis vinifera
  Intron number 5 from transcript GSVIVT01032792001 (locus G SVIVG01032792001) derived from phytozome v7.0 (chr-ID chr1 3; pos 736052 to 740686)
tggttttgattggaattgctccgggttcacctgaggtatgcaattattttagttctgtcttgtgccaagtgcttcaaattatttttttggacaagcaaatggaataatgtgtacaaaaactcactagctgattcatgttatgctctcatatgctttagtataaggtttgatgcttcttatttggatcaattcaataaagttgtgagtccaatgattacccataagtgagataaatgctgggctaccagggtttgtatgttcagtggctccttgttgagtttatgttgttggttgtttcttgaaaatgtttattctggtggttgcagtctgatccgctgctctggctcggccctcaagtaatgcccatgtatgattaaattatttctttccatgattgatatgatatatggagcctttagatgtgtctgcataattggtatgactggttggctgagccatgagatcaggagtgtctaaaccctgttgggaaatctgcagaactgggttcaaattattatatctgaatgatgcatgccaattaaaacccctttggggttatgttggatttgatacaagtgctttggtgattaaaatcatttggctgcaggagagctgatgaattcaactagatgagctggaatattttctcagccctgttttaacactggaccatctctgaacatttgtcttgttgcacaattgaatagaagcaaattagatttgatcaatctgttaaaatgtattcagaaagtgtcaccttaacactatgccaccctgtgcttccattagacaaggaaatggaccttgttccactttgttgcagaaaatgcacttttttccatggcaaaatgaaactgtgaaagaaatttcccagtttccatgacttcccatgttcaagtttctagatcattgtgtgctgtgccggatcaatcatgaaaatgctgattaatgtgattagtgaacaatgataaaagaatatgatttaacgaagttcagtcgctatagtgcactatagattgtattgcataggtaccaaatctgttgtaaagatctgaatctagatacacaaattccttgtggttatcttggttcaacacagtaacattgatgatgagatggtagtgagggggaaaggtagttagaagcaattcaagttatttgaatcatctgaaggagagtatgtttttggtttctacagtttgaagtcaatataaaggttggcaactttggtagctggcaacttgattttttctttttttgataatgaaatttataagaatttatagtacttggacaattacaacagctgtttttcagttcttgagcatgttacggtggattctatgccctcaatgcactttgatgagtttcttgatggactgttggcccacacgactcctaaagacaaggaggtgggtggccatgtttccaagagtcctgcccatctacaaattaggctcttcaagtttaagcggccttgtgtaagtggtgttggtgttttgctagtgaaagagatttgttgtggaagaaaatcatatggggaaggtttggggaggaggaaggaggatggaagtcaggagtggtgagagattcctatggggttggggtatggaaagagattgggaagcaatgggagccttttaattcaatgatttcctttgcagtaggtaatgagaggagggtgaagttttgaaaagacaggtagtgtagtgaggagcccttatgtgagacttttctgttcttgtttgccgtatttgactctaaagaggcattagtagctcatttgtgggaacattaagtaggaaattggaacttccaattttgttaggaacttgaatgattgagagttgggtatcatggagtgttttctttctaaactccagggacattcagtgaatagggagtaagaggataaagtagtttggaaatgcgatagtaaaggggggttttctttgtaagggggctttattatttgttgtagattgatggtactatcctttcccccctaaagatagtttgaaacccttggattccttcaaaggtgagttttttcacttgggaggcttgtcgggggatggttttgatggtggattagtttcaaagaagagggtggattttggctaatagatgtacattatgcaaagaggagcagagtccattgatcaatttctttttcattgtgacaaggtgaggttattatggttgctgatgttctccatttttggcgttcggtgggttatttctaagtcagttagggagaccctcttaggatgacatgattcttttatagagagaaggtgtattaaggcttggagagttgctcattcttgcattttctagatgttctagaaggaaagaaatatgagatgctttgatagtgaagaattgtttgattaaaggctaaaaaatatatttctaaacaatttctctgcgtgggttaaggtgtatataggtggtggttatacacatttaattgattttatagattggttgggtcttggttgagggagtattttttgcaccctcttttttgtgttttgcttgatactctttgtataaaacttgtatactcttgtgcattttttgccttttttattaatacaatctcttacttattaaaaaaataaaataaaaaattcaaagcgggcttgtgcttaataggccaacctagttcatcaggttttgccaaagggtttttattgcgttgtcccaaagcatttaagttgaaccccaggtcaaaaaggagctttggggggctggcaaacagcggaccaagggctaacacttctcacaagcttaacaaggtcaaggagtgtttccaacactcttagtccaatagagagaatgacagcaacaacaaggtttttgtcgatcccttatacaagggtagttttagggttcaaaggagagtgttttgggagttgatgacactcttttggtagaagtactagggttcgaaggtaggagagtctcttttctttagggagggttgtccccttcttcctttgaggtttcatcgattgggatgctagctgatggtgataggcctttgaattaactcttagtaaacggtcgtggctgggagaagaagtctcagttgaaagaggggcttcctagtgggtctttgggaggagaaaattgattgcttaaaatgctgttcaaagatggttctttgctggggtttctcaagaacattgtggaagaccctttttgtaaggatgttgttgtcagatctgaggagtcggagtcttccaaattgaagtcaacttgctgtttgacgagagaggtgcatccttcaaatggcctctttaatacgtcgactattttcaatagctatgtggagatgccattggtgggttttgggaaggagattatcttccttttgaggaagatgaatgcaaggagagggaatggtgtcttttttgggcggctttaacacgagcaagaaacgtagaaaggtgtggaaggcagcccctttgtgtcttttttggctggtttggaaggaaagaaataggattgcatttgataatgagaagctttcaattcataggttgaaaaattcttttgtatgtaatctttggatgtggactaagtcggttgtaaatgaaggccctcttcctttattctgtttttttttattggctaggtgctagttgagggctggtgatttttgtatcccctcttcttttgtttgtgccttttggcgcctcttgtataccccctgtatgcttttgggtcagccttaaggtgccatttttctaatatatttcattctgtgtgtttacctatcaaaaaaataaaaaaaaaatggtgtcaaggcttcgtggggcaagaggaaaccaaactcgtcttcccgttttgagagggagatctagaagttggagtgttcggttaactgcaataggtctcctatgatagttaggagcagggggggacccggggaggagtaatggggatcaagatcttgttcagtgaggatttcaagttgagtcattttttgatgtggtaagcagtgggtgcttcagagtaggctgggaaaaacttgaggaggatttcccatgttgttctctttgctttcattttgcctttgggcgctttttgtatactacatgtgtgcgttattgcactcgttccttgtgtttttaatatattctcgtattttacctatcaaataaataaaagacaattacaatgctagtttgggtgcaaacgttcatggatattcttatgcttttactagtcttttggctaaaatcaggtgtattcattgatattctttattttgataagagttgaatattcatttgtttgctgtttgcttgcaaaagttcatggatattcttatgcttttactagccttttggctaaaatcaggtgtattcattgatattctttattttgacaagagttgaatattcatttgtttgctgtttgcttggtttcacatgcatccacttctattttcagttatttatttagctttttttgctcattaacttgctggaattgtcttgttgttttacttggttgttgggaaatctttctcctcagttttttcagagatttcctggtgttctgattttaatttccacatcctatttatgcttacagaggccacagcttgtcaaagggaat

SEQ ID NO: 12302 - DNA, 7565 bp, Vitis vinifera
  Intron number 1 from transcript GSVIVT01030567001 (locus G SVIVG01030567001) derived from phytozome v7.0 (chr-ID chr1 2; pos 6804064 to 6811628)
ataggttctgcacctgtcagtcttaaacattttttgtcaactgagcttttcaagattggtgggagaaggcctatttcgaatattatggattcatcgaacacagatggttccagacgtaagccacgacttacggctacttataatactttaattgatttgtatggtaaggcgggtcgcctgaaggatgcagctgatgtgtttgcagaaatgttaaaattgggtgttgcaatggatactattactttcaacactatgatctatacttgtggaagccatgggcatttatcagaggcagagactttgcttaccgagatggaagaaaggggaatatctcctgacacaaaaacttacaacatatttctttctttgtatgctgatgggggaaacattgatgcagccctcaagtgttacaggaagatcagagaggtgggacttttccctgatgttgtaactcacagagctgttcttcatgtattatgcgagaggaatatggttggagaggtggagactgtgattgcagaaatgaaaagatctcgtgtgcgggttgatgagcattctatccctgttgttattaagatgtatgtaaatgaaggattgcttgataaggcaaaaatctttttggaagaacatcttttggaggatgagttatcatcaagaacacgtgtagcaattatagatgcttatgctgaaaagggtctttgggcggaggctgagaatgtgttcattggaaagagggatttaggacagaagaaggatgttgtggaatataatgtcatggtcaaagcttatggcaaagcaaaactttacgataaagccttttcactcttcaagggcatgcgaaatcatgggacctggcccaatgaaagcacttataattctctcatacaaatgttttctggaggtgatttggtggacgaagcaagaggtatcttagctgaaatgcaaaaaatgggattcaaaccgcagtgtctaaccttctctgctgttattgcatgctatgcccgactgggacggcttcctgatgcagttggtgtctatgaagaaatggtaaggttgggagtcaaaccaaatgaagttgtttatggatctttaataaatggattttcagaaactggaaacgttgaagaagctctttgttatttccgcaaaatggatgaatttggcatttcagcaaatcagatagtgttgacttccctgattaaggcttatagtaaggtggggtgcctggaaggagcaaaaacactctatgagggaatgaaggatttggagggtggtccagatattgtggcatcaaatagtatgataaatctctatgctgatcttgggttagtatctgaagccaagttgatttttgatgatttgagacaaaagggtagcgcagatggggtttcatttgcaacaatgatgtatctgtacaagaacttgggtatgcttgatgaagccattgatgttgctgacgagatgaaacagtcggggttgctgagggactgtgcttcgttcaataaggtaatggcatgttatgcaacaaatggacagttgagtgcttgtggtgaattattgcatgagatgatatcaaggaggattctacctgatactgggacatttaaagtaatgtttacggtgttgaaaaaggggggccttccaactgaagcagtaacacagctcgaatcatcttaccaagaagggaaaccttatgctagacaagctgtaataacctctgtcttctctacagtgggtttgcatgcttttgcacttgaatcctgtgaaaccttcttaaacgctgaagtagatcttgattcttctttctataatgttgcaatatatgcttatggagcatctggatcaatcgacaaggctttgaaaatgttcatgaaaatgcaggatgagggcctggaaccagatcttgttacttatattaatcttgctggttgttatggaaaagctggtatgcttgaaggtttgaagcggatttacagccaactaaaatatcgagagattgagcccaatgagtccttgttcaaggctattatagatgcctatagaagtgccaagaggcatgaccttgctgaattggttagccaggagatgaaatttgcctttgacacaacaatgcttccactctgaatcagaacatgagcttgatgaaccatctcctggtctttagaatctgcagattttgcatgcttgaagctattatcttccggtggaataagatgtatagagaaaaccttctgcagcaagttcaagtttgagggtgcaggtaaccatgtatggacagtgcaagaacacagccattgatggaagatttgaaggtaattttgggtttgatgaattacatgtaaaatctggatgtaggggacagtaaattgttagttacaaggtgtattatatttattatgcatgttttctagacagatatatatgaatagaagctttgacattttgtttcaagaatttttccatgcctgtgctgtattttggatttcataagagatctctcaaattggcttatcccagaggacccagaccaattgatgccttgggaagatacctagccatttgtagctctatacaatatacaatcacctgacaattttgttaatttttcagttagaaaactttctattaccataactatactgttaaacaggaatattttcatatgcaggagatatatatacgtccgtctttgtgtgtgtgtgtgtgtagaagaagaaaaaaaagaattagaacttacaacaattcatgcttgaaggagtaatttgaaaaatagggaatgatattattctgctttttttttaatgcacaattcagaatgtcagaagagactcattatacaaatagccttccccagttcccagtgaaaatataaaataaaatcatttaacttgtttagatcttaatattgatcttatcttctacaagggtataaaagcaccaactccaacaaagaaaattgaattattggactccatgtggttcaaaaggcctcataaatagatgatcagtcttatgctctcaatgttagtctaacaacatcatatggccttagggtgttcttaatcatccaatcaaccagataagaatgagagagatcaagacaagcttctcaatcgccagaagatgggaccctattgtcaaatgcatcccttggcaaggaaaatcaggtgaggatggtcggatattgccttcccccagttattgaaattgtgtgctccatatatcttccattattactgtttctgataggatactgtgaaggcagaccataacagaaacaaaagaatgggaaacaaaaaccattcaatcaatgttagtcttaagccctgagcattgagttgatgactaattcccatcttgtcaacatcaccccataccttccacatctagaaaattgctttctccaggaacaagtgaattctcaaaatcaaaactagaacccaagttgttcttagtttcaatccagctcttgccaggcattttattaacacctctatctttcattaacctcctaatccttaaagcatcattccaccggccaactgccttgtagacattagcaagaagaacataactcaaatggtagtcaggttccaattccatcaccctctttgcaatgcgctcagcaatctcatagtttgtacaggttgtgcaagcaccaagaagagcagcccagagagatgaatcatctctaaagtctgaagtctctatcaaaatttcagcttcttctaatagtccagcgcggccaagaagatcaaccatgcaactataatgctcaattccaaccttaattccataatctttagtcattgagataaaatattctcgtccttcatcaactaagcctctgtgactacaagcaaaaagaatccctatgaaactaatataatcaggctttatcccctccttaaccatctgattaaatatcctaagagcttcttcacctcttccattttgagcgaaccccccaatcattgagttccaagttatcaaatttctgactggcatctgatcaaagattgtttgtgcatactcaatacaaccacactttgcataaagatcaaccagagctgattctacgataacatctctccaaccacccttccttatatactggcagtggacctctttcccttgtctaacagctgccaaacctgcacaggtacgaagtatggttccaaaacagtagagatcaaccttttccatcttcctaaagatctgaataacagacttgaagtctccattctgacagtatcccccaagcaatgcactccaagaaactgaattctttattggcattcgatcaaaaatgcgttgagattctcctactgaaccacattttccatacatgtccactaggctgctctccacaaccacatttccacaaaatccagttgtaatgaccttagcatgcacttctttaccttgcttcaatctccctagattcccacaggcagttaagactgtcccaaatgtaaatccatctgggcacatcccgtgatctctctgcatggaatagaaaaatctcaaagcttcatcaaagaaatcgttccttgtcaacgcagaaatgatcgatgtccaacaaatagcatccggttcaagcaattcatcaaacaattggcgcgcatcatccaaagcacagttcctcccatgcatgtctatcaaagcactagcaataacataatttgaatcaaacccacgtcctaaaaccaccccatgaaatatccgacccagtttcaagtccccaagctcagaacaagccttgatgacggcagacaaagtaaacgcatttggctcaaccccataagccaacattttccagaacaactcaagagagttcataggtttccctacccgaacataccccgatatcatcgaggtccacgatatcacatctttaacaaaaagaccatcaaacaccttccgggtctcgggaaaatcggtacccaatttgaaataaagcgtgagtaagctattcccaacaaaccgatcaaactcgagaccagatttgattacatgagcatggatttggaggccatggttgaatgccaaaaccttggtacatgtttgcaagagagaagcatataggactggttttgcggatatttcaccgggatctatggattttaaaagttgtagagcgccggaaagctcaccggatttacagagttggaggattttggaaaatgggtttgtgttgtcggagagattgagaggggtgagcaagctataatagcgtttgaacaagggcttcatcaaatgttgcatacggagtgagtggagcactacaactgatttttgaaagcttaacggtttggggtctacttatttttggagactctttaacttcaatgattttgattgggattaaaaaaattaatttcaaaaaatatgaattttttaaaactatttccaaatttacaatacttttcaaaaattcaattcaaaattttcggtttcatattaaattgaagctgaaattgttgttataaaaagtgtcttacatttagaaatctccgacaataaagaaaaagtgtatttgcatgcactcatataaaaataattataaaatggttatcctttaaaaataattcaagttctataaactcattgatcaaatgtaatacttaatatggtcaaaaacaatacttatatccttaaaaagtaatatatgaatagttaaaggtaatacatttgatcaaaaaattgatgaaatattaatgttttttagataatggtctgaaacttatattttataaacttgagtttttattttatgggtttttttattttagtgtatggaaatatactttttctctaaaaatatttttaaaaatattgaattttaataaatatattttaaaattattgcattttctttttccaaaaatccgatttattttgtagttcaaaaagtgctacaaggagtaagtcctcgatatacttttccatgtttccatgccctaagcttatatctccatcacttttaatatgtatctttcttacgtaccaccaaaaaaattaaatttcgttaacgattctaatttgctatcactttacttggtggctaaggaaagttttcaaatatggttgagatatcgtattcaaattcaataattatcaaataattttaaaagaaaaaaaattaattttctaagttgatatgctattataatattaaattttcttataaataacaaaagttattaagaatattattataaatattataagtctgaaagaaaaagtcatgaaatgaagataacttataaagactatacaagtttgataaaaatataaagaaaaagagaatatatctgataaagtgaatttagggtatggatataaaaagtaaggaaatataaaatatttctgtaatccaataattatatctagttttatattttgtaatgttctttatagtatagtgaaaagatttttatttttcatccgtggatgtatgtatgaataatcaaaccacattaaaacttgatgtactgtatgtggctttggtcagtataacatttcccaattgtgatttcacttttaagctaaaccatatttgtcaaatataagtttttttgtttttggcacttttacattttttgttttgttttatttattcatataactttatcattttaagattattgatttattaataaataaaataaaattttattactattttttttgtattaaagtaataccaaacctttaaatttaaatatattgattttttattattaaaagtaaatgagagcattaattgataaataataatttttaatatataataagcttatatctccgtcacttttaaatatatacctttcttttacgtgccaccaaaaattaaatttcattaataattctaaattgttatcacgtctcttggtagctaaggaaaattttaaaatatggttgagatatcatattcatattcaataattactaaataattctaaaagtaaaaattaaaaatacaaccttgaagcaaaattaaatagtatagatggtgaaataagagattttaagggtatattggtagtatttttttcaaatagttttttaaaatagttttcaattattttgaaaaacttgaatatgaaaggacaaaaagcattttcccaccgaccaatcagaaaataagtgtaccattttctcagatgttacattcattcacactttatacctcctgcccaaatcctctgaaccctatcaactgccacccacatctgacttcaacaaaatcagccggctctagtaattacaagccaccatcagtcctaatcctacccatttgaacggtcctgatccatcattcaccccactaatccaactgtcttttacaggtggcacagtccccatagtcctccgacctcccaaaatttaataaccccccttaaaggtccaacaactccccccacccctcccccccaatcaacggccaccaggcaatttgctacccagagctgctcgatgtttaagtcccacgcatctataactacaagactaggactacgttagcggccaccgcccaactaacaactctagagtagtgt

SEQ ID NO: 12303 - DNA, 6515 bp, Vitis vinifera
  Intron number 10 from transcript GSVIVT01017820001 (locus GSVIVG01017820001) derived from phytozome v7.0 (chr-ID chr 5; pos 3731647 to 3738161)
agaaaaaaattgctgcttgttttgagaagttgaaggtatgtttgtaagacttaccatcatgaattaccatatcagcaattctcttctgcttatcctttgctattttccttattatcattaccttattcttgatgttaaactttcaccagtggagattatttgcctttttctttgccttttgttttggggattggagggagtggtgttgagagttggccttatagatcagtgttcaacacaagttatgcttgtggcaactaattgcgggacattgaaggaagagtcctgaaaacacagaaaggaaaccatgcaatgcccttcaggaatgagaattgaaggaatttttattttttttgatagacaaagctagattgaattaagaagacaccaaaacagggggtgcaccctacgtatataggtagtatacaaaaagagccaaaactaggctgcaaaaagaaagaaagaaagaaactagagagaaataaagctagccaccatgccaatcacccaaaaaattcagaaaagaggggaaatctaaagctgaaaaatagtgagagaccactctagaagtgaacggaaaaagaggttcctcaagctttttctgacaactcttcctcttggaacattatttggtttcgctctctccaaatacaccaaaaaagacaaataggcaccaatctccaaactactttcttattcttccctagtcccttaactttccattctagaagaagatttctcactaaagtcgggaacacccacaccagtccaaaagatgatagcattagagtccatagctcctttgtcttaccacaatgaattagaacatggtccgccgattcattgctgtctttacaaaggctgcactattgaccatggaccaacccctcttaatcaacatgtctactattaaaatttttccccaaactgcttcccaagcaaaaaacgagttcttagaggggcatacgaaccccggatctctttggctggaaataaaaaggtattcttggcccttaaagacctataatacgatttgacatttaactttctcctcccatccttcttccaaatgaaggaatcctccccttcttgaacctttaccgcagaaatatgttccaaaaaacgagtcacctcctccaattcccaatcttggaaggatcttctaaagtgcaccttccaacatctgccttcacctccttgcctctcccatagatcaaccattgaagcagatttatgggctgcaattctgaataacgtagggaaaagatccttcaacttagaatccccaacccaaatgtcccaccaaaatctcgtgtgtctaccatttccaatacggatactagttctaagaaggaaatccttccatccttttctaatgtctttccaaaggctcatcccataagaatcccttagctctctagtggtctagcccccttcaacctctccaaattttttgacaatgactttcctccaaaaactctcattttctagggaaaatctccaaagtcattttcctagcaaagcttgattgaaaccctttaagtgccttaaccccaaccctccatgcttcttatctttacagataaccgaccaacttaccaaatggatcttccttctctcccccaaatgtccccacaaaaactccctttgaagtctctccaatttgattctcactttctttgggattacaaaaagcgacataaaatagattgggaggtttgaaagagtgcacttaataagggtaagtcttcctccctttgacaagtaatgttttttccaagtagtgaatttcctctacaacatcccaaattctactctatttatgaggggctccaaggggtaaacctagataagtagtagggagctttcctattttacagccaaataacgcagctgttctatccacatcctcaattccccccactggtataaattttttttttgcaggtttattttcaatcttgacaccacttcaaaacaagtaacaacccatttccaaaatttcaattgatcaccattatttttgcaaaaaagaagggtgtcatctgcaaacaacaaatgagagacattaaccccttctctacctctccccattaccttaaaacccctaatgaaacctttctcctcaactcttgcaattaaaccactgaacacttccacaatcagcacaaacaaataaggtgagagtttttccccctgccttaagtctctacacattgagaagaaatctgtaagagtgccattgactatgactgccattctcacagttgaaatgcagaaaaaaaaattcacttttgccttttgggacaaaatcccattttctccaaaactgatagtaggaaattcccatttacgtgatcgtaagctttttcaatgtctaatttgcacactaaacccgcactagagcttcttttcctctagtcaatcgcctcattggctaccaaaaccgtgtccaaaatttgcctacccccacaagagcattccggctgttcgataccacttttcctatcacccttttcagcctattagctagaatttttgcaataatcttataaaaacttcccacaagactaataggcctgaaatcctgcacatcacttgccccacctttctttgagaggggagctaagaaggttgcgttaaggctttgaaaaacaacattttgcgaatagagttcctcaaacctgcatcacttcccccaaactatacgttaacagaacttctagatagttagtgaaaaaccatcctgccctgacgccgtgtcacccccaaaatttgagagagcattaattacctctttctctgaaaaccgccccttcaaggtctcattatccaaggagtcaagatttctaaaaagccctaaaaccacaacagttcttctcacttgagtttcttcaaacatggatttgaagtaggacccaatcccctctttaagctcctcttcttctgtcagccgtacactcctgaccgtgaggctattgataaaatttccccttctccatgtattagccatgtgatgaaagaactttgtattattgtctccttccttcaaccatagagcccttgatttctgcctccaagaagtttcttcaaggatggcgaagtgattgtatttatctcttgctgtctgctaacttctcttgtcttcctctgagagaggtcttagcctttctaaactatcccaatggtttaactgctccaaggcaacatccttcctaggtgacacattagcaaggacctctttgttccatttcttcaagttgcatttcaaagcctgtaacttcttaactagcacaaagctcggttttcccttaaaattgtaagtcttgccaccactttttaattttatccgtgaaacctttcactcttagccacatgttttcaaacgtaaaagagcttttaccttatctcacccctccacaatctaacaaaatggggcagtgatcagaaactggtcttggcaaaagaatttgctttgcccctgaaacaagatcctcccaagttcctaccaacccccaagcttctaacaaacctatcggagatctcttttatttttgtctcctgaaaacacaccaaatttggcttatgttttctcatcgttgactaaatgaccatcttttatctgggtcatgcaatcctcaacattccaagataaaatggaacgttattgggtgactaaaaaggaaagaggttcatggcgatttgataggtgattgtgctaaatattcaatatgtttatagagtttgggatgctttatttgttgcgttcctcgcttagccaattaggtggcagataagctagctaaaagaggagcaaagcggtgggtctcttttgttggagattacgtgcctccttgaaactactcaatggttgttcaagcagtgcttcaattgttgtaacttctcttggttatttttctatatggttccttgttagggagttcatttccttgtcttgttctaagttgtacattgtgtctcgttcttcttgaccctttcaattaatggaaaagatctttttgggttttgataaaaaaaaaaaggggaaagtcacaagaatatgcagctaggtttttttctaacttgtggaaatttcccttcatggttttttttggtaaagtgattttagtgctcttcttgttgtttgttcctaccttatccctctacaccaagtttgtgatctttgaattaaaagcttaggtgtgtctcagttcttggaatgaggtgctactaatgctagttggcctattggtggattcatgatattttaggattgaatgctggagttattggagataaggtgggtggcttttttctttctttctgttttagtaattataagagtgacttaattttgagttatggaagaagagctttttgggaggagttggggtgtcattaacgggttgtgagaggatctttggtgcaggagaaggggttttaatgcggtccattttcctcatgagagatggactaatggaggttggtgagtttattgatgagccaatcttgtggatattccttcgattgggtgccagggttattagtttaggaccaaatcttgttctgatttggtggattgggaagagtacttttctaatgaatttaacattttcctgaggttattgattgattctcctcaagtctactcaatagtggtggtttgaggagtggaaagtgcatattctagttataagataatatatggtgaagggaagagagatttggagacttgatcttgagttaatggaatggctatggggttggaggacctcctaggttatattttaggtagttaattgtaggcactaaaggaggctttaggcaaaattcactagtggcttaagggtggacaaatttggcttttctgtacatctaaaatgaatggagggatccttgccttttttttcatgtgtatacttgaatcttggtattaggtgtcctaacatataaaggatgaggtttagacattttgatgtggcatatatggtggtgttagagggctttttcagtgaagaggagttattaatactcttatataatctagatgggaatgacacctgggtacaaatgggttaccatggttttttgataggttttgatgtcggatcaattgtagagaagaggatggcacttggtgagccactgtttctttgtatggaggaggaagaaacaattaaaccacattctccttcattgtgcccgagctcgagacttatggagtttggtattctctttgtttggggtagagtgagtgatgccttggtcggtaaaatagactttgttagggtggcatggtttttttgtgggtaaaaaaaggaagaaggctttaagggttatcccgttgtgtattttttagactttatgaaaggagaggaattgaagatcttgagagagcaaagaaatgtctgtttattgatttgttttctcctttgtttgtaatcttttgttatgggtgagggtgtgtgctaatagaggcttcataatcatggtaattttatagactggttaggtttgtcttgatggggtgtttgttattggttgtgtactttggttcaccttcaacaagtgcctttaatatatttattctgtttgtctttttgtgaattgggctagggtgtgtgttaacaaatatgtggaagtcaattcccctggaagtcctttgattttagttggaagctccataaagccattggtcctaactcctaactgcctaccattcctctcttcatcacggctttgcactgtagttacagtggaggttgttctcatgggcaggaattgcatggattgctctaagagacatccatatatgttggttatctatttcctagggttagggaggagaagggagttttctctgtggggaccggctattcttgtgaattatgtcttaagaggtatgtcttaagaggaatgccatagtatttgaggacaagatgacatcactgaaagacgcttgggggactttgtatcacctcacaattctcttaatgcgtgtcacttggagtttcgtctgtgtcctatcaatggaatgaagattcattttttagccatatatggttttattttgtatatcttccgttggaaggctttctcatcctccctagtttattctttttctttatttataattttatataatacttctcttgttttttagtaggaaaaaaaatgaattgtgtgctcagtgcttaaatttgaaggtagaggcagaaatgggttgacctcatttatatgtttgaccctttggctggccagattaatatgcctgatcctttggcatttactttttcacataattttaattacatgctttatgacttacactaatagtttgccattcccagatcttacaggtttcttgccctcttttatgtcctaaattatttctactattgaaaaggatgcatggttttgggggtggtattttccatatatcgtgttacatgtgcattgtttttgcctcatggtatgcagggtactgtcagttcatctgaagatatttctgcaaa

SEQ ID NO: 12304 - DNA, 4908 bp, Vitis vinifera
  Intron number 3 from transcript GSVIVT01016855001 (locus G SVIVG01016855001) derived from phytozome v7.0 (chr-ID chr9 ; pos 2003208 to 2008115)
catgtccttgcatttagatgagcccacttcatttcggtgtccaagactgcctttgatatttcccaatatctatacccattgatggtgtcaccagctagatttttcctcagcgcatcacatatggtgtcaattaagtcctcagacgcttctctctctctcgctctcgagttctggtaaattcagcccaacttcgttgcaatgaagacttcttaaagtttgaaatcaagatggttttccatggtgtcaacttctccttttggttgatggtttcagtgatagtattgaaggcgagtctcccttgcagcttggaaacttaggagatgtccttgcccttggggtatcgttgcttctccagcaacaaaaacacatcagagtcttggaactagtccccataacaggcttctaccatgatggacaacttgagaatccagactgagaaaataaaggttatgcttaattaagaaaaacacccaagaggaaagaggggggaggtgaattgggttttttaaatactttttcaacacaacaagttcaagcacaatataataaaaaaataaaaagatagagttagagaattcaaactcgaattttatagtggttcgacacttccttgcctacatccactcttctcaatttcctaaccgagtgagggttccactaacttgaagcttcaaccaagcttccaatctttttacacttggatttcggctccaatgggcttttacataatcttttcaagattcaaacctcttaaaggctttaacattcaatttttacaagaatgaatccctcaacctagctcaaagatagctcaaatacaaaacaaagttaagatgactcacaagggtgcactaaaagatatgcaagtgatgatttaatgcactaagaaagaaatgagagcttttaggccaaaaacgagtaggtagacaattgattgcaagtgttatcttattaataaatgaagtggaactctcaatttataagtttctaagctcgggagccaataaaaacaaaaggcagccttgattggtcgagttgggggtcgaccgatccactagttgttggaacctttaatgttttagcaggttaccgttacctcgaccgagaaggagtgaacctcaactgggaagaggaagctattggataagagagagtatttttggcactccttgatcggacctcaatcgaacaagggcaaccggttccccaaccggttgagcctgttggccaaaacctcaactggttcagccttttggccctaaaaacctatatttttcaattcctttcttttctaacacttaggtaaggtctttaggtgaattaatatgtcaattttaaaatgttttgcgtaaggtacatttgataactctcgggttttaatgaaatcgaaatttaaaggataaacagagttttgcacccatgcattcatcttacattcgtttcctattatcaaaattctttcaaaagtctcaatcttgtatccatttggtcatttgatgaatttctgaatttatacatgagattctttaccattcaaaccaattagtcacttaaccatggtttgttatcattaaaactcgattaggagaacccttgggctaacacagacctatcaagccaatactctcatctccatacacaaggtgcaaccttccccctggccaaataccaagaacaaaggagcgtaacaaaatagaacgcagagtaggaacaaaagggacccataaaagctgcgttccatgtttcaatcaaagagcttagatgcaggggtgggccaaaatggatttcaaataggtttcaaagagaaatcaaatcgtgatggccaataactcataaaaaaaactcaaagcaaagcccataaaataggttagaaatcaaacacaacatgagtgtgagcaaactccgatattagaataaaatctcataatactcagaaaacacaataaaaatggcatgaacacgaaaagatcagcagcttataggaataatacctgagtcgccttctttcaagatgatttctctgcgtgtttcctcctatctctgaccagctttcccttccaagaaaaatctagccgatctctttttgcctaaacaatcttgctcctctataacctctcaagcaaccaaaatatttcccctcaggcaacagaatactctcattcccaagctttctcgttttctttctagctcttctctctctcacttttcctcaagttaccaccacaaaatatctctctgcaacccctcacaaaaatatctcacctccccaaaacctttccccctagctacccccaaaacctacgctcctttggatgtctttctccccatgctactctcaaaatatcttccccctataacaaacaacctactctctataactgaaaatacgctcccctatgaatattccctccacctatttctttcccattgcttctttcaagccactacttgattctccgacagcctctccaaagacgacatgtggtttcccagtgacacttgacaaaataatctgcatgaaaatgagccccaaatgggggtctacattggtacacttagcaacataagtggatttgtaaagcacaaaatatataaaataaataaataaaataaacaaaaagattatccatacttagcaaaataaatgttataaaatagaatgaaaaaaaaaaaaaccatcttagcccttacccatcaaagttgcaatattattccaactatttctaccatgaattttaaaaataaaataaaataaaataaaataaaataaaatatcataaatatatcacttgtaacacatcagggatcaagtaatcaaacttttagaggcccaacaaccagctacaatggtatgaaatgtccatcaagattaatttttgctcaaccatccgatcattcaattcaatgggaaaaatatgtttgatagttaggtttttttttttttttttttttttttttaacaaaatgttataatatatgactatgtaactcatttaagatagaccaataacttacaaatcattattacttcaagttcaaacatttcttttaattttattgtgcatcaaaattaggggtgttcggtaaaacttagtacttattacttaattacttaagttgactttaagttatattatacttaagttattaacttaaaacttattatttaattcttactttttagtattaaagttgtttgataaaatttattctaaattatcaaattgatatatttatcatcataaattataattaaagtaaaagaggtcaagtgacaataaaggtcatgaagtaacaaaagagattatggaagtaattataataaattatggtaaaaatgtaaaataaatatgtgaacttacgaataaattaattatttttacttattacttaaaattatttttgactttaagtcatatcattaagttactaagttggtttatcaaacacccacataaatttatatactccttgattgtactcaaaatcttaacatttaaatggaagttctcaattattcttcaattgtaaatttgtagaaaattgagaaaatcatgatatatgaagaatatgtcgaggtcccttggtacgtgaaaattttgttgtgcttgactattggttagatgactcttcaactatcatgggaaaaattatcaagacttagaaaaagtggacattggtgggctttatccaactaaaacaatatatttgtttgcatttttttccttaccccttaatttactacttcattgttttcccgtaatattgtatttattcgataagttcttaaatttgggaattgtataaatagatttttaaaaataataatcatctaattcattcccctcataaatgattaattgcaaaaaaaaaaaaattatttttatttttaaaaatagttctacatagaattcccttttcccacatggcttgttcaccaatcttgaatgcagcccactagaaaaaacaaagaaatgatttcaaaagtaaattataataatttttaaaaatatatatttataataatctctgtggagaatgttgcctttggactaggatactgagatggtgggtctacaccggatcaaaaaaactaggtcagcagtgtgctatgcggtgattggaccgtgtgctccacgcgctccgacgaacaccggcgaccacaccgtcctcttttcccaaaagcgtaggtggacggcgttggcccccacaaagtcggtgaacgtggaccgccacaccattagtacatagaccctaggttaaaaaaaagttaaatatattaatattaatttatttaaaagattgaattcttcaatttcccacctcaaatgaataattatattggaatattactctttttttttttttactattaattttaatgataaatgatgattaaaaaaatataaacaaatataaattacaaaaatcacctttaaaaatagaaaatcgttttagccgttgttatccggaaattttatcaatttttaaaaacaaaaaaaagaatatgaatcaaccatattttataaaatttgtttttaaaattattttttattttttaatttaaaaataatttttaaaaatatgatgatcttaatatttttaaaaaatttggaaaagaataaaacaatttaaatatttttattgagattattgaaaatataatgccaatttataattaattttcaataaattttctaatgctgacgtggcataggcagcgacaaatactctacatgtcccactaaatatgtaatttgatttaatttaattttgcaaatccctttctaaattttgtttattttatttttttaactattttttttcccctaatctattacactcaaacccacttttaaagaacagagagaagccatcgccatcctcagccccctctcatcgctcttc

SEQ ID NO: 12305 - DNA, 4226 bp, Vitis vinifera
  Intron number 1 from transcript GSVIVT01009806001 (locus G SVIVG01009806001) derived from phytozome v7.0 (chr-ID chr1 8; pos 11401691 to 11405916 reverse strand)
atcctctccgctccgaagatccctctgcgctggaggtacctttccctctttctattcttccatattttttctttttccattttctatgtccattgaatttcacctgcaatttctaattctgttggactctccatctactgtcagttacttttgagattttagtgttctatttatcttactgttttaggcatagttccttcaagtatttcgttactggatgtattctgtaacacaaggattttcctgtttcatacgtgatgttgtgatggaaaaaccctgctttgtcaataggaggagttgatcagtgctattgtttgcaagatgatacattcttgttttctccccaacagatgcatgcctttctctgagtatctcaatttgctgtatacatttactatttttcacaattgagtggtgatgattatgcttaggtaataggttgattaatgcctgcatcgttcaatcatgtgttcccacatttttcagactattttttccttgtataagtaaattcttcttagtgtagaccgattttatttgcacaagtttgaccgaaggtataatggtaggcaaaattttgttttctaatgactagaacttccttaagggtgatgtttgttaacattcagaattggggtttggagggcctagatttggcttttattgcttcaattgagattgagcttttggtgtgactttttgctgcacagctcagatttaggataaatctgttgcagatgttaagtccctgttggaaccagatctgaagccaagcactacttggatgaaagcagaattttggaccaggatggttttcccaagctctcaaggcatctgcctaaagcatgccgatggaggcagtgatatggaacttcaatgatcaaggtggtatccataattagaaaggaagattagaaagaaatgaaaagcttaggatgaaggtgaaattcacaaaatggatatcctccaatggaggttacttctctattgggtgatattatggaaacatttggatagagaggaggatcatggatgctagggttttagacctcctctctttggatgcattgtttaatattgtacgccctcttgctgacaataattaacttaactaacaaaaaaattcaagtttagatcttgacaatatatgcagatggtttctaattaaaggcttgtttcttaaactatatttggctacctgatgatcatgtttcatctgaaaatttgctaacataacatttgtattcaggatttggaggggctagatttggcatttagtgcttgaatctaaatcaagtgtttggtgacactttttggccctcagatcaagatttgggagaaatttgttacaaatgttaagtccctaaagctatggatttggaaaaattggtggaaggtattttttggaggtctaaatcattgggatttaaaaatctaaatctaagtgtttgtgtggattcttaaatttttttgtcttatttttgtttatttttatctgttagaaacaaactaggcatatgatagtgacactttttcccatcacatccttcaataattgctatatcattacgttgggtgggatagggtataaaaatcctattcccatgttctcttataatgaataagataagcgggtggaataacttaaccaagttatttcttatgtcccctttacatggagggaatttacatgttgtatggattatgaattgctttctcccatcattgccctccatttattttagccctttctatccctttattagtcacattggatccacaagaaaaaaaaaaaaaagggaagaaaaaaactaagatcttggtctagaaaagaaacttaacaaagaagaacttatatatttataacataactatggtagctgctttttgctttatttggagtctattggtttcttcctttattagtcaaggaagccttgttaagttggcgtggctcctttgtgagaagaaagtgtaaaaaggtttggagagctgccctgttatgtatcttttggactttgtggaaagagagaaaccgaagagagtttgaaaatacagagcaattggttcattctttgaagagtttgtttatgataaagttgttacatgggttaggatgtatgttgctaaaaggaactttgtctttatttgattttgtagattgggtggagtctaattgagagagggagcagttttttgtattttccctctttatggctttgcctattgttttcccttgtatacaatttgtgtaccttggtgtatagcctttttcgttaatatattttttctcttgcttgtttaacaaaaaatatatatatgtaaacatacgtacacacacatacacatctatatgtgagtgtagtgtatatatatatattttttatgggtaaacaagaaatgcattaaaaacgccaaaaagaaagtgcaccaaagcacacgggacgtatacaatggccgtcaagagatggccaaaaaaaggaaagggaaacaaaaatatataatttcttatatatataatatgcagtgtaattttcaatttgcataacattttctgattgaatgtaacaaaataatgtttataaaattttaaatatattaattactaatattattaaaacataaatgacaaatcatccattagaaactaagtcatgaactgacctccaaatgatgctcaatggaagagaaatttcatgctacctttttccaagaaaaaaaataaaagatcataatgaatatgtttttcactctggtatttagatgctggtaaagaagcaaacattagcatagtatattatgtctcatgggatatatatgtatgtatatatcttcttatttaccatacatgatcaatcagtgatggtgttattcatggatgctgaatattttttatatgaagcttgtcaagtcttaagacatggttttccggtttcaatccttaatatagtaaaaaaaaaaatgtgaacttttttattactatttctttttgctgacatatgcagttcttggactattgtgttatcaataaattccttgatttcataatttgttgtaatctttttttctttatcttttcttttttaaattgctgtattccttgtctcaccacccctttttatttctttgtttctttttcttttgtctttgcttatgtttttctgagctttaattattgtgtaattttttctatgtctgaaagaagaaggttgttgcagaatttcatggggtataagatagttatctactaaatgaaattctatagtgttctgctgtccaaggttttctactcttttgtttttttgatgagttgtccaaggttttctactctcttgtttttttgatgggttgtccaaggtttcatattctgtgacgcttaatgttcattctatgatttcttcaatcaatagatagttactttgttgccattggcatacaagagactcatgatctcaggcttaaatatttatctatcacaattggccaatttggtgcacctgctttatggcattatttcttgaattacttgagctagatataatatcaataagatcagttttctaattaaaaaaaaaaaaatcaatgttaaattgaatggttataagaacccgtttaggagtgatttgagagggctaaaagtacttcctaatgcttggaagcacttcctaacataaattagttgttgaacaaacttttgaaaatcacttttaaaaatttagagaatcatttgaaatgattcttggacaatcatttgaaatgattcttggacaatcacttggtaggtgatttttttttattatataaaatattaccaaaaatactattaaaacacttatttaaaaaaaatattcaaatgctaagtaattccccttaaacgattttctaatggaaacactagtaataaaaatgatgcaaactaaaagcattttgattagaatcactctcaaacggactctaagtatagggcattgaggtaaactgttaccatgttctaatcgaacaggtggtctattgatatttatattttctttgaaggaaatgaatctatagtggtctcttgtaccagtattatctgctgagttcagttcctgtcattttctcttaataattcaatatatttagaatttttgcacccattgttggttgttctaatatgttagagattatttgttgtgaattgtcttgccaccttgccttacatgcttctttaatgatagcagttcaca

SEQ ID NO: 12306 - DNA, 1614 bp, Vitis vinifera
  Intron number 1 from transcript GSVIVT01019739001 (locus G SVIVG01019739001) derived from phytozome v7.0 (chr-ID chr2 ; pos 2874877 to 2876490)
gtttcttcaattcagagtgatttctgtattgcaaggtgagattttctcttttatttattaatttttttcaggtggagctcaatgtagttcatcaattttgagggattgtttcttactgtatgttgtagcgttttgttatttatttatttatttatttttattgtttatatacatgtttttgttgatgtgaacggttgaatttgtagatctgtgttgagagggtgtgttttggttgttgagcttgggtgtgttgagttgtagtgatgtggaaaatggaatattagagggtggatctgttccgaaggatgatgtttcagtgctagggtctcttatgcgagcttaaaatattctgatgatttgttttttgaatgcgaaattggatatagatgtatgagaattagataaggtcttgctgggctgtgtttggttgttatggattgccttggttaaacagtgaaaactcaattgaaacatcaaagaaatgtttaaatctcaaatttagtgcatttgggtatgatttgcttgtgtgtgagggaaaggagtttagttagtttatactgttggaattgatgagtaaaatgtgggggtttggttgtgttgttagataaatctaccttgagttggtgattcagtccttcttgttggttaaccacagaactagaggtgtgctatctgcagaaagagacatttaatatattgattaagaattggtgtgactgacattcaatactgggtttattaattaggtaatcgtgttagtggcttttgaaccatgattcgttggggttagccatggcatgattttgggtaaatttttattttattttatttatttatttattttttggggggtgggggtgggggtggggggtgggaggggaggggagaatagtttgaggactttcaaatggtcaccagatatatttgcagaaaaacgtttgttacatcctgatacaaagtggctgtgatgttgctcatgtgttgaggaaaaagatagcattctatgcatcagttatctgaatgttgatatacatctttcttgaatggactatgaaattctcttgaattttatattcacctacagggtcacttgtttattaccatggaattgagatgtcaatatacactatgctatcatcttgcatagatgccatgctgtcaatggattagttattgaggttagcaacttatgtgatggtgaaaaccagtcttgtgccgtaaggtttattagtgttctctactatttcatttatattgacaattcaatgcaacagtgtagttaaacattgtccaatttcacctgtacatttcctctttcaagaactaaaccttggttgtttttttagttaaattctattgtaatggttggtgtctatcttgaccttctaacttgctctggaatacatttattatctatagattctatactctgcttttctttttccaattaacagtggagttatatgaagttttggataattgagctctgaagtttgtgattatcaatctgggtagatctacttgaatgggcactgcccatcaagatgtaatatataatatttttgttaagttttggtaaaagctaatcttataatactttcatgcaggcccttt

SEQ ID NO: 12307 - DNA, 9725 bp, Vitis vinifera
  Intron number 1 from transcript GSVIVT01035676001 (locus G SVIVG01035676001) derived from phytozome v7.0 (chr-ID chr4 ; pos 3216683 to 3226407)
ccggaaacggctcgctcttacctccaaaaaacccggtgagtgtaacgccgtcgtttaattgttgcttgtttaaaactgtcgtgagtttgattatttctcaatttcatctttggaatggattttgtggtcgaaaccaacgtatatttttagcattggggtttggttcgtgtggaaatacctcaaaattgaaggacaagaccggtttcaagacggtggcgttttgttggcttagagtgcgcttggcagcaccccagtataacaagtgtttttaaagaaaaatgcgtttttagagagcacttgaaaagtgaaaaatcattactagtgttttacgaacaagcggttgataggtaagcacttgataggtgattaaaacacttagaacgctttcattaaacacaatgcgattagaaactatacaaatgtgcttttagagtctgtttgacagtgatcctagggagggctcctagcttaaaaagtgtttaggaaaaaatgatgtgattgacaaaatttaggagatgcttttaaaaatttgaaaaatcacttgtagtattggaaaattacttgtagtgttttttaaactaatacttgatagatgattcacttaaaacactttcagagaaaacatttcaactaaaaacactttgagtagaaacgctcccaaacacactcttaattgactcttgaagtatttttagtgctttgttgatttagttttccttttgttttgttttggaagtgattcgagttaaagtgttttctacttgtattgtgcaacacttttaaggagaatcccattgtggttggatataaactaaaaaaaagtgttttttaccatgttttcggtaatatactatataacaaaaattgagtgatttttagaggaatcacctacttatccaagaatcactttaatggattctttgtattttaaaaagtgataataaaaaatctgtgaagcacctaatttttataagaaaacgctctgaagcattaagaagtgtttttagcccttttcagactcaccctaaaacatgcttgtagtttacattttactaatttatgggtcaaagccaacaaatttgcccatacttatttcaacaatttagcttgggatcttatatacatatcaagatgttctattagagtggaaatgcgaactgcaggtctttcgtgaatacagtggaagagactaccaagaacatatataataatagcctccaaagtatattgatcaaagtttttgacatttgataaatcttcggaagaaaggcaacagctcttaagataatccagactttaacaactctaagcatcttctgttatggtatggggagtttatcacttgatcccttcaaatgatgacctctttgtccttgccctgttttcttatttttctattgggggatgcgatctatgttctattacattcattccattatttgatctggaaggataagtggtatgcctttgagggattcgttcccgaatctttattctatagcctcttcaacattcgcttaggtggttgatgtttgacatggtggtagttggggccttaggttctttagacatctaaatgtctgagagttggaggaaactaatgtcttttttgggaggctgcatgattattccatctctttgggtaatgatgatagtatggtgtggttggagacaaagaatgattacttttcagttaagtctttttactcctcgacaagtaggagagcgaagcctttcccttatggtgtagtttggaactcctgggctcctacaagagctagtttttttgcttggaaagcatcttgggcaaaatttttgactcaagatcggctcaaaaagaggggttggaggatgcctaatagatgctgtttgagcaaagcaaaagaagagatgggatatcttattctccttcattgtttgaaagcttgcatgttgtgacaattgatttttgctctctttgacatacagtggattatgcattcctcagtgagacgaacgctcttgagttggggcggttcctttgttggtaaaaaaaggaaaaagacttggaaagctgctcttttatgccttttttggttcatctggagggagagaaacatgggagcctttgagaattgtgattgggttagattgtacgttagggatggtttaatgtcgtcgttaaattttgtagattggttaggtacaccatagggggtggttgctggtttttgtgtattggtgcttggtatttttttggttgctttgtatatgttgtgtattcttttttaaatcaattaatacttccttttttacctatcgaacaaaaaaagaaaataatgcaccagtactgtctgaaggaatagagcgcatttcgatgcaccaaacattatccatgtggcatttagtgatatgtgaatgtatcaggaaattctactaagatttcttaatcatggggacatgacatatcagcaatttagcatttcagctagtagttcacactgctaaactgaggaggcttaggcgctcttgctaataaaaacacatggtagagagttttagaatacaattaacttgggggaactgtgagaatcaatatgctaagttgagttgcttttattgaagactcctccaaatcaaattggcaccccagttactttcttctatcagcattcaggtgacttaggtggtgtttgcatttttaattaattctaaatagaatttaatttaacttaactctaaatacaacttaatagtattatgttgtttgtttgttttcattttttatttttttattaagtattaagtattaatagggatgagggttgtgttgagattgtttttttttttttttttttattagaaacgaagaagattatattaataaaagaacaaatacaggagagaaaaaagagacaaaagaaagagaaaaaaaccaagagaaggatgagaggtccttcttcctacacaaataccaaggaaaaacacccaacaatagaactctaaaaacaaaagaaaccccatcaatcttcaaactcttgaaacgcaaaccccaatccaattgagttgtagaatgcttagaggaactcctctaaaagcttcagtacgagaaacccatagagaagaataaaaccggatcaaatcccaaactatctcttccgttctccctttatcctcaaagatcctattgttcctttcttgccacatcatccaaatcaaagtaaggcaaacaatttgccaaagtgtcttgtctcttaatgagttccccaagcctttaaaagaaataaccaacatgtcctcaaggctccttggagggacccaaatcacacctactagattgaacaacctgtgccaaagtccaatggtaacgggacaatgaagaaaaaggtggtcaatcgactctccatttcctttgcaaagaatgcaccattgaggacagagggctttgtagggtcttctcaattacaacttgtcattagtgtttaccttcccatgtgctactaaccaagcgagggccttaacctttgaagggacttttgagctccataaaaacttggccggaaggaatattaaaggatttgaaacttttgacaaggcatagaaaaaagatttcattgaaaacgagcctgacgatgacaaagaccatgctcttgagtctgatgaagaaggggaaagaagcacagaattaagggaggacattaatctctgaaggagatcaatttctgaatccgttagattgcggcgaaagttaaaattccaagacaatggtaaggaattgccaaggacatttgagacagtgaggtttttcacagaaataactctgtagagatcagcaaattgagaacacaaagtttggtttccccaccaaagatcttcccaaaaccgaattctctccccattgcccaccactaggcggacaaaaggggagaactcctggaaaacttgagcaatagccttccaaggacatctgtgagaccatctaaccaccatgttggcgtcccatccattaggatgtgtcccatatatactcgcaataaccttatgccaaagaccgctcctttctctagggaaccttcaaagccatttccctaagagggcactatttctcataaaagtcttcccaaaacccaaacctcccatctcctttggtttactaacaacctcccatctgattaggtgatctttcttcccttccccggccccagaccaaagaaaatccctttgcatcttctcaatctttgaagctatagatacagggattttaaagagggagaggaagtagctaaggatgtgagacagacaagactgaattaaagtaatcctccctcccaaagacaaataggcctttttccacccatccagcctcctcgaaattctctcaaccactggatcctaaaagcctattgtctttgggttccctcccaaaggaaggcctaaataagacaaaggccactttaacactctgcactccaaaaccaaagccaaactagacaacacctcctgcctagtgttaatacctgaaatgatgcttttttctaagttgatttttaaaccagatacttgcccaaaaaccaaaaggataatcttaaggttttgaagaaggtccaaagaggctttagagaaaaatatggtatcatcagcaaactgtaacaaggacactctagtcctatccctccccacaaggaaaccctcagttatctcagtttcctcagctttaatcatcaacctacttagaacatctgctacaagagtaaaaaggaaaggagaaagaggatctccctgtctcaaacctctagaggccttaacccaaccctttgcattcccattaactaggatagcaaaactagaagaagataaacagcccctcatccaagatctccatttctggctgaaccccttcctttgaagcacatgatctaaaaaaccccaatccacatgatcatagaccttctcaaaatcaattttgaagactaccctttcctctcctgacctttttttctcatccaccacttcattggctatcaatacagcatccaatatttgtctccctttcacaaaggctccttgagagccaaagattgtttcatgtagaactttgcgtaaacgccctgataagaccttagcaattatcttatataaacttgtaaccaaactaataggtctataatatgagattttaaaagtttggcttttcttaggcaccatagcaatgaatgtcgcatttgtactttgatttattacccctttagtgtggaacttaaaaaacaccctcataagatcctcttttatcacatcccaacactcttgataaactgctatggtaaagccatcagggccaggggccttttccttattcaattggaaaactgccattcgaacctcctcttcagaaaacggtctatccaaccaaattgcactctcttcagaaataggggcccaatcaatcccttcaatcttccaagaatcacctttgggtttggaatagagattcccaaagaaatttgcaatctcctcagaaataatctcaatgttatttaaagtctcccccctctcagaaatcagagactttatgaacttcctgcttcttcttccagtggccactctgtgaaaaaacttagagttgtaatccccttctttaatccacttaaccctagatttttatctccattgtacctcttccttcaataacaaatcctctaactccttccttcttaaggtcctttccgaaaccagatcaagatttaaattcccttcttgttcaattcgatcaattctgcctaagtccgtaagaatgtgctttttcctctctcttaaatctccaaagaccactatattccactctttcaactttgatttaataaactttagtttcctcataaacttgtgactttcccaaccttcaaccgtacactcttgccaccaatctctaaacttctctttaaactcaggatggagcaaccacatattctcaaacctaaaaggagtcggcccccatttaaaaggattagtttccaaacaaattgggctatggtcagaggtccatctaggaagggcctcttgaatactttgagagaaaaaagaatcccactcagaagagaacaaaaacctatctaacctcttgcaaataggatcgacttgcatgtttgaccatgtaaaagccgcattcctaagagggggatccaacaaaccactttcccttataaactcgtcaaaacacctcatgttgactgttaacctagagtcacccatcttctcagatatcctcctgatcacattaaaatcccctcctacgcaccaccttgggaaagtcagaccatgcaggtcttgaagctccatccaaaagtccttcctccacactgccttattcgggccatacactgaggttaaccaaaaaaacccttcctcatcagagttcaattttacagtaacagagaaagatcctaacaccttctttgaacaattgaacttaactgaatcccacaagatcacaatcccccccgacgccccacaagcaggaagagcaacccaatccagacttttacctttccaaacactactcacaggcctcctatcccaaatttcacgctttgtttcctgaaacatcaccacatctgggttttgagtacttaaaaaccttctcacagtcctcattttcttcctagatcctaaacctcttgtattccaacttaagatcttcatgaaaacaaaaacaacccgacacaacccacacccagaactaatcctcatctcgagttctagagtcatttttcttctttcttctggaataaaccttgtccgcagagagagcactcctgttctctccttccacaccttttccattatccttgacaattctaaccctcaaactctctagaaccgactgaaccttgaccatcttccgaggcgtaagcccctcaacctgaaaaccttccaacaggagggtggaaggttcttgcactgggaacgaagcctcacctgagacaccacgcacctcagggttactgagagtttccctaaggagagaccggtctttaaatttttggttagaggtttctaggggaaccaccacaccttccgaacaggacgcaccaccacgatggttgttattcatcacaggagagataaaaacggacccacgctgaaaggcgtagcttgactccaacggaatcgaagaaaaagagagacagcgagaagggtgaaccaaagaaacagaggtttcgaggataaaatttggctcaaaagccccagacagaggaagatctcgctcagatacagttgagaaaggagtatgcacctcattgatcaatttgcattgcagaatcccctcttctccctctgtctcgccggtagaaactttggatgtttcaaaaccaatggagagatcgctctttctggagtgagatttgccccgataagtgtctcgatttgtctccagtgagccacctccttcaaagtttcgcttcggggtagaagacctcctcaaatctcggcggcccacttcttgctctgtgccttacggagattgaagatcctttcggctttgacgacacttgaagaagacctttcggcattttattctttgcagtgagccctggtcttaagagctttgaagatgaagatgcatttgggccgccattagaggatcctttatgggctggacccgctaggggcccaaaatctttcgccccaaattgggcccaattagaacaggcttcaaaggcgtctggtgtcggcccgatgttgcttcccgccgttgggcccaacatccaccttccctttcctttctcccccttagccgattttgaatctgaagaactaaaatgggaacgatgatgaggcatccaactatggcactcaatggtcctgtcaatagctcgtagcccctcaacgatctgtggcttttgcaagacgcaacccccggctgacctcagctcgtccttgctgcgattcgactcaagcttgatagagtcttctctggtgactgtaactgcaatcatgtatgtccaatctccatcttctacctctaatagcgttggaagcacgacatttggaagcatctccacccacaatgttaccttcgtcaaatcaacaaacttcaaagatttcctcgccaccttcgttaccctcccccactgctgcaaaatgtgtctcaactgcacctcatcccacaggtggaaagggagacctcttagttccagccacccccgtctaaattttccattaacgactgagttctcttttggcgaccatctcctcagagcaataacctctcctctcattgtgaaactcccttgatcttgaatccactgaactttccttgcagattccacaaaaaaacaccctttgtaagcagaaatgggtgttacagacaccattcctttcatccccacccttctcgctatagcttttccaacctcacaccagtctcgtatttttcctttgccttcacaaaccacagctcttgcccattttccaactggcatctttgcaccattcctagttcctttctctgcaaccacatcagcataggacctctcacctctgtacattcctttgctctcttgaggctttttttgcttctccttcgaatctctttcagcttgaacagagaactcttggactgaaacaatcaccttcctaagattttcccacccacaaccattaacacctcttggaacaactaagaccaaaggttttctctttgcaacgtattctgtgattttcatatatctccctctgctattaaaacatatctccatcagatgagtcctagtcttgcccctcatttttcgaacgaaacccctggaagcctccaaatccacagctttctctaactgctccactaaccaacccgtctcctcctctccaaaacctaaagaaaccacaaaacctcgacttctctctgttattgaaatccacgttcctccattgcaatcttcagacttcacctggaaaacctttctctccactacaaccgactgatttcgaatcatctttttagaagagcaaggacatttacatgtcctgactgcaacaaagttggaactgcaacccagtaacctggcccctaaacagataaacttccatagaacatctttgaattcatctttgctaaaaaataaatctggttaccaagctatcatctcttccatcacagataacaacaggatgaataagttacaaaaataaccacaccaggttgtgttgagattgtgtattgattgttttaaaatgttatttttaacatttagcaaaaagtcaaatattttaactttttctattcagtcaaaaaattttaaaaataagtaataagtagaaaaaaagttaaaaataaataatctaaagtttgaaagcaaattacatttagtattaaattaaaaaaacaaacaccaccttactcccatttggttagacatgcttaaaatttatgaacctttcaaaggttttgtttttgtttactgaattcgaaaaatatgagcaagagaggcttcaatgcaactgtagcggttgttagactacattttttttgtatccatggatttttgtatcaaattgcctcctccccaagtgtttaatttggatcccatattttatgtaatgttacaaaaatgattcttcagggattttggctttgctttattcaatttacaagctttgtgttgttttgtctttttgttttataatgtgggagggaaaaggatccgagttaatgctatttatttttttcaacctgcagggaagacaca

SEQ ID NO: 12308 - DNA, 3257 bp, Vitis vinifera
  Intron number 2 from transcript GSVIVT01027001001 (locus G SVIVG01027001001) derived from phytozome v7.0 (chr-ID chr1 5; pos 18659093 to 18662349)
gaggttttagttgaaagttttgggatttaagaatatgcccattgcggttgagttcatcaagctaatttggagcttttggttttaagatttcaccccatttttttattgttttatagtgattcttcactattaaatccgcacaattttaaaactcgtttatatgattaagaagaacttacaacatatatataggtcaaacagacaaatattcccttatagcatcggtccatttgtaatgatccattatttcttatgtaaatattgtctattttttaatatctcatatcaataaatttcatatattttgggttgtcatattttgtgtaagttaaatatattatgagtttgtttgacagtgattttaaaaaacgtttttaattttaatttttttttaaataaggtgtttaacaaaatttaaaaaattagataataattttttttaattatataaatacattttaaaaacgtattgtgatagcttattgaatatagaacagataatatctattgataatgttaggaataaagttggcttgtgagtggggatagaagactcgtcgccttcgtgacttagacaaactttgaaaacactttacttcccacttgggttaggagagcaacaatggctttgggtgactgtcatttagtgtcatagacggtagaccatatcacacatgctgccaccccttatacgtatagaccttgagggaccatcaaaaatctgttaagccagctagaaattaaatatatggccagttataagattaggggttacattcatgacgctgttcactgtatttgatacgctgtttgtcaaggacctcagcttctccttttatggaaggagtgcgccctaacgtcaagtttcagtcaggtcgaggaaagttggggctttttacaagaaaaataaataaataaataaataaaatattgaattatcatatttcatatttcatatttcatatttgtattaataattttttttaaaatgatataatatatataaaaataaaaaaataaaaaaatccagtggttacaaaaagtccaacaaccatggctttttgtggttctttccttccaaaaacagtagtgtaaaataatccaaaaacctcatgtggacctcttgtctacaaaatcttaccatttacatacatctaatcgcttttatttgtcattattgtatgctatcttctagaacattcttgagtttacaaaaccttgttggcccatgcaaaggcaggattaaatgtaccaccgacctatatcatcattgaccttcaaccagcttatatttctattccatgatttcttacccttgagagtattatctacattacattacgtccccaccacaaccagatcctttgcttctttgtcttgaagtagtttccaagaatcccaccaaacctaactctgatttgcagttacccctcttaccggttcgttaggttcataaccccgaaacaaaaaaaaaaaagtaaaattagagaaaatacccgatgaatgttctataataccaggtattcaaaaaaaagtacatgaaattttaatgaatttaaatgaaattagattaagaagtaatatgtatgaaacttacgacatgcttatttgaattagtgatcttggatacgtatgtgttcaaggtatcatcttatcaccttttatgaaaatcattagtaaaacataatatacagttagtcagatggaatcgatagatttttgtattagattgcaaatataatgtaacaagatcaaataacgtacttttaagacaataaattatcctataaatgatatcgtgttcatgtgagttataatatttagattatgagttattttagaattcaatctattattaaattaccagttttcctaaaaatttaaacttacagcatttgaattcactatatgtatagtaatgctccttatcaccccctccttaagtacagtctcatacctcatacccgcatgttgagagattttaaagaattgcaaagggaggaaatatacgaaatgtaaaaacaaacacgaaagatagtcaaatgagaaaacaaatatacaaattacgaataagtcatttgaacctttgacttatcactaagccaagttttaataccatattaaactattgaactactaatttattttttttaaataatattcttttgatgcaaagctcaacaaatcataggttccattggttggcatgtaaattactctactataacgtcaacccttttgtcggacttatatgatccaagaatctgtgctttgctgcataaagacaatggattcagatctcttttgactgtcctttttgggggagacttaccaagcgatgcttgactttgactcttcatatgtttcttctttcaggtttcactcctggggcagggccatccagagggcactttactatatgtcatggacatcatgattctatgtgtaagttcaagctttgtagagtcatcagcggacacctctcaattaaatatacagagaatataatttttattttttttattttttaatgttttaatcaattttgatttataattttgtgactaagattgatatttaatgtttgatggtcaaaatacgaggtattgattacattaaactatgtcaagaattaagaaattaccaaaaatggattcggtccgaatcaaaattgaaaagcaaaatcaattattttgcttcgtttcatttttttgtatcgtgtatttgtataagtctaatttatttatatttgattatatatatttttaatattcggtaaatattaaaaaaaattcttaaatgatttatagaagaacatagtgtcttgaatttttatttttttatttatttttaataaaaatgattatttttaataaaatcccaaaagatttctgaacaaaattgatgttggattggatttctgtttactctttatttattttctcagctagcaaaagcccggatggtactatctatttttgggaaaacgacccggggccacccgccaaaaaaaggacagttcttgagtgaaaaaatctaaaggatgttgaattctgctctcacggaccaatcagagttgagagtcagcgaagacttcatcaacttgctgtaacgtaatcggccttgaggttacacactatcggtacacgttagactcacacgcctttgaaaaattgaaaagtcatcttttagctcagcaccaagaaccaaccacccgccatttttctacgccacagggtctctctctcgcagagaca

SEQ ID NO: 12309 - DNA, 6874 bp, Vitis vinifera
  Intron number 2 from transcript GSVIVT01036699001 (locus G SVIVG01036699001) derived from phytozome v7.0 (chr-ID chr1 9; pos 23635264 to 23642137)
aaccatcgccgtcgaagaaagtcaaggaaggtatgctattttctgatgattgattttggacttgtactccatttaacaaagcttgagaagaaaaaacacctaattgtacagctcttggtatagctttagaggtgattcactattgctaaaattgaacatgggcttttgtgtaagcctgatgtgcaacattgcttctttcttttattttctttctatatactgtctaatgggtgtgatgatgaatacaagccaagtgcaattaaggaaaacaaagggaaatttaaaggaaaagaaatgaaaaataacttacaagtgaactatgtatttttaggtctcttgattagatcctcttaaagaataaagagcctacctccccaaagtacttcaatgtgctaagaagcatggtgctcaagttgcaagcaacttaaccacgaataagggatgacctttttttagaaagttgcttctatcaggaaatatggtatacctttggaaggtttcagctaaatttgttggaactcatatagagttggaccttcttaggtaaatggacccttttcacaaatgtaccggatgatgaggcaaattgtctccttgggttctctagataagcaactacatagcaaagtggagaatttaaaagatgtcacagctgtctagcatggtataatgaagaatgtttgttattctctacctaaggcttgaccattgatggatcacaaattgttgcattcgtgtgattgccatttctgaataaaatgttcccaaaaacggttctagttcttaatgcaatgttgaaagagttggaactatgatggaacttctgatttaaaaaaaaaaaaagtgattttgcaatataggaatgcaggacggtatttgatacagccctagtttctggacttaggtgctaccttcattgttgactatgacgctttatttaggacttttgataacacactatcataatcactgaaatttccatttttgttgaaaatggggctggaaaatttagttgcactttgctaatttattgctgaaagatgaatgggcttttgtgattatcaacagctattcaaaatcacaaatttccccttaatcgttgaagagctcctttgctagaagtctatcattacgagttagaatataaatagtgggaggaccaatacctttttaattgattttatagattgggtgagatttggttgagggagggagtagttttttgtatgacccaacttgttttggaacttcctttgtccattactcaaaacagactacaaaacagaggtttcttcaaaatcaaagagaatgagtgcacctccgaggagggatagtgatgtaggacaaccctaggatggttgcctacagtcaagtagatggactagggtttttatttttaaggtgtaaagagaggaacaatgaataaagtttatggtaaagaaataaaaaataaataaaaaaatagagagaaagaaaatacgatgaataaaagatggaaaccttgtgtatttcaaagtgctattttagcactttttgtttataatacacgcttgctttactcataaaaaaaaatggaaaccttagaatctcactaaggccttctagaagtcacttataaaaaaaataaaaaataaaaatctaaggccttctagaagtcttacctagaagaaaatcaatgaagtcttaccattaaggattgcaacacttgcaaaaaaaaaaaaaaaaaaacataatgttattaacatcaataaattcattgccttgatttacatcaattagccttatttataggtttctctaagaaattcaaagtctactcggattctaataatctattatgactctagttcttattataacatccaaagtctaggattctaataacctaatataactctaattctaatcatattataacctaactagctaattctaattttactctaacaaatattaatcctaatttaattccaattaatattaatccttttttaagtttatttatgtcttctctttcctcctttaataaactttaagaaactttcccccatcaactacctcgtgcttgaaaaaactcggattcaatgagttagatgcttcatgcaattcatagagatcagggttaagcttttgaaaatctattgttgcaatccatgtatttcagagtgtggtttgtcttgccatttcaccaaaaaaaatttgtatccaccttgttgagtagacacaagttgatcgttaagaacatactcaatctcaagatgtgggctaagattaggtggcaattgaagatccaattcttcacttgcctcattttgatgaccatggtagacaaactaatcttccatattaaatattggactaaaatgcaattttgaaggaagctttaatgaatatgcattctcacccaaccactttagtaccaaaaatggaaccattttcttagcttgaagctcttgatatgtgctcgaatgaaatttttctagacgcaaatgaacccttattagatcaccttcttgaaactaaatatatcttctacctgctcttgttgcctttccattattctcattgttgattttgattttttctcggatcttttcaaattgatgcatggtaagcaccttttttggttgtgcctcctatgactttttaattggtgaaacttctttcaatggatgaaggaccttcttacaccccttgtatatgaagagcatatgtattttcgtaatcgttatgttgaactcttctataaaaaagccaaggtcttccaagtaaaatatgacttatttttattcgtaagacctcacaccatacagactcttcaaagtccttaccaaaaaggaaagtgaccaagcagcaaaaacttatcggaatagaggtgttattaacccatgttattcagaatggatttggatgtctctctgttttaaggtttagcttctcaacaaactcttgcgaaattatgttcaaactgctacttccatcaatgatcacggtgcataaccttcctcggcaataaatacatgtctagaaaatgttattaagtcgccgatcttcttctccttttacctttggaatagctaataaaggtcgcactacaagactatatccttctgtcataccatcatagtaatcacattcttcactaagttcatcctcattgtgggtctcttcttcctttgggtaactctccaattcagattctggttcttcaacacaaaagtgtaaacctttgcttgagcacacaacaacataatgaccatgcccaccacacttaaaagcataagggagtcacgtctacttttctatctccaatattattgaagttttacccttattatcatctttattagccacatttgaagtttgttgattgttacccccactactcgcatgattagaagttctgaagcttgatgtacttaaagatttgcatgttgtccgattggagaaagtgctcccaatttgtgaacttagatgtctggaaactcgaaacttgaggtcttcttctattttgagggtgttagctaagggttctcctaatcgcgttttgatgataataaaccatggttaagttgctaattggtttaaattataaacaatttcaggtattagtttggaaattcatcaaagaacccaatggatgcaagatcaagacaattagaagacctttaatcataagaaacatatgtaagatgaatgcatgggtacatttaggtttttcatatcttttcatgcatctttaaaaactcagtttatgcattaaagttacatttccatcaaaactcgagttttatgaaatgaaccttaagcaaatcgtttcaaaattgacatattaatttacctaaagactttgcctaagtgtagaagagaaaataacaaaaaaagataggttttcaggcaaaaaatggtgaaccggttgatacactggccaatcggctcaaccagctaagatattggtcgactagttacaccttcccggttgaggtccgattgagagatgcaaaaaatcttctctctcttccaatagccttgcattctcgatcgaaggatatgccttcccgatcgaggtccggtcaaggatcggtcgaggcctaacgatcacctaccatgcatttattgcccaatggctagtcaacatgttgacccctagctcgaccgattgagactgctttttggcatttatgactctagaggctagaaacttataaattgagagctccacttcatttatgagtaagagaacacctgcatttatttgtttacctaattgttcttgcctcaaagccctcattctttccttagtgcattaaatctccatttgcatattccttagtgcacctttgtgatttttcctagcatttaagttgtatttgagctaggttgagagattttaacttgttatttgagttttagaagcttcaagtgagtagagatttgaagagattgtgtaagagcccattggagttgaaattcaagtataaaggtgttagaagcttggttgaagcttcaagtatagtggaacccttactcgattaagagcttgaggagagtgaacgtaggcaaagggtaccgaaccactataaaatctgagtttgcttcttctaaccctatctctttatttttgtgcttcctttgcttgaatttgttatgtttgaaaaatgatttttaaaacccaattaaccccactcttaggtgttttccctattaagattagcctttgttttctcaaagggctagttgataaacatcatctacggtataagtgtgtatagctatcatctcgttgaatctccatttgaagtccagctttataacgggctgcaagttgagcatcactttcctacacttgattttgaatgctcaattcatgaaattcttttgtatattcttcaacggacttggtaccttgtttaagggaaaacaattttgtgtacatgagttgttcatgatcagttaggagaaagtgctccttcatcttcaactttatctcgtcttatgtgtctataggtggttggctaattctatgaagttgattctcaatattatgccaccataaatgtgctgctcctttcaactttgcctttaaaaagcaaacttttctattttcggatattgcataccaatcaaagtaatgttccatcaacataatccaatgaagaaaagttgttggatttaacttcccataatatttagcaattttaaggcgtaccttttttgtcacatcatcatcttgcttaaagagtttgccttttcttggattcctcatgataaaattgcattgtttttcatgtgatctacttggtgattgtctaaattgatggcttgcagtttcatcttcatttgattgtttttcttgactttttttttaatgacttcatgatctcgtcaagtttactattttgttgtattatagcatcttgatggaattgttatgtggctgaaatttcctctaagcgtgttgtagcgacatcttgattgttagaagcatttttggaactcatgcttgcataagttgctccactccttaatcacatatgccttcaagccaaaaactttcgctctaataccaaaactgatgtaggacaaccctaagatggttgcctacactcaaatgggtgggctagggtttttatttttgggtgtaaagagaggaacaaggaatgaagtggtagagaaaaataaaattaaaaaaatagagagaaagaagatacaacgaataaaagatggaaatcttagaatctcattaaggttttctaagattctcacctaaaagaaaatcaatgaagtctcaccattgaggattgcaacacttgtaataatattatatatatatatatatatatataatattattaacatcaatcaattcattactttgatttacatcaattagcctttattcataggcttctctaagaaatccaaagtctactaggattctaataatttattatgactttaattcttattataacatccaaggtctattaggattctaataacccaataagactctaattctaattgtatcataacctaactagtcaattctaatttaactccaacaaatactaatcctaatttcattccaattaatattaatcctatttaaagtttatttatgtctttcctttcctccttgaatggactttaaaagactttccctcattaggtagcctcagccccaacccacccccctccttttaaatgtcaagccttagtagcccacctcttcattgaaggaaaatcaagaacaggataaaattcttgtcttggtacattgaagaagaatgtgatcaattaatttttcttggatatgtttgttgattttgattgatttatctttttattttcaacttcttagtggataattaaacagaaaaaagagagagtttgcttgaaaatcaacttttataacaatatttaagggtaatgaaaaaaaagacagggataaaggagaaaagaaggggagttttttacccaagttttatttgcttttgattgattttttttttttttttccttttattatgtcgtatccaagtattcatacctgtaattggaatcctttttagccgaatacttaaatcctaaaatttgtaggtgtgaagaataagacaactagacacaaccacactcaacacccgcactccatcccatgcaacattgtttgtaccctgcagtaaatctaaccccccttctaatactgtaggttgtcaggaagcacttaatgccattttttgattgctggttaacactcatatacatatattttgtttattaatatattttctatttaatctatgccacttattattctgttcatgttttttatgaagcgtaagaaatcaggtagacgaaagggattgaagaa

SEQ ID NO: 12310 - DNA, 4799 bp, Vitis vinifera
  Intron number 2 from transcript GSVIVT01009189001 (locus G SVIVG01009189001) derived from phytozome v7.0 (chr-ID chr1 8; pos 5922960 to 5927758)
catttctcaacctgtggtgagttcattttgtcttttagagaatgttgttgaactttcatttattgttagtcttttaaagatctgtggttgaactttcttttgtggttagttttgacacctttcacttccatttgatgttgttgttatttgtttatcatagtactgtagtttttacatattcaatttcttttcagatattattatattagaagctcaacttttcttttctcccacccaccagccagcccaggcctacctccacccccaattatctctctgtgaacacattattattatcatttttataaggtcttgtctcccatgaatattagatatctattctatcaaaaaaaataataataattattagatgtctgcttatgtgagaacacgagcctttttttttttttttaaagtcaaggcaatcccactcacatgtatgaagaagatatagaaaagaggaagttgaaagcaaacacaaatgacacaagctgtgaactagatcacatgatctcggttatcacttgtgattcctcttctaactttcagtccacttaaaaacaaacaacctttttttttttccccttttctcctttgtgtttatccataccccttatcaagatactagcatacctccctttccatcacctaatgttgttgaagtgtgtgagcttccataatgattccttttggatccaggaaaggtttattggaagaagtgttgtttagcaatcatcacctcacatgaactcctctaacacaacacatgtggttcttaatgtttctagaaagaattcaaatggattttgagatctgattcttctttttcatgacttttgagggcgataaaacaacattaatggtgatttgtagaaaactgtgtgaacatgttttgaacacacgacacaccacagttgatcagaggtttttttatcaagtagtaatagtagttggacatgtgatgcacctcaattagggttgcaatttaggcagcttaaaaggctaacctcatgtcaaacccacgatcaacatgtccaaccaatgccaacccacactaggtgtgtgggcaacacgattttccatgggttctctgcgggttattaaataaaataattgttttaaagtcaaatctattcaaatcatattacaaaataaaaggctaaaagttaaatgtcgcaaaatcttaaaatatgtccgtttgttattgattttacataaagacaacccaaaaactcaaatttcaacattccaaaatactttaacaattaaacaaaaaagataaacccattactttgataaaattaaaaatgataaaccctagccaagataataaaaaagtaagaaatgttaaggtttattccttgtcctttttatatttttcatattttaaataaaattactgaaatataatttaaaaataataaataaataataatgtgtaggtttgggttttggcggattgcccaaaccttcaacccatgccaaacctaatattttcagggcaatatttttctagcccaagcccattgttatcaaaggcgatgattgcctgggtcgcctaggccatcgggctaggcagggtagataaaagtcgccttttgaagacctaggcaaggcgactttaaagaggcaatgcctaggcaatcaccttgggataagacacaaggcatagaggcggtctcctttgaccatgaattaagattaaacatacttagattataatttcattcaatctaacattggattaaacaaagtctaagataaaatattatattatcaatcatagagataataagatggaggtttatcgatctagtcttgatgggagtaatgacaattttaatttcaataatgactatgatggtgatgcctaaagcttctctagaatgttcaatctcttattttgttttttattttattttttagatgtttgaaaacactttcaataattattactattttgttaattttataagacattgtgagcgatgaaaaattaatagtgttgattgttgaagacaatacttatattggttgaatatcgaataggtaaatatatgtatattttttatcgccttactatagttaggctatcgccttgtttttcacctttcgccttaggctaaaaggagtcttattgccttgatatcgccttttgcttttgacaacactacccaagcttgacctaaacccattcaaatcttgcccacaccaacccaaaccatgggttgggtgggttgaacctatccaagttgctgccctaatgacaatgtttcccattatattggatactatattgcttattcaagagcaatttttcatatcaaaagagtgattaagcatcttggcttgatgagtgctgtttgaaggttgttacattcccggttgaaattggctgtgattacaccttgaacatggaatctctcatatcccaatcccaaccccttgtttgaagcttgttgcattccaggttaaaatttacccttattgcactttgaacttggaatctcccatatcactatcctacccctttcgcttgagccagttactagtttatcaccactattttgtcttcttaaaagttgttctcttgcttctaattattcttatgttatcctatatttactattctgataattaatctttttgatttcattttgattcaactcatccattatttgttttttattctataaaatggagcttgtggctatatcttctagaaaacattgtccctgttcctgtattggtgtattttgtctattttctaggaatataatctagcatcatgcatggtgtttgtcttctcatgctgaggtaaatgtctttgcttattgatttctatggtccattcatgtgtggttgtggacgcttctggttgtaacatgaacacatgtttttaggtagtttgtaattgtttattgatagtccctttacaaagggccagaggccttcaatttgtataaatagggtttttgcagttgtttaggagacaatacatgtttttttgcatcttgttaaaaggaaaaatcccccatttttacaaacccttattagacagtcaacaaaaatgagtgaaagcataaacattaggtagattgtcaattcatatgatttaccttaccctaggtaaacttaatactattccctcttttcactaaaccggcacttacagttttcatgaacatcagatctggatcatcaagagactacttcccactcttttgttctttctccttactttcagtaaacaaaatcaggattttggagttacttgacacttcagaataatttggaatttggaaataaacttggaaaatgttgcgaatagttcaggaagttggggtggtgatgatttgcttgggttgggatggggagtaggctttggtttggtttgattgtggaggtgctattcagggatggtgtttgttttgtttggtattgttgaatagtattctgtgaaagaaaatgtagcatgttgcatttgggtcgagatataagtgaatgactttttacttggttgatttggttctacattggcaaaattttttgtttatgtataaaatgtttatgcttttaagaaggttttaaaattcaaagcaattgctccaatgtttgctatcattctattattcctttatactttattccttcagaagttcctattgggcactgatcatcccatcctatatgattaaattcctctatacaactctacccattgtgcttttatttttatttttattccaattcacttctattctaaaggcagaaaaatagtttgtgaaacattcagagtatttacaaaaaacttttgccgcattcagcatgtgaaatgaggttgataagtagattaaagaaggcaaagttgatatgagggccttaatcctcaaacaagaggtgttctttcatatgcaagttccttctcaaattctatcagatatggggaggaaaaaattaacaatacagaaggattggccaattggtttttcatttttattttagttgcctagaaattcttagtacggtgcttgtttattgtacaatgcctctagttcaactcttacgagtgccaagaggccttcttgcttttgcatggaacagcctctacccccacctaaacacattcacacatctgcagaatatagttgagagataccttttatgctgctgtgctgtgttgttcaattcttttgcagctttcttttgtttttccacattcttgttttcttccttatgttttcctcctttcctctgatgtttttttcttctagcagttccatagatgatatacatgtgtaaggtggtgtgcaaatatgtgttatacatgtgtggatcttcatttggaactgactttggaaacatagactcggaaattttatcatacacctgaatacagatatatactatagaaaatgaaatggcatgactcatatggtggaaaatgcatttttttttcctagatcattttcctgaaagttatcttgatattcatgactgatataattcatatattgcattactagctagacggtatgtgatcgcttccatcatcaccagcttacaggtctatccaacagaattgcactccttttagtggagtcctttttttatttagatacggtctctttttatgaatctgatgtttttccaattgcaatcatacccactagtattgcttgttgcttagtgaaaatattcttagttattgttattgtatatttttcgtttcttatttgtagccacatgcagttttcagttgatttatatctgacttcttttttggcgtgtgtttcagc

SEQ ID NO: 12311 - DNA, 2096 bp, Vitis vinifera
  Intron number 11 from transcript GSVIVT01000823001 (locus GSVIVG01000823001) derived from phytozome v7.0 (chr-ID chr 12; pos 640979 to 643074 reverse strand)
agcaattgaccggttttgtgagcctcctgaggaaggtaagctagatatgctgttcattctgtacttttttcctcaagcttctattaatatcaagatgcattctcttccaatcctaccactattggtaaatagttataattaaattgtcaattatataatgtgtttcacttgccaaataaaaaagagaacaaaaaaagaggaaaaactgtatttctttttcattttgattcagggtgaggatcctttgtgtaaacatggaagcttaacaaatttggcatgacttagaggaactcttatttatcccagttgtgaagctgcgagaagaaaaaggaaaaaaaacatgaatggagaacatgttctataaccttatgaattgatgtcaccattaaagatcctcagaagcaaaaaattcaatcttcttagcacatgaaagtttcacatatacagcctctaatgattgaatagagcatagcagcctaatctcaacatttgtgcatgatgatcacaatctaacacagccctaccttggaattttggcattcagcgaaaatttagtttttatcggggctgtttagtcctagtggagtagttaattatttatttattcatttgcttttgtatatcagtcatctcaatgcctcgatcaaatggactttgcataggttataattgaaatgattaaatctttttgttgcttgcatacttgctattggtacctttatctattcattagtaaaacatgctggttttgttttgtctggttttgttttggtaccatgggtaagatatatctcatatcatgcatcctagaagatgatataatagaaggtgactaattacaaattctcaaaaattcaaaattgtttaatgatgagcagtggaagaaaggtaataggagttatctgtcacatctaaatcttaaatccatgaaatattggaaggacacaagctaatttgaggttccaaaactggggtggacattggtatgtgtaaacttctggttaaaatgatgaaataattccaaatatggcattaaaagtaatgcattcacctatgtcaaaattaaacttaaccaatgtaggtaatgaccaaggtcatattcttattaattggtagctaattcatcatccagttaaaatcatacaagagggtataatcattttcaccaaccatgttttatcttgaagcccacattaaaaacaaaatatttaatcttggctaataccacaataatataaaattttgctttaggactctcacccaaggatgtgtgtctgcacccccctattatattcctaatggaatcttcttgaggttactttggggtcctccatcactagggacacgatgctgttcttctttttgggctctacctaggggccctggccccccattaatgcataaattcacaattgtgcaacatatgatcggttttttatagaatttgtcacatgcataatcacttaatatgtagggttccccacaaatatgtccatctgcagaatatctccaattaaactaattaggaagaatacttcaacctgcatcactttgtagttcaacaaaagataattcattcacacatttaataaaaatattttgaatgtccatgattaaaataaatatcaatttattatcaattctaacaaatgaaaataataaatcatgacaataacagtttttttttgtttttttaattgtagcctcagaatttataaaaagaactaacataaatgaagttatctcagcacttgatttaatattctaattcttaatttcacaaatgcactttgtatagttattgttcaagaaaatatttttaaatacaaattattagtagtagtagcatgtgcatagttgtttctgttcaagaaaatattttaaaatacaaattaccatgtgcagagttcatattgtagtctcagtatttttctttcttgtcctttatctcacttctgctgtttactctggataaggtaaacttggatttttttttatgtaagatcattctaaggcatgatcctctgcttcttcactgcttatgtttattgattactaagtacctttaatatttatctggtattccataaggattg

SEQ ID NO: 12312 - DNA, 4182 bp, Vitis vinifera
  Intron number 8 from transcript GSVIVT01026449001 (locus G SVIVG01026449001) derived from phytozome v7.0 (chr-ID chr4 ; pos 23478824 to 23483005)
gctccccctgttccatacctactgcaagggctttggttgacattgcttttgcttttcgtcagtagaagctattacttctagctggctggacaggttggtagtttgagtttgtattgcaataaatgctagaaattctttatttattgtctatttggcaaaaagcttttttagttctcttgcaaccctgaaaaataaagctacatttatgtataaataaatatgttataaaaaaaaatcaggtttttacacataacaaacatatatttgcaaaaggaaaaagaggaccaaaaggaaaccctagacaaaatttagcaaaagataactaaagttgtgatttgcataaaattttgattacctcaaatgattaagattgtgatcaataaaaaaaaaaaaaaaatcaactcaaaatgaacaaagagaaaatgagagaaaaaatgacaagaaagaaaaaaatgtgtttagatgagatatatggagtgacgttacaagtaccctcattacaagttattattttgatagggaaatatctattgtattaatagcgcttaacaaagagttcacttaaatagacatggtgtattcaagggcaccaaaaggtcatacctaatggtagaatatacaaaaacaactcctatccactacatagagctcacccaatcaataaagtccaacatggacaaagaatggtctataatgtacactttaacccattccaaaaaattatacataaatgattgtttgattacttgataagcttttttagtattctcgaacattcatttatttctttccttcaatattgtccaacatagacataagagaacaactctccatgtcttcttcctctttctcccaacaaaggaatggtgctagctctggaggaccttctctattcattctatctcaaatagagttaaaattaattgacataagattgttgcttttgagtagtgaacgaggatgtgatcaatggttttttcttcttccttacacatatggaatttatttggtatcatttatcccctccttttgagttggtttaatatcaatatcatttcccatgcttcccaagcaaaaaagctgactcttgatggaacctgagggttccaaacaatcttggaagggaacatctccatactatcattagacaaaaaggagtagagaggttttagtggaatattaccacactttgtgttcaatcaaaccattttatccctaatgtctttgtcaatagattgtgattggaatttcctaaaaacaacctccacttcttctagctcctaatcgtggaattgtcttgagaaatgagagttccaacatttctttcccccttcttgttcccacacctcagctacccaatcctctttggtagtgagtataaaaaacataacaagaaaagcctctccaaggtaaacttcatcacatgagtatcctttcaaaatttcaccctttgctcattacccaccctaaacccgatcctttggttgaaagtctcccacccccttctaattgccttccactctcccattccatacctttgcttaaaagtctcttgttgaaaatttcaccctttcctacaccaacccaaacccaagaagatctgaaaagggctctcaacaatagacctagataactagtcgggagggtgccaccttgcatcttagaaccctagaaaggtcctctacattggaaactagccccattgggatcaatttactcttctctaaattgatttttagtcctaagattgtttcaaactacataaaaacccaaccaaatggttcatacgctaagattggcatcacaagggatgagcatatcattaggaaatagtagatgacaaacatccacatctcctcttccacctactgaagaacccactaagaaatcccctttcttagcattgcttaggatgtaggggagagcacccatagccataatgaaaaggtataaggatagcgggtttgtttgcctcaaacttctagtactctgtaaaaaatttgatagggtcttattaactagtatagagaattgagttatagaaatgcaccacttaatccaccttatccacttaaagccaaattccttttttttttcgagactcccaataaaaaaatcctgattaacatgattgtacaccttctcaatatataaattacatatgaccctaatttcaaagctcttcaaccttgagtcaattacttcatttgctatgaggattgcgtttaggatttgtctatcctccacaatagcatgttgagtagttgagaccaccttgcccgccactttctttagtatgttagccaaaacttttgctaaaatcttgtaaagcccgctgaccaaacttattggtttgaagtcttctaaatcttcagaaccccctttgttggggactaacataataaaggtggaattgaggcttctttagaaagagccttactcaaagaacttctcaaataatctcatcaccttagttttcactaactttcaattgaattgccaaaaaactatagaaaagtcatctaatctaggggctttatccccacacaaactggaaagggttgaaaaacctcttcctcaaagaatgtagactcaagggactttgagtcttcattatccaaaatatcaaacgacttcccactgatgcttaatctttactctcttgatttggaaagaagactatggaaagcatttatcactcccacctttatatccgcatcctttgataacaatttaccattcatctagattttagctaaaatagtttcatcttctatgagcattaaccatggtatggaagaactttgtttctatctccctcttttaaccattactctcttgatttctgcctctaagagacttcttccattgctccccacttactatgcttctccattgaaaggactccttccctttcctcagcaaaggcttctttattccatattttcagatctcatttcaatgcttttaatttgagagctcaaatgtgattgaacgaatcccaaacattgtaactcacccacaatttctaaggtccttgaatcttttcactctttgccacatattttcaaatctgaaggatgttttgcctcttgtcatctctcctccatatgataaaatggaagatggctggagtgggagaaccttttgaataagactactgaagtggttttctcaccatttagagacaaggaaatgatatatttttttgataggaaacgaaaaaggaatatattaatagaaaaaagaagtacaagagaaggatgaggaatcctcccaccaaagaaaactaaactataaaaatacgaaaacaagaaaatacaatgtaataatgcacaaactctctagactagaccaacccaaaggaattacatgccgctagccaatcaagttgtaacacaataaggggagtccccttaaagaccttggaacaaaaagcccaaagagaagcaaggaaatgaatagaatcccaaagattctctgaattccttgctttatcctaaaaaatccttgcgtttcttttccatcacacaacctaaattatagctatgcacgcagagcttgccacaaaactgtccctctcttagataaaccaaaactattgtattcttgatgcattcttgatgcaaactaattattcaatccaccactccatgtaaaaggaccactagctaagggtaattcccttaaatgaagtccctcattgctgcagactatctcaagcagttcctcctttccacaggatgcttgccattttgaagtcccctcttatgcattaagggtcattccaaagccgtcttatatcacctaattctgcccgaaaatcctctctcctcattataaaccagcctatacacccttgtaaacatccaaatgaagttgtcctcatagtttttgaaatgtaaagagattgaatgtgcccccacttccatatcaattaactctggtaccctattatcctagaaggctaaaatccccttgcttgatccctagcttctattgcatctcattccaaaaatgtgcccacatccaaacatttcacaatttgcacaaacatttgctggacctgtatttcttgtaatctgcacccaaacttctcattacaagttatgcattagaaacagaacaaattttgaacccaacactatttaaagcacagacgaaaataatttcaaagaaagc

SEQ ID NO: 12313 - DNA, 5379 bp, Vitis vinifera
  Intron number 1 from transcript GSVIVT01038642001 (locus G SVIVG01038642001) derived from phytozome v7.0 (chr-ID chr1 6; pos 21263787 to 21269165 reverse strand)
tgtgtttgggcaagcagcctagtccgcatcagcaaaggccctaagctgaacacaagacgttgtgctgaaaaataagccttgaccaactgttgacttgatatactctagaacatgataggcagcttgaaggtgaggaacacgtggattagctaggaactgacttaaatgattcattgaataagataaatctggtcttgtgattgtaagatacaaaagttttctaatcatccttctgtatctaagagaatcatcaagtaaatcatcatattcttgagacaactttaagtttggatccattagtctttcgagttttgcatctaagatatctggcctcagataaaagtttcaaagcatagtgacgctgactgattggagcgaaaatatgtgctctaatgatacatattcaatatgatttgagcatcaaaggacactcaaatcacccaacttaacctaaatcgatgctaagaccctagccatgagtttaacttgtattttggagatttatctaaggctcaagagaaaaaaaatgatgcaaattgaattactttagattttgaaaaaaataagcgagtcaagactcatggaccaagagaaaaggtaagacgaggatatcatgagtttgggagatgagaaatgaccattatggagtaagaaagaaggcaagaaaacatgggaaatgaggcatgaagcaagattcagttgcatagaaatttagaactcaaaatatggtggcaacatatattttgactttgaggaaaaattttgagtacttcccaaagtccattttaggcatattgtatattgttttgaagctcaggaagtcaaaagtccaacgcttcaaacagtgtataaatcgaagctaaaatgaagaagttatggtcattcgaacaattgtgcaaaactaaagggcattttgaaattcaactcatgaattcgaaatccaattcaaaatgaccccaatttcgaattcatccactgccactttgatgtttcacctcctttatcttgggaattgcatctagggcactccatccacccgaagtggaccccacatgactagaaatcatcatttgattattttttaatcattttttagataattatttttgtagtaagtgatcaatgagagtgtgtcacatgttaggtaattaatgatattatataaactctcttagttctaggttttagggatcttgaattttttttcgagaaagttagacatttaaggtggaagaagatgagaactttgatttgttttctttttcttctttattaaatatattgtttttagtttctttttattcaaattatagattcttaccttattatgaattgtgaatgtgacatcactcccatgagaagctaggaagtcaacttggggcttgaaacatgaaaacctaggggttaggaaacctatagggataatggataaattattataacaatgagattaattattgattgagtaacaatttatcaattttttttatcctatccttgtgagttagtttagggaatgatacagtaagttattactcaatactagtgattcttaaaaattcttgatcattagttatccatgtcttctctatcgttgtttgccccaaaacaaagctataaagagtaggaggggttaaaaaaagccaaattttaaactagtaatcaatctcattcatttcatggttttagaaatctgttttaaaaagaaaaaattaggtttcagatgcaattttgagttatagaactcaagttgattgcaagtggccaatgatcccaaaaccctaagatcactttacttaagaaacccttgttctctctatttctataccttaagttgaactgtggaaagccccaaacttgaattgattgaattaaatcaatattcgttttgttattaatttagttttattcacttaatctcatttcataaaagataattcacaagttgtttttcactttaggatttaaacaaaagcaattaatttattctagtattgacaatttccataagtcagtccctgaggacaatgcccaaagtactacaaaagcggtagtgactctttctctagtttttttttttactagagttgcaacgtaaaaagactaaatattttggaataatagagaagtttggtcactgactaactgaaattcctttagaagaccagacaacttcaagacccaaaaagtatttcagatttcccaagtttttgagtttaaaatgattatccaaaaaaacctttaaattgtccacttcttgttgattgttattgacaatgacaatgtcatcattgtatacaagcagagttaagaaatatgagtcagccttcttgataaataataactatcagagacagattgcttgaaacctgtggcaaggagtacaccaaaaaacttagaaaaccattgtcgtgatgcttgtttcagaccatacggtgatttgtgcaaatgacaaacaacatttggaggtaaaggctcgccctcatggtgataactaggaagaagagacatacaaacttcctcatgcaaatcaccgtgtaaaaaggcgttattaacgtcgagttgagtgggagactagctatgaattgcaacaaagctaagcaagactttgacagtaacaagcttggcaactggggaaaagttgtccaagtagtccactccttgttgagtgtagccttttgctactaaatgagccttataacaatttatagaaccatcagcaaggtatttgattttgtacacccatttacagcccaccgggtgcttaccatgaagaagagaaaccacaaaccaggttttgttactttttagagctcgcaattcatcagccatagcaatctgccactctagaatgtctatagcatgagcataacttgcgggttcgacatgggaagaaagagcacaaacaaaggttgtgtgtgtggaggacaatttgtggtaactaagtacttgagataagagatgagaagtagaagaggactcaactattgtggaatagcaatgataatcctgaagataaggagggtgacgaatatgagtggaatcgacttgtagtgatggggaagtggaagaaatagagatttttggtgaggatgaggaaactagagtaggaagaatgcagccagagaatatgtcatgtgttacacttggtgagggtgtgttgtgaaaaagaaatttagattcatggaaaacaacattacgagaaatgaattgggtgttagtatccaaatcaagcaacttatatcccttgtaaccaggtggatatctaagaaatatacaaggagaaacacgaggagagaatttgtggcgaggactatctaaagttgaagcataacaaagacaactaaaaattcagagatgagaatatgaaggtttctttttccaaagcagttcaaagggtgttttgtttgagagaatgggagatggtgtcctattaatgagataaactgaagtagcaacacaatcattccaataacagaggggaacgtgggactgaaaaaacaaggctcgagctacgttcaaaatatgttggtgtttacgctcaacaacagaattctatgtgtacgataaaaatctgtaaatgtgagttcaggagcattatcggatcggacagatttgattttagctccaaattgagtcaaaattagaagaaaaaaaaatcagatttggcacataagaagtacacccaagtaaaacgagtatagtcatcaacaatggtgagaaaatattgaaaaccttctataaacattgtgtgaaaaggtccccagatatcaagatgtatcaaattaaatggttcagatgacaaatgatttgaagaaataaaaggcaaacgtatttgtttagctaaaggacagatagagcaatgattggaaggttcaaaatctgaagaaattctcaattcattactcatcatattcagttttacataagggggatgtcccaaccgataatgccaaagtctagttgaagacaaggagacgttattacaatgaactgaaatttgagaaacaagagaaacagatttgctagactccaagaaataaaggttcccttcttgtctactctccccaattgtcactccctgagtaaggtcctgaataaagcaaaaatcaggaagaaaattaactgaatatttgtggctttgtgtaagccagctaattgaaggaagattgaattgaaattgaggaataaataggacattgtcaagaatgatgtgaggtgagagtgacactgaaccaacacgactgataggaacagaattaccattaggaagcatgacaacaaaatttgtaatgggagtagaggaaataaaagtttctgaagtgcaagagatgtgatgtgtgtcacccatatctaacacccagcaagaatgagaaaattaatgtgaattagaaatagatgacagggctaatataccatgaatactggaaaaagaagcaataggccgcacaatttcagaagagacagtcgcttgcatgaagctgagagctcagaagagcaatcaattgttggacctgagatagagttagattctgagatggtgaataggtagaaacagcagctgcggcttgatttgcttgaacattcaaattgttcttgggggataaccatgtattttatagcatttgtgaattgtgtgcccctggacaccacaatgtgaacaaataggcttctcacgcctttgtttagctggtgcagaaactgcattggccacaggagcaatttcggaaagagaaggaattccatgggtaatagtacgttatctttcttcttgcactaccaatgcaaaaacttttgacaaggagggagaggttgaaaatctttatattcatcccaaagaatcttcaatcgggtaaaatagctattcacacccatggctccttgattcagagcaatggggtgtttcttgatctggaaaatacgcggcccattgctctggtgaaacctgtcacgaagatcttgccaaattttcgaaacagtttcaatgtaaagaagactatcgactatttctttgctaacagaatttaagatccaagacgttaccattgaattgtagcgaatccaagcattataaagtagatgtcctgaatctggtcgtggaagagtgccatcgatgaacgcgattttgttcatcgcagtaagagccgtcgtcatagatcgactccatgtgttgaaatttggcccagtcaaagaatgagaaaccaaaatcatccttggatgatcgccattgggagaaaatagggactgccagaatcttccattatcgtcgaggggccgataatcttagaagtattcatagtggaacgctggttggaagctacctgagagctgcctcgagccatagaagggagaagatcagaacgaagagtacaacagaag

SEQ ID NO: 12314 - DNA, 8012 bp, Vitis vinifera
  Intron number 8 from transcript GSVIVT01031054001 (locus G SVIVG01031054001) derived from phytozome v7.0 (chr-ID chr1 4; pos 21485651 to 21493662 reverse strand)
aacggtgtaatttgaaccctgaatcattcatcacagtatgtagttcttttttatctcagttcattgttggttatcctacattgtatattgtatgtaactatgcctggatagatatcaacattgtataaatgcatattttagaaaattgcatttatttgatagttatcctgtttccacttcctagggaaatttatggactttctacctccctgaattatgtaggttgcttgtaggatttatatttctccttttgtctctcatttttgtagcttattttatgtttcttttggagtagtatggatttttttttcctccccacctcctattaggttttaaatatttttgtctatcaaagaaaagaaaattttaaatattttttgaaggatatcttgtccttcattatacttaataattgatacaaatgaaattccttggggtgtgtggactctttagttctgaggcctgtgtaagttaatcaagaagccagtggtggagctaagagggggttacatatcttaagaaacttttcccttattttctcccccctccttttgagttgagggcctttagtgtttattaaatattatgttttcataaattttcctctttggtgaaggatcattactgtgattctaacagttattgataagaaacttccttgtacatattgtttcattccttgataaaataaagtttttcttgttagaaagaaggttccatgattagataacttatttccaatacatgaaatctaatttcattaaggagtataaatgagggaaatttcaaaattttcaacgtagagatatccatgagtggtcatttttgttatcgaggttcgatcacccattacaaaagcagtgattggaagaatattcccttacttcactagaacaagagtgagatcccaaggcaagggttacacaaatatgctttcgacaggatcaggtgtgttaccaaaaaagacattagattcttagaggtttatgaaatatagaaactataaaggaataagatggttataagattggtattgcttttggctataaagaaacaattttgtaaaaataggcaaaaaggttggaattggaatgtcatgcacttgtaagtagcaacaataattggtttatagtggaaaaagtagtctaatatgacttgaccaaggcaaaaaagatgaggtattgcacttgttatacttgtgaaagcttcaatgctaacatgttagtgtaagaacaaaaagataaaaccaactacacaaaagtacatgaggtcttaacatgattcagtcaaccatgactacattcacagaaaagagagatcatttccctatactgcagaaaatattatgaaggatagaaaaatagatagcactattgagccctgaaacattccttgttttcttgttgcttatacatataccctaaacatcgagtcctcactccattaagtgtctcctattcttcctcacatctctatttaccacgtatagtcctcataagccaatctccatctcataaccttttcctcgtgtgacgtagaatatttatataaatattcctaataattttcctattccctaaggaaatgtaatattacaataacatatcaatgtattaaatattctatacgatatttttttttacaaaaaaaaaaacatatataattaggaatttgagatactttccaacaatctccatcttagatccaattcaataaagtcaatcttaaaactctctatggtacacactttttgtatctcattttgaggagagaacaattaactccatgctcaaccaaaatttcttttgtaatccttttgtatattttgttctctttggctcttttagaaatctcaaccttggctctgatactagaaaccatgacaaagaacaataatagtgagaagaaactaagagattgaaaacaaaaaacacacaaagcacatgacggtttacatggtttagcataaagcctacatctacaagtgaagacgaagaacttttaccattgttcaagaaaactacaaccctagagctttcaaatcttagggtgtagatataagaagtggggaaacatgaaatgttttaaggctcaatgattatatcatgtttttttgtcatctataatatttgttataatataatgagataatctttctcattcgtggatgtaagcataattggttgagccacattaaaacctcgcatacctttgtgtgtagattgttttatctttgtgtttttacgctaacatgttagcattaaaacttctccatgtataacatctgatatgaaagccttggttgaagatttctaaaagagtcaaagagaacaaagcacataagaagattacgaaaggaattttagttgaaagtagagtcaattgagataaatgtgatacaagaagcaagttgtcattttccagaataagtgtagtttttcttatacacttattatatcttgaatggtggaaactgtgaagtgtctaaatggttttaatccatagcacacaaggggatcatggtgcatgataggatcgtgatgcacagatggaactgtggagagaatggcacacaaagaaatcgtggtgtggagtaaggatttagttcaaacaagtttctaattggtatacactttttttctttttgcattaatgaaatttaatgcaagatagggaatattagaaagtacatcaaattcctaattggtatacacttttttttctttttttggtaaataatattttggtatatatatatatatatatatatatatatatatatatattgtaaataatattgtatagaatatttgctacgttgatatgtcattgtaatactggatttccttataaaatgaggaaaattatgaggagtatttctataaatattataggtcatgagaggaaaaagattatgaggtggagatgagcttgtgaagactatccgtgggagataaagaggcgaagaagaatgggagactctaggtggagggagaagactcatgatttagggtgtgaatacaacgaatgggaaaacaaggctcaatgattgtatcatgttttttcgttcattgtaatattatctatagtataatgggatgatctctttgatttatggatgtaggcagtgtcggttgaatcacattaaaacctcgtatacctttgtatgtagattgttttatctttatagtcttgctccaacttgttaacattaaacctttgtatgggtgaaagctttaatgttaacatgtcaatgcaagaacataatgatataacaatccgcacatgtaggtttataagattttagcatagctcagccaaccatactacaaccatggatgagataaataattccactatactataaagaatatcatagaagataaaaaccaaatacaattattaggctctaaaatatctcatgtttccctactctttgtatctatgctttgaaccatgaatcctctccctctactgggagtctcacattcttcctctatctaccatatatagtcttcataagtttatttttttctcataaccttttcccctcttaagcttttcattttggcaatggagactcttttccgcatccttagcaaggtgaaagaagggggttacattgatggtttcttagtaaggggtagaaatgggttaggggcggaggttttccttttgttatttgcagatgataccctcattctttgtgatgctaacaagaagaaggtagaacacctgagttaggtctttatgtggtttgaagcgttatcaagactaaagatcaacctggagaaaagtgaattgatccttgttagggaggtccctaacaaggaggagcttgctgggatcttaggttatagggtgggtactattctaaccgtctgtttaggcttttttttgggtgccccttcaagtcttgtatggtttaggaaaggatggaagactgttttcaaaaatagcttgctttttggaagagacagtatctttcagagggggaaaagatagactctaataaagaacactttatccagtttaccaatttatttcatgtccctatttactatcccaaagagagtagttgtgagattggaaaagattcaaagggattttatttggggatgggaggcattgcttcacaagtcatatttggcaaattggacagttgtttgcttggaaaaaccacaaggaggtttgggcatcaaaaacctatcaatccttaataaaactcccttgggaaaatggtcttggagttttatctgtgaaaggaactctctttgaaaatgggtaattgcaaggaagtatgggcaacaagaagggggtggtgcgctaaagaagtaaaagagcagagtgcaatgggggtgtggaaggcaatcagaagtgattgggaggtgctcaaagattaaacaggtttcaaggttggcttcgacaatagggtaaagttctagatagacaagtggtgtggagacacaaccttaaggacttatttttgaccatttattctatagcttcctcaaaggatgcttgggcgaaggatgtttgggacaacggtagttagagttgaaggtttgttaaacaattgcatgattgggagctggaggaggttaatggtttttttttttaggagattgtatgaccactccattagcttggactttgaggattctatggtgtggttggagtcaaagcctttcccccatgacatagtttgaaattcctaggtcccaatgagagctagcttctttgcttgggaagcaacttgggccaggattctgatcctggatcagctcatgaggggttagagattcctaatagatgctacatgtgcaaagaagaagaagaaatgagtgatcatgttctttttcattgcacaaaagcacgagtattgtgtggtagttgatttttgctctatttggtgtacagtgcgtgatgcattcttcagttatggggtttctcctaagttgacatggttcttttgttggaaagaagaaaaaaagaaaaaaggtttggaaggttgctccattacatgtttgttttatagaacttatgaaaggagagaaataggtgagttttttataattgtgaaagtttggaacaatcaattaactctttcttaaatattttttggagtgagtatgattgtatattaaggatagatctttatcgttgtttagagtttgtggaaaggataggctttttgtaggacacgactattggtttttgtgttaccatgcttctttttggttttttgattgttttgtatacatcgtgtatacttcttttttaatctaatacacttacacttataaaaaaaataaaaaaaggaaacttttcttactctataaggaaatctaatattacaatgacatatcaatataagaaatattctttacaaaaaggaatatataccaattaagaatttgagatatttttcaacaattaatcctctttcacttatatgtcctaattgcataagccacaatctggtagtctctaagattgattcttaggttgaaacaacaattttacctataaatatgttatcctgcgatgtgtatagcccattaattttttattctttcatcacaacaagagcactctttgagattctcgtaactccatctctaactttataagtgcatccatggaagtcaagggtacctagagaaatcaaattttcttcaactttggaacatattttacattagttaatgtccttacaatatcattatgcatcttaatctgaattgtgtttattctaacaaccttacaagccacattgtttcctataaaaactttctcacaatctataagttggtaggtactaaaccaattcctattgggagatatatgatacgaacaccctgaatcaaggatcactcattacctgaattcctaatagtatcagaattttcttctataattgttgcatcaccaaaattagaaaatttctctttttcacattctagacaatttctcacatagttccttctttgttgctattgaaacacttgtttcctttacactttgttttaggtcttgatcgacctttattgccattatttttctttcttgctctccttctagccaccaatcttcatttgaattttattttctactctcaaacacccttttctttaactcctttgagttcagggcccctaacatcctttattgagagtgtctctattatatatcttagtatccacaaagtgctcatatgaatttggtaaaaaacaaatcaaaattatttttattctcttttgtttttttatcaaaaaaatatatattgataatagtacggttcaagagaaggatgagaggttcttcccatgcaattcaaaacctaatcaaagtaaaactatacttctccactatacaaggggaactaaagataaaggcatgtacaaaatatctcaaagaccaaaatcaaactctctcaccattcctcaaatttgtaagagttttattaaactcatcaaggtggtctttaatgaatgtctactttcatctggacaatgagcaaccatttctgcaaatacaagcaatttgcaataaatttccatcatatacgaactttccaactttaaccataacttggcagccgaatcctcttgtacgtcacaaagtatctcattagctaagcatagtagactagtattgtgtgccttctctaagttcatcttcctcttcatcaaacatcattgttggaaagtctctctacctctcaatgctttggctaacccctttcaaaccaataaggcatgcattttaatacaaccataaactaaaattgtttcttccatcagacttcccaatcttgtcattccaagtctaacaacctaaactttgatacctatttgttatgtatgctgaagctttaatgctaacatgttagtgtaagaacatgcaaataaaaaccaaccacacacaaaaaagtacataggcttttaacatggttcaaccaaccatgcttacatctatggacgagatattattccactatactatagagaatattaaaaatgatagaagaatagataccactactgagccttgaaacaccccatgtttccttgctccttgtatttataccctgaacctctagtcttcactccactgagtgtctctcattcttccttacatctctatctaccacatattgtcttcataagtttatctctatctcataaccttttctttcatgacctaaaatatttatagagatttttttaataatttttcttattctataagaaaatctaatattacaatgatataacaatataagaaatgttttttacaaaaagaaacatatatcaattaggaatttgagatattttctaacggtaccaataagattatatcattatggtgcaaattagaggcataggacatgagaaaggccctcttttgttaggtgatgccatctataatattcttttttcttttatctatttatagagagggattggacttaattgcttccttgatcagtcatgaagtttgtggggaggagtggaaggaggttttggaggatggatcctcatcctttgaatgggtgaagagttcacaattgatgtgggaaaatttgttcattaactctttgtactgttggtctaatgttgttttggattgttactttcagctcctttcttaagttatattgtataggaagaggatgaggtgttgttttatccttgcttgccttcagcgctctttttatgcattctgtgtacttaggctgtgcctctttttgttagggacctgccaataaaattttcctttgcatatcagaaaggattccaacccaaacagttgggattgagagtttgttgagcttgtttcgatttcattgatacatccagattctaatctagattattgtttatcatgaacttcaacaagtattatatccaattgcttggaggttcaccttaatttcatttatgtatttattattattatttttttataataatgaaaatgtttgatttcaggttcatcctagagag

SEQ ID NO: 12315 - DNA, 6889 bp, Vitis vinifera
  Intron number 1 from transcript GSVIVT01021298001 (locus G SVIVG01021298001) derived from phytozome v7.0 (chr-ID chr1 0; pos 3662479 to 3669367)
aggtgatttttgtttttttgcttgcggtttattgcttaaaaatcattgtttgggtgtgtcttaattctttaattctgattctgtattgtggtttggtactcaaatcattacctggttgtgatttctttttccatttttaatgttctattggccttgatgggactctattttacttttttggttgatttggatatgtttggacactcaaaccattaattggatgtgtctattgcggtgctctattcgtcctctggccgtattgggaataatccaatctgatgctctatagggcttgttgaaattttcatttcccttttgttagttcatgatctgggtttctttggcacccaaacgttaaagttatgttattggcatgttctagtagcttgttcctctctcttccatacacaagaaaattatggttaaattgaattattttcaaacccaagtattttgcatgtgaatctgatacagaatgggtaactgaaacatttcttcccaatgataccaagtttgggaaaagtttgattgtactttctattgttagatcagttaaagtatggagattgtgttgaactttgatcaacttacctagaatactgaccataatttggtgtatcatcagaaaacaagtagatgaatattgtgatattttttctagtagaatttagtgtgtggagtagtttttaactgtgtttagtcttatttggaaaatcaaagtaattttttaatttatttattataattagtttcatttactgtgctgaaaatgagtccaaacaacacattctttatataactgaatggaagattatttggaacactagcaggttgtcacatgaaattcgtatcctattctttgtttctcaaattttaataggggcattttctttttgttgtggaatattagctttgacaaagttaatattggaaaccttctgatgttttctggatttgaagccccaacttatgtttttaatctacttattgaggtttatgatgaggaggttcttaaaggaattaagcacaacaatatttctatttttttttcccaaatcaatctgtaggatttagttaagctaggatggtgtccttgtataaggtgaggatttttagcagagattaaataattactgccagtcatgttttccaaagtttaggttttaagtagggggagcagttttaagtcaatgactatattaaaaaaccaaagaaatgctagatctagattgagaaagttttccttttaatatttaattcttaaattttagaaagtcttccttttaatgtccaattattacctttttagttttagtgattttgaatcctaaacagaaaatagaagacttagatgttgacattgcacttgatctaatagttcaaagcgtgacattaaaatcatgggttcttattattaatccaagtttttattttaaacaacagagcttgatatacgcttctagcttcaggaagagaaggccaaaaattaaactagtacaaggaattttgaaggggtaagatttctttcttctaggcttaataagccctctttaagtttgtaattccctcctgtagagctgctgatagattggtcctgaatcaaggagaggttatcacaaagaggtgttcaatttttccaaaagaatttattaagtgcttttcaagaggctactgaatttctgataggttcttttaatattttctttttttcctataataaactgctgaaggtgctccaataaattatatatgaactcctgtgtgcttgaatgatagacagattttggatccaattttgacaaccaataaaattatggaggattatagaaatctatcaggaaatagtggctcccaaagttggtttttaataggtttatgagcatgtgtgttagggtaatgtcaattatgtcttgcataggaagaatattgaccctgggaccagctgaaaaggagaggaacatctgtagggaacagatattatatgtataaaagggaggaagaatccattgatcacttacttttacattatgcatcggcaggagtcttctggcagctagtttttgctatgtttgtgatagattgggtgatactcttcaataagactgatgttgttaagttggaatggactctacatcgggaagagatggaagaggacgtggctggctgcttccttgtgtccttttttgggcaatttggcaggagagaaatgggagggaatttgaaaatgtggaaaatttggaacaatcactcaaatccttttttacgtgcagttttttttaatgtgtagggctttgtataaaagaggcatctaggtctataatggattttgttgactgtttaggtttgaagtaggtatgggaggttttgccccttttttttctgatctttttgcttggctccctttgcatacttcatgtgtactctcacgtgccctcattgtagctctttttgaacttctctctctctctctctctctctctctctctctctctctatatatatatatatatatatatatatatatatatatatatatatatatgtatgtatgtatgtatgtttatattatgtacttttttttttttttgataagtaaaacataattatattaaaacaaaggcgaaaagccacaaagcatacagggggtatacaaagcaactaacacatgtttatattatgtacttataaaaaatatcccgacttttgatggaaaatggttttggtgcatgaaggaagtgcattataggatgtctgatgaactctatttagcttctgttaatggtgaaacaaaaaagtgtttcaaggatttgagtagatttcaacaaggagatcccccttcttcccttgaggcatagctcaagtggcaaggggttgggacgggaaagtgggcatttccaaggggttaaagagaaaaaaatctgttagaaaaaggaaaacaagtaaaaggaaaaagagccaaaaggggtgcaccaaagtacacacggtatatacaatgactgccaaagagttccaaaaaggataaggaaaacaaaaaatctcattccctcaatctgaccccaaccaatcaataaaatcgactaaagatatagttttattttctataaacaatttagatcatgatgataagctgcattaaaacaagaatttcagcttttgaacagagagcttcattttctcgaaatatcttctatttctctctttccatattgtccagaaaagacataaaaacactgctttctaaacatttttccgctttcttccaacaaaagagatatgtcaccctaaaagggtctctctaattgtagcacgggtcccccaatacaccccgaaaacagagaacaagaactcccacaacacccttgtcttcccacaatgcaaaagaatatgatcaattaactcctcatgagcataacaaagggagcatcgattggctaaagaccaacccctcctttgtagttagtctaaagtcaaaactttaccccatgaagcctctcaagcaaaaaagttaacctttggaggaacccacacattccacactgcacttcccacctaaaggatagaacagggggacttaacaaagaaggaaccactctttgctgcaaccaaaacatcttgctctccctcccctttcacatccaccaccttatcttaaagctttgacaaaaagcactccaaattctcaatctccccttcattgagaggtctagagaaattagtaatccaaacactcctctcattagagtgcctccacaagcccaccacccaacctctttagagctagctagggcaaataaagaggggaacgagacacacaaaggctcctcaccacaccatttgtctttctaaaacttaatcctactcccatcatccaccgtgaaagaaatctgacaagaaactaactcccataagtccttatagagttccaaaacccaacaccatagctacccctctcttcatttgagcaccaacccccttccatttccccatatttaccacaaataagttctttctagaagacaaccctttcagtaacaaagcgccaattccacttgcaaaggagggccttatttagagagtgaaggcatctaactccaaggctcccctttctcttgtttgaacacacaatagcttacttcactaaataaggtttactctctaaagacccacaagattttctccaatcttaaacaaacactctttagcatctggagcaaagacataaagtagattggcagctagctaacgtactcttgatcaacattaatctcctccctttggaaatatattgtattttccacaatgccaatctcttttggaacctttcttcaatctcatcccaagccactgcaacattatgagtggctcctagcagagccccaaataagaggttgggagaacacccactttgcaaccaacttcggaagccaactccttcgcattcaacacttatctaattgaaatgagctcactttttggtaagtttaatttcaaactcgaaattgcctcaaactacataagcaactaactcaagtaagtcatctggttagaaatggcctcacaaaacaccaaagtatcgtaggcaaacaaaagatgggaaacctctaacccctctccatttctaccacacactttgaaacctgtcaaataaccatcctcccttgtctttctcaaaagaccactgagcgcctccatggctagtacaaacaaatatggtgagagcggaaccctctgccttaatcccctagagctctggaaaaacccctccagagtaccattcacttacaccgagaactttggtgttgagatacaccaactgatccaattgattcaccttttcccaaagcccatttttcctatcacctcaagttaaaaattccaactaacatggtcatatgccttctcgatatcaagcttgcacaacacccccgatctattacttctcaacatcgagtcaattggaaagatagagaattatgagcccatgtcttcttctaaaatatttatataggatctctagtcttcatgtaaagctagccgaaacttctattggcaattgatattgagggagagtatggctctccatagagctgaatgagaaaggacttatgtcgtctgccctaagtagcttgaatcaagactgttattgtatttgtgtttaatattgaggagccggaacccttaagttgttgagttatgggatcctatgatggaacaaggaagtgaaactgtaagtactggaagaaggttcacattttctgtagaaatccccttattgaattagcctcagcctacagcttagcccaaatcctttgatataattctgggaagttaagggaaatgaggactcttgagaaatttttttggatttttctttttatttttcatatttgcattttagtttcagtgcagagtgggttgatgatgggtgcggagaagaaagatttggtttactggtatacaatatcttttcctagtagagaggtggattataatttttcccccttttgccctaaacgaatccctagtggagaaatggtagtggatattttcacaggcaacacttattatagttttgtggttgaaatatggcctctataataatagatgggattgtcataaaaaaaatagtgatagatgggatgcaaaattaaaggataggagaatcattgatttacttgaagactcatattgtgagggtatctacatgtttccttgtttgttggatacattgtaaaaacagatccatggatttgcatttccatagatcctctaatggtgaagcagatttatcaggtagaaggattgtgtttacttgggaagaatgtaaggctcatttttatattcattagctaattggttgactaatttttgaactttatcttgttcctgaatcttgggtcactgaaggatattatgaaggtgacaaaaagttacatgctaggaaccatgctatcacctatgcaccatgtcttgcttctcttcggaggccacagtgacaggtgccttgactatcacattgccttcaaaactttggttttgaatcttttgatagcctccaacttggtcttagtgatgtcttgagactggaactaatgggtgctctttggttgaaagtttgagaaacaactactctctgtttaagcaatattaaagtttttacattttttttaaaattttatttatttatttattttattaggcatttggtttgggagtatggaggtgaaagaaagttggtttagaatctcatgacaatttagggtagaaagttgtatgattgcaagttttctttcagcttttcctcgtttcattttttatccaatcaaatggagaattgaagatccttgatcatatattgaattttctagtatataatatttagttccccccccctttgggccaactcaagtggatgaactcagatccatgagcagggggtgagaaattaagatcctgtttactttgtaaaagttgaagttcaggcatcatatttttgcaggcacagacaagaaacctctttcctgttttatgattgaaataatatgttcatattctgtactttagcatattatctttgggacaaggttctggcttatttctactcattacagcaaaggattctcctcttaattggaaaattaagatcctgtttacttcgtgaattttgaagttcaggcatcatatttcttcaggcacagaaaagaaacctctttcctgttttatgactgaaataatatgttcatattctgtactttagcatattatctttgtgacaaggttctggcttatttctactcatgctagctaaggattctcctcttaattgaaattataatctcagtaactagttaagtgtttaatataacacctttgatgcatggaaatccag

SEQ ID NO: 12316 - DNA, 4437 bp, Vitis vinifera
  Intron number 3 from transcript GSVIVT01027045001 (locus G SVIVG01027045001) derived from phytozome v7.0 (chr-ID chr1 5; pos 18386296 to 18390732 reverse strand)
atttccctccagattatccattcaaaccacctaaggtatggcttcggttctaattgttctctataaaagttgacatttcttttcaattctgttctttgttattctcttgaaattttcttggatttttttcgtaactgtggatttttttgttatccctagattccctacccttatccattagtgatagaaaaacatcccacaccaaagatggtgtgtcaaatccttagttccaactgaagaaacttgggtgggtcaactactacaaaattgagaggtagaagaaatatttttaaagaataaataggaaaacaggataaattgttagtgtttttgatccataaaagggttgtaattatctcttttgagggagcgtatattcaattggagactgcagcatgaatctttggtttgacaatttatattctactttcttcttgttcttcttcttttgtgttaagtttctgtaacaaatactgatttactgtctgaaccttatctacatgttataccttattaaatagaatgggtctgtgcatcctaccattcagatcagcttgagttacacagctcttaataggctggaatcaaatagcaggatttgtgctatgggaggcctgttataattgtacaattttctatagaaagaaatgaatcttcttgaaatgttgtttgtggagattcaacattttaaaaatgatggttttgatggacctatgttttccttatttggcattcgtgggttcacctatattcagtgatggaattattaacgggttggaatggaagcttcgtgggcaagaagagaagtaaattggatgataactcatctttagcttttttggacaatatgaaaggaaggcaaccaaagaacctttaaaggggtgcaaagcactaaccatgctcttaaggactctatcatttctaatttgtacatctagggcatttcctagttgatggtcaaattggtttgctatccttgatagatttttttagtggttgcatacttagttctggttgagctgtggttgtatgttgcttctcattgcttttgcacaactatacctctagtgtgttgtattcgccgctttttgattgacacctttatccttatatatatatacctatcaggaaaaaaaaaaatcaaggatttaatgaaacatgtagtttttctcattcattcatttggttttggataatcccgatgacttggttcatgtttgcctatctctagcattgtgaactttacttttatggcgtcacattttttattttctaataggcaaatgataaaattttataaatatgcgcaaaaaaaatcaccctaaggtacacatgatgtatacaatgggcactaaaagacatgttctaaaatggaggatacaaaaaacaacttccctcccttgttgagagcctaaccaatcaacaaaatctacgaacaacttcacccacaagaaaagattactaggaaaagaaatttttagaggatgatccaattgctcctcattatcaaaagaatttcggtttctttctttccatattgtccaaaaaaatgcacaaggaagttgcttttcattccttcttacatccttttccaacaaaggatccatgacaccctaaaagagtcccttgggccgatggggattgcacctaataaacatcatacaaagcggaaagcaattgcttcacaactcttgtcttggtgcaatgactgaggacatgatcaatagattcgcctttggctttttaaagataatgtctatcaaccaatgactaccctcttttttaaagttggtctagggtcaacacctttccccaattagcttcccacgtgaagaaattggttttagaagttgctttagaattccaaattacactcatcagaaaaggaattgaaacccttggttccaaagtagcatataaagacttacaaaaaacaaatcttttattgaatccatccacaccaccctgttccccctctcaccattcagcaacattccttgcaacctagatacgaaaacctcttacattgtccaactcccaatcattcaaaggtttagaaaaacaagggttccaatgacccctctcccctggttggtcccatagaccattgaagcatcttttgatacgactaagacatagagagaagggaaagatacatataaaggctcaccccaccaccatttattcttcccaaacttcactctcttactctaattttttatttttctttttttgaagtaaccctcttattgtgattcttttcaatctacccctctaactttaagaaatagtaaatatcctgcctaggaagctaatggatatttaagtacaaagaggttcacgaattaggaagctagaaaatccctaaatatcctgcctaggattcgcaaatatagctagaaaagggaaactaaaatatcttaagttgaattctgaaaattgaatccaatatttcctaaaattatgcctacgccaaaataaaaggaaataagggaatttcaaattccttccttccccatacatttcgaaaattaaaaggccattatggaaagtatctaaattggcatgcaagccatacaactcaacaataaaatataataataaataaaaaaggtaatttagctatcttaaaatgattgctttaaaattgagccaaccattctccttgatgaatcaaaattgggtaatcaccaatttagaaaactcaactcaatccacacaatttgtgagctattctctttgagggattcttctagattattcaaaagcttgaatcatggaaatccaactttgtggaacacgtggagcatcttccttaggcctccactaattcacctcagctcaaatgttttgaatcagttcattgagagtttccttgaacattttagcttgagcccttgtaaccagaccaactagaacttgaataggatttgcattccatttgttagccgtgccctcatcagctggtgtgctaggggtgcttatgactgaagccttggaaagccacaagaaaaggctaggctggttttttccatagagcaagatttgccatggggaatggcttgagggggtcaagttttggcatggtgcttggtacagcaatgatcccttaaagcaccattttttggagtttttcaatatgcagtctagaaggatgattgggtgactggtttttggcatgggaatttttggcattatagattcagaagaaacttttcagatagggagatgctagtcgtggaatcattgttgcaacttttacatcctttatcgatgttaagtgatgtgattgagggggagaatgaaaagtcacaagttaactatcaaatcctatgacacttccttagtatggggaagaagttagtcttttctttcaagcatggtttggacccatgagtgctgaagaaggttggtttctttgcttggaaagctgtctaggggagggggatggattttaacgatagatcagctcaggaaagaggggatgaagtatatggaatagatgttacatgtgttaagaggggaacacaagtctgctgatcatatgctttctcaccattccaaagcaagaatcctgtagtaggtttttttttctctgtttgaagtggcctgagtgatgtacttatttgtaagaggaactctctaaagttggcatgattttttgtgggctagaagcaaaagaaaacttgagggttgctccttagtttctgttttgggctttatggaaggaaaaaaatagaagtgtttttgaagatgcagaatggttggatcaagcaatcaaatccctttgtttctgttttatgaccatgatagagtttgtagattggttgagttccaagtaaggagagggtgttgttttttgttttccttttttttcaccttatcacgtgtactttggtgcaccctttttcaagttcttttaatacattatcttatcttatctatcaaaaaagtgatgtgggggacaagttgatggaattggtttacttttctatacatactgtgtgtacctgggttggtgcttcctcttttgtttggtgctttttacgtatttatttcaatttgcctaaaaaaatattttggttttattgtcttaaaaattgggcaaaaaggcattgatgtggccagttctatagttctacttctgaaaacaaggtagatcaatatttccagaggtggatgcaggtgaagacgatttttagagaaggataaaatttacaagtgaataaaaggaaatattaggtcattgattatagtgctccaaccacctatttataggttgtaactttgcttgttgaaaggagtgcatcaagtttaaacttccattgagaacttgttatgtcctttcaatcaagaaatgaacttctaatgctctgtatgcatttgaatgttgtttttgcaggttgcattcagaacaaaggttttccacccaaatat

SEQ ID NO: 12317 - DNA, 3296 bp, Vitis vinifera
  Intron number 2 from transcript GSVIVT01030240001 (locus G SVIVG01030240001) derived from phytozome v7.0 (chr-ID chr8 ; pos 10008175 to 10011470 reverse strand)
cgatatcccctgctcaggtttgtaaattgtgtaatgtttttttaattagctcacatgctttattgctaaggaagaaaaagttttaattgggcattgagatgatatacaatatacaattgaaatagctgatttttgcaagagtatggtatttctatactataattataatttgttttttctctccatacacatactaggttaggcttattgatgttttagtgtgtgctgcacaaagtcttggggcaatttaggggatgaattattagagcttggagaagtagagtgtaagcttaggggattatcatggaagaacaagaccaagcaaactctaggggggcagaaaattccatatttgagacagcttctgggtcttagtttcaaacgatcttctggtcattggtgtatttatttttattatttttaattttttgaatcttttcttagcaaatattttgattaccttgtcatatctccataagtagcaccagctaatgaggtgtcatgccccaagacccatcctaagggcgtgacgattatttcacatctcaaacctgaaaactcaaagtggaaacgatacaaatattcatcttgtaagttgtaactagaagttatcaattgccaaattcttgtttagagtaataaaataaaattttataattcttaaatctcaacttaatactaacacattaaccaaagtgttattgtccaaacaaatttaaatttaacaattcaaacaatcattaaattctagcttttaaacaatgtccaaaaataaagtttaaacaaaaatcctaacgacaacaaaatcccatcctaaccatcactcattgcttgaactaagaatactttgaaacattgttaacgaaggggaatgaacttaaagcctaataagaaatattaatatggtttcacaaataaaatattttcaattatgattggaaataggagatataatgtataatccttttcataaaaacttgagttcaaacatgttaaaacatctaaaacttttcaacaaacattttcatatttatgtcaaaacaatttcatattaaattcagatcaaatgcgttcaaaatatttttactctaattatcgaataacaaatggtgtccacttatgtgagactctacaaatgagtgactagctttaaatttgttccttttaaggtgggcgaaactaaacattactagtactaataacccttaaccaaacccctagaagttgaggtttaaatcaattacatttcccaccaagaaatgtaaaggttaattattatatttcattgacaagggcagaaaaatcaactattatatcctgttgactaaggccgaaaggtcaactattatatctcattgattaggaccaagcaaattagagtttcatttattcaaatttacaaaaatacaacatctccatatttttctgttaaaaacaaaagaaaaatgttctaacatatttttcatgtaaaatatatttgatccatgcatagacacaaaaatagcattttatatatttcaaaataacatataaaaagaaaattattttattttacaaaatttgcattaatttcctttacctcaaagaaacactaaaaaatcattggagaaattaatcctaaagaatctattcctcaactaacataacatgagaaaaacaactattactattgaccatttatctaaaattataagtttaagagtcttaataattttctatgttaatatttttatcacgtatattatttttaatttcctaatcaataacaattaataagttagtttccaaatttttataaaagtagtgtcttttccaaaaaatctattactaagaatctatttctaatctattttatcattttaatcatgaatcgtttttctttttggttcattatctcctttcaacattctattgccttctatatattattagtattatatcattacatatatatatatatttccccctctctacaaacaatatacaaacatgcaatcaacctccatttttttttttcatgttcaagatttatgatttcttttcttttagttatttttattttattttattgtctagatctatttatttgaatattcaggattttctaatttccatcaataaatcaacctatactcataaattttcaatcttttttatctaaaaaattaaataaacaaaccctaatctagattaaggtcttcgaaaaattttttaaagtacttcaaactatttaacaaatctaaaatactaatctaagggttaaaatcttatctggaaaaactgattttcaaacccctaagctcccaaatctttagctccatgttaccctacattctttggtctctctaatctctgtgcaaaaagggtttatgtgtagagaagtcagaaaaaatctaatttatgcttagggttttcaatatgaaaagacctttttaccatttttaaatttattttacttattttgtatttctaaattacagttttacccctaaattgggtttggggcgtcacatagggcctccattcctttttttttgttggtaacaaggttatagcttatttattaacaaggaagaagaaggtttatgcattgtctactgcaattactgtaattttttcatacatctagctgcaacaagtgaacatttgttattatattttgtttttagctatagctttgattagttagtttgttggttattttgcttatgttctacttttgataacatcgggtagttgaagttcatagttaagatatgggctttctctgctatttcttagctttcatggtggtcccttatgttgggacaggttcagtatctcctgagacttggaaacttcattaaccttttcttgatttgatatattacaaagattgccattatacacttgggaccattcaagaaacctacctgaaggagaacttaaataaacctagatataggaactgataatgagtatgaaattatatatgcttggatcatttacaacaagtaacctttttattgcatgattttccacattgtattcttgttaagtgtccaaaatttggtgcaagaggatgctccaagagattagtttcattttgatttggttctgtcatacactcattcacgggttttgctcttcagtctttgaactttttcactggtccagccacatattatattctttgcgaatgaaaacattttattttattatgctacaatgaaaacattttattatgttgcttgtgaatttttgagtttttgttctctacaggtatattcaaacactccgacagactttgatttcaa

SEQ ID NO: 12318 - DNA, 8626 bp, Vitis vinifera
  Intron number 1 from transcript GSVIVT01025811001 (locus G SVIVG01025811001) derived from phytozome v7.0 (chr-ID chr8 ; pos 11599796 to 11608421 reverse strand)
cacttcactaccagttcacacggttgagcaaaaaaatttcatgccaacccaaaaatctcacttgttaaaaccaccagcatcaacaaagcctattactttccactcggacccacactttgcatggccacattggcatgcaattccactaccacatatcatcatttttaattcttcagattttgatatcaaaatttaattttccaaattttcaatcctcaaatttaattttcaaataatttttcaaattttcaattttcaaatttaatttttaaaaatttcattctcaaataattttccaaaattccaacttccaaatttaatttttaaaacttccattttcaaataattcttcagaatttcgattttttaaatttaattttccaaacttctattttcaaataaatttccaaaactccaatttttaagtttaattttcaaaactttaactttccaaactttaattattttttaaatttaattttccaaacttccattttcaaataaatttccaaaactcttatttttaatttaatttttaaaactccaattttcaattaattttcaaaactccaatttctttcaaatttaatatccaaaactctaattcttaaatttaattttcaaaactctaattctcaaataattttcaaaactccaatttctttcaaatttaattccaattttcaaaactccgatttctttaaattttaattttcaaaacttcaatttctttcaaaattaatttccaaaattccaattcttaaatttaatttccaaaactccaattctcaattaattttcaaaactccaattcttaaatctaatttccaaaatcctaattctcaaataattttcaaaattccaattttttttaaataattttcaaaaactccaattttcaaataattttcgaaactccaattctcaaataattttcaaaagttcaattttcaaatgatttttaaaactttaattttcaaaactccagtttatcaaataattttaattctactccaattttcaaatatttttttaattttacaacttttcatcctttattaggattttaggtcaaaaaaatctcgtttttaataaacttgctacattttccttctggtaagcactttcacaaattttctttgattttcaaataatcttttgtttcttttgattttaaataagtatgaatatgattttcataattccaaaacaatggaatttgtgggattaattcatacaaaatcaattgagttttggtggaagccctacatatgagctttctcttttgattgtcaactgttatgcttaataaatattgtttgatctttatcctactctttgatatgcatgtgacaattttatacttgatctaatcttgtttccatgatagagcactattacttgttgtcaaggtacgctctcactctcactttgtttatttattcgttatcatgatttgcttttgatctatgataattttggtattcatcgatctcctagttaattattatgtttgcttcaccttatttagtatagacctatttttaggggcttagaggggtgttacgatctttaccgtacctttccaataagtaaccagaccctcgaacctaggtttggtttttcacaaactgtcttttccaaataaggagtcacacttagggttttctttcttattttgtccttaaaaaaaataaaacaaaaataagtggtgacttcaagtcttttctaaaagaaatcaaaatttcaccaaataaatgaaaaagcgagttgcgccattgagtgggaacgcatcatgctaaaatacgaggtccacagaagtatttggatctgtagtccaaatgcttgaagttgtcaagcctattggatattaatgagtatttataagaaaatgcaatgagaaaaatgaaatcataatacataaagcgtatatgactcataactcaaggtttcctacagagacctaatattgattatgaggaaacatattctcctatgatggacgcaaccatatttaaatgtcaaatttgtatagcagtcttagaaggactagatatgcatatcatggatgttattattgcatatttatatagatctttagataataacatatatatgaaaatccctgaaggatttcaaatgcttgaagcaactaattcaaaacaaaatagatatactcaattaagttataaagatccttgtatcgattaagcaatccaaaaggcatgtggtacaattatttcaatgaatatttgaaacgaaaagtatatgtgtatttccttatgcatattcattatgttgaatatttgcaattgttaaagcatatgtggaacatttgaattttgttagaactcctaaaaagcttacaaaaatagttgactatttgaaaagtaaatttgaaataaaagatctaggaaaacaaattttttacctcagcttacaaatcgagtacttttcaagtgaaatcttagtttatgagttaacatatacaaagaaaatcttgaagcactttcatataggtaaattacatccattaagctctttgacgatagtttgttcacttgaagtgaaacatgattcattccatcttaaaaaagataatgaagaattacttggtccagaagtaccatattatagtgttattttgatacattgatgtatcttgtaaattatatatgattggatattgtggtccttgttaacttgcttgcaagatatagccaagcaccaacttagagacattggaatagggttaaatatataccacgatgatatgggtctattttatttgaaattatcaaaatctcaattgtttggatatgtagatgctagttatctttcataccaccacaaagcttatcttaaatgaggtatgtattttcttatggtaatacgacaatatcatggagatcaatcaagcaaataatggaaacatgttgattgtcttccatcaaagataatgctaccaagttatatgaagataatattgcatgcattgcacaaattaaataaggatgcgttaaaggtgacaaaattaagcatatatcgctcaagttcttttacaatcatcagctccaaaaaagtgatcaaaatgctatttagggagtaagatcaagtgacaatttagcagacaaaggcattgttaactacaatacttaagaagttcattagaatacgttgactcaaagatcttcatgccatgttgtactactagataaaatattattatgtcaacatgaggggggctaattgataagaatatcattacgatatactctttttccttttgtccaacttttgtcttacttggttttattgacaaagtttttaacaaggcaattgtaataattcaaaagaatattgtactatttttccttcactagggtttttcctagtaaggtaacttgtgcatgatcatttatagatatcttttgtaactccttataaaagagtgagcctttaatgaaaatttgctttgttttcttcctacaatattctattatacttttctttgagatttcttttagtcagttttagaaaaaatattttcattaaaaatatttcaaataaaaataataaaatattttcaaacacattcttattcatagaaaatttcacgaaaacaacaagtccttgattcatgaaggtttgattctctttcctcccatgactatatctgatctccattttagaaaacctcattttaaattggtatgatatatgaaaagagaatagaatatcaaacacctcacctattctaaccattcacattatgttcttaaacttgccaaatattggatatcaggttagttttcaaatcatgattctatcctcatttccaatgacaaattaatattataataaatgttaataaattttattaccttattttgaaaaaagatatgacatttttatttgaaattcactaaaacaagaatatttattagaaatttaagaacacttaccatcttcttgaacaatcttccaaggatttgtaaaaggcaagatcggtctatggaggatttgaagtgattgagataagagaaacacaaggagaattttgacccggaattgccagcacacaaaattccttaataaattcagtacaaaatggggttgggtgtctgtacgtagtgtaagagcttcttgttttgtccatgtcttctgttaacaatctgctgttgatcatttgcctcacattcatattctcgccatgcatctctgctgcgagtgattccaagggtttttctacaaatcttattcatattcattcgccatcctccccatacaagaatgtcaaagcagagagcctggccgaggacactgctctcaagagcacgctctcgcggcacgcttatatgagggccaggcaacaaaaagccctgcagccggcggactttgtgccccctcctcttattcctcaggagatcatgttcctagcaaatttatccattggtaatccacctacgaatgtgtatgtcatccttgacaccggcagtgacttgttctggattcaatgtgagccttgcgatgtttgttataagcaaaaggatcccatctatgatcggaccaaatccgattcttacactgaaatggcatgcgatgcttctctttgcttaagtctcggaagtgacgcccaatgcagtgatccagctcaaaggttttgtgtgtacaaatattcttatgaagatggcaccaggacgtcgggtctcctctcctacgatgacgtcgccttcacttcacattattcaaatgaagataaaacagcccaagtaggctttggatgcggattacaaaatttgaataccctgacaggattccgtgacggcggggtactaggccttggtcctggacaggtatctttggtttcccagctcccggcaattggtaaagtttcaaaatcattcgcctactgttttggcaactttagtaatccaaatgcggggggctttctcgtatttggggatgatacgtatttgaaaggtgacataacgcccatggtgatagatgagttttactacatcaatctcctcggcattggccttggcatcggagagccgaggcttgacataaattcttcttcgtttgaaagaaaacccgacggaagcggaggcgttgtcatcgactccggcaccacgctgagtgcttttgtgccagaggtgtacgaagtggttagaaatgcagtggtagacaagctacaaaagggatacaacattaggccactgaggagctatcccgactgttttagaggaaaaataggaagagacctgaagttcttcccaatcatggagctttaccttgagagcacgggcattctgaatgataaatggtccatatttcggcaacgctaccgtaacgcattctgcttaggattcaccagtggagatgggttaaacattattggcaatctcgctcaacagtcctataaatttgggtttaaccttgagcagagcacacttagcattgagtccatgcccaactgtaggcctagttcggcattttccaattagagaaggtctataagcagctccgtcaaaaaaagttatatcccagagagaggtttcagaagtcagtttatttgcatttagttttattccagttaaagacacaattcttcaacatgacacaaatctgaataaggagagaataagtctaatggaagtgatgcctgttcatttaatttctcttatttattcattagtgcatttttatttataaagcaaattaaaattgtaaaagttatacttagtacatatgatctattattgaaatattattactttttgaattaattagttaaaaagattaaataatctcttgtatttcttatttatcccctctcttgtttttatttgaaaaataaccctttttttttttacataaatgtcattcactatttcaaatatttataacatgttttaaaagtttatttttacaagaaaacaatgaatatttttttttatcaaaatgaggtaaaaaaaaaaatgaaagattagatttccaaaattaggtttacaatgaaccttttaatcaaataatgtttactttatcccctataaattttcaagtaaatttaaactttacccatatattaatgttaagatatatacggttttcaaacatgattctgtcttatctccaatttgaaattaatatgatacaagaaattattttattggaataaattctcctattatattttgaaaaataaaacaattttatttgaaatttgggaaataccaaaataagaatatttattgcacgtttctaatttttctaatatttgaaatttttttatcattcatatgttaaaaaatattagaaacattttttaaaatcaatatcaaacacatttttagtagttagaaatgtacattaacggtttggtttggtaataaaaatcatattttcattccctaaatataatggacttattaatctttttttttataattattattacaatctttggttatattgaaaattataagccaattaatatagatttatacaataaatcctccagcattatcaaagacattgaatttatttataattaaaggaaaacaaagataagttgttcacttctttctatatttactactaagaaataaaaataaaataatatcaagtcttgcctgatcaatcttttcaaatatatatacatatttggtttaatctattaatggtataaattagaagatgaaaatatgtatattagtacaaggtaggaaacaagatagggattggaatatctacttctaaaaaataaaaatataaatgggaaaaaaaaaataggaaaggaaaaataaaagtgatgaaaaatataatttaaaatggtttattatactttacccccaacttatattgtgttttgcatattgtctcacccctcaacttatactgtgttttgcatattatcctatataattaaatgtaatgtatattttttttacttacgttactttatgtatatatatatacatgaaatacacatgtgctttttgcatgaccgagggaaaagtgtcatttttttaaatgagggcaaaatggttattattatattaaaaccacaaattccaacattcttctcccttgttgaccgtactccctattgctggtgttggatcccgaatccaaaagcaaagaatccaaaggaaactaatgcaagcctaacattgatgagaaaatatggaattcaatagtatttttttcctcttgcaatttttttaatgggtagaaacatgttgggaaaaagggttaggtttcgttttgatattttagaaaatttgggaaattttgaggaatataaaacttggccaaatagagagttaggatttttatgttacgctttcattttagggttagggttgtgatttgatgtttttagggaaattttgggggaaatttaggaaaactctcggtaaaaaggaacaactgagaatgagaaattatatggggtttcaacagtaactttgtagaattaggattctagggtttcgaaagggaagaaagaactgggatgaggcagactacgattacggcattcgtgtggattaatttattaatggtataaattagaagatgaaaatatcatattagtacaaggtaggaaacaagataggaattagaatacctacttcaaaaaaaatttaaaatgtgagaaagaaaataggaaaggaaaaacaaaactgatgaaaaatattgatttaaaattaataaattattgttatgtgccattttagactcatcttatttatttcaacttgtatatatataaagatgaaataattttaaattaattttatacatatcgattcaccattctcttcctgcaggattcgcaaaggagaaagctttgctgaggacactgatctcaagagcactctctcacggcacgcttatatatggggcaggcagcaaaaaaagcagccacatgatttcgtggcccctcatatttctgataggaatcataggatcacgtttcttgcaaatttatccattggtgacccagctttgaatgtgcacgtgcacatggacaccgggagtgagttgctgtgggtccaatgtgcccccggctatatttgttatgatcaacctgatcaaaccaaatctggtagttttactgaaacaatcatatgtaatattttttgagaaaacatttagttgcctattctttcaaaagcatttttagaaaaaatattttcctccttagtttgattctctttctgatctccattttagaaaacctcattttaaatgggtatgatatttgatagaatatcaaacacctcaccattcacattatgttctcattgttgattatattttcctcatttgcaatgacaaattaatattataataaatgttaataaattttattaccttattttggcaaaagatatgacatttttatttaaaattcactaaatcaagaatatttattagaaatttaagaacacttaccatcttcttgaacgatttccaaggatttgaagtgattgagataagagaaacacaaggagaattttgacccggaattgccagcacacaaaattccttgatgaattcaatacaaaatggggttgggtgtccgtacgtagtgtaagagcttcttgttttgtcc

SEQ ID NO: 12319 - DNA, 2411 bp, Vitis vinifera
  Intron number 1 from transcript GSVIVT01020157001 (locus G SVIVG01020157001) derived from phytozome v7.0 (chr-ID chr1 ; pos 9708838 to 9711248 reverse strand)
gctctcaagtatgcgaattttttttaaccctctctcccttacattttaattaatttttattcttaacgtgtaatggctttgctttgtttttcaagtgtcgatttgatttagctttcatgttcttcaatatatcattgatgaaattttgctacttttttgtttggatcttcgcatagtagagatgagagcatttatttgtcggcgctgtaaaagagtatttcattgtgatgttattgatccaatatctgtattataacaaaacctgatttgtcgagattcttttactcaggttcggtttgaattggaagcagttgcttgtaaaattttgatcgtttaactctactaactgattgaattagtagtaatgatcgattttgctaattgtgataggatttaagggtacagggttgagctgtgctgaagttgattagagcttagttgaagtataagctcagcccattgtgcgtaatggcaattgagtggagttaaacctggtctgaaccaaagatggtgctgaaatatttcggtgattatgaatatatgatatagctaatttgaaaattaaatatgcctatcaaatatgtcaatatatttgatttcatgatccaaatatatttgctcctatgtttttactctataagctgggtccttggcagagatatggaacttgttgctgcgcctaaaatctgaaaccagcttaactgatcaatctaggcatggttgatcccacccaatttaggatgaactgtggacaagtttggccgggacaactatggccaattgggaccctgattggtagtaagacaaataagtttcttcaccacattttcattatggttaggttttggtcacttatttttcttgctggtgaagatgtattaattcttaatgttcatagtaggtggattttgacgatttcttgagtcagaccaagaagcttaatcacaaaaggaacaatgtttcataagcaagaaacctatttccttcacatttggctaagcaataagggaacttccatagatgtcaacctctctggtatgttttgccattttaggagttaggcctctacacaatgctgataaaaagaaactaatgttctattgctgcttatttatttattttaattcccttcaggtttcatttggcggatggatcatgttacaatgtttattgcttgttagaagtcagaagatttcattcctcatgcatctatgggatggatgctacctagcttcatgaacctaattcatccctaacaattcctgacatccatttattaagttttactattaaccagggtccagattgtatgggttattatgttgattgttgagggaagtaattcattatgctataatatgtagatccatatcaactgggggctatcttattctttgtagtttaactggtagtctggttaaaaagtcacggtaatgcagccctcttttttcttttgggtggggagagcaggcaatatttgaattacaaaattttaaattaaataaatattaacatactttcatatttaaaaaggcttatatattttattattaaaagggccgtctaaaatcacataatataagtaaatgctatcattttttttaagaaaatctaacttaccaaattaaacacatgattagatcaaaattccaaataaataaaatagctaaaaattttagcaattttttaaatattttataaaattaatttggtaatgaaaaattataaatttaagtttaataattttaataactgaaacaaaatattaagaaaagattttcaaagaaaattcaaatgaaatatattttataataaactttatttaaaatgtaagagaattaaaaagaattaggatatttttaatagaaagttagttaaattgaagtagattaagaagattttgtgtaagttaaattaaaagttatttacttaaaaaaatttgatatgtaatttttttgaactacagagaattggttattattatcttttttcaaacctttaaagattaattattagatcttgtaatagataataatatatagatatacagaaaattgattcttatttacgatttttcttgttttctttaacttacatatctttatggggggcaagtagcttcatctttttatttttttgaaaaatcctacacatagtgttaacttttagattttgtggggggcatttgccccccttggtcctaagctggctctgccagtaattgttcgtgttataggactgcagtttatttaattctcaactaatgattgggttaatgtaattaccttgtatgtttgtaacatcttgtgtcattgatgttttttaacacacttttcacttactctatgttttactggtttaaattattattaatgctaatgcatggaatttcaggtaccatcctgacaaaa

SEQ ID NO: 12320 - DNA, 4888 bp, Vitis vinifera
  Intron number 2 from transcript GSVIVT01037928001 (locus G SVIVG01037928001) derived from phytozome v7.0 (chr-ID chr1 0; pos 11051726 to 11056613)
tgccaggacggtaccatcacttgatttgtcctaaggtacctactctctttattattttctgttactttctatggttattgctcatctttttatcagatgaaaaatcattatttttttcttttatttgttaattggaaattgctttagatagtgttttttttgttggaattgtaaagtgaggaagccaatggtgggcggaagtacttgattatgtggggttagtcatccgcatttggtatattgctaaggttattaaatttggtagaaagcatgttccatttcatgagatgttgatctatgaaatgggttaaccggattagagtgtcagttatcccaatggatagagaaaagggctatctgcaccaagaatgggtgataccattagggaaaaaactaactaggagaagggtacttgaaggaaagcatgagctgtctcaaaagcagtagaagggttatctgctgtgaatgaaagctaccagagggagagccagaattttggctatggaaggatggtgaattattaagatgcaacctcacattagcagtggttatatattttcgtgaagcactaaggatatttgtgattagtaatatatgccaatttctgaatgtcatttagttcttcaaactgaaatttggaattaatgacgttattaggaggatatatccatgataaaataggagttagtgactattacaagttctaaagccaatggtccatgaaatgtaattcaatttcaggatgactcactgatgaaataagagttagtgagcttacaaggtcttgtgttgattgtccatgagatgcaatttagaacgatgcttgatgaggatagattctctaaaatggataatgagtaggatgatatgaagtttaatatcggccatgcacttttccagtgctcactctcacagagaggataattggagataggttattgttgaatcttaatctatgtagaaatagtagcttctcatcttgatgataatggtggtgggatttgttcatcaaggctcaaggagatgagacgtgacaggaatgaagtcacgtgtgagacttttcagaaacatcatcgagagactgctatatctctaaaaataataatatatagggggaggtccactagagagaattctcagtttaatgctcaatatgttgctactacagagaacaatgtctaaactctcttggtgcttcatcctcctttcttgatcagtctagatcctttgaatatgaaaactctttcttaggaatttaagtcatttactaggcttatggcttatgcacgttccactactgctgtttttccttaagaggatcactactttctctgattaaagtgtttcattaccttaccctattgtgtcctagattctagactttggcacttcagatcatatgactaggttgtcatctttctttcttatcaatactgcttattcaggacctacaggtatacataaaagttaggtacagataaggttaggatagctgatagtactttgtctcccatttgtacagatgccatgttagtttctgtcattaccctattaatttgtatgtaatacaaattatccttcactcgcatatatctctcctgcatcaattccatggggtgttttagaggccttgtgtgatctaattggaaggaaccaaaggattccatgcctgaagaaacggaagctctagagaacaaggaaacttgagaatttttaatttacatcctgagggaacgtattggtcatgaatggggttcttcgctttagactatatagaggctaatggagatgtggagaagtacatggccaagttagtagacaacgattttactctcagttgaaaacattgatgatcaagtggagtttgcctattagtgagaattgactccagttgtttttaagctagtttagattggagaggttacttgtgacaatacaaggaaggaggattaattttaatttgtaagatagggtgctgtggaaagagactaaggatgggaatttttctgttaaatctctttatagtgctcttgattctagaagtgcagttcagtttcctaagagcatcatttggagcccttgtgcccttgtgttcgtactaaagtgggattttttgcttgagaagcttcttggggtatggtgttagccttggaaagagggggtggcccttagctaatagatgcttcctttgttgtgtgaaagaggagtctattgatcatattctaattcattgcaccaaggtaagggttttatgggagttattgtttgttcttttggagtgaattgcttttgaaaatgaggagcttttgattcataggatgaaaaattcttttgtatgtaatttttggtcttggactaagtcggttatagatgaaggacctttacatttgatcaacctttttgattggttgggttctagatgagggttggtgagattttgtatacctttttttttttttttttcttgccttttggccctcttgcatcccccttatatgctttgggtcggccttcaagtgcccttttctctctttatatatatatcatttttctgtgcgtttacttataaaaaaaaaaaaaaacaaaagactggtgtctttgtttgattgatgttaataatattacagtatatttttgcatagtgatctagaaaagggagcatatatgactatgtctcttcattttggaacactcatcaaaaggaaaggtatgcaagctaaagaagacattgcgtgaattagaactttccttaagagcatagattgagagtgtttcatatgtggatcggttacgttattcttaggtacttaaagtttgcacctggaaacattgatatttggataacattgtctcttacattattcttaggcaaacagatgctttttctgatacagattggacaggaggaatttcaaacacgtgttctaccttagggtattgtactctcatggaagtaatcttactcagtttactaaataatagtctcttgtagcgagatttgtgtgtagaaggagaatttagagctgatgactcatctggtatgtgaactgcttcggtcaaagatcttattggtgagataggatttgataactaggaaatttatgagattgcataatgattataaagcttctattagtatcatttaaactctagttcagcatgactgggcaaaacataagtttgatagagatttataagaagttcaattttcctggccttatctcctcaccctttataaaagaaaagattagtttgtggatgtatctcctacatgggtatttttagagtgctatttttcagttttttgggcaaactcagtgtaagtgtaaacatatgcccttgcttgagggtgagttggtaaaagtttaatatttgtttaagaaagtagttctttttatttatttgcatattacccattccatataatgcagcctgatagagtatctctaaatttcccatcacattctccctctctccccttctctccccccccccccctctctctctgtcacacacacacacacacacatatagtctatctctgttgtctttttcctcttatggggttggggggttgtcaccagacccagttggcaatcatggtaagaatcacttagttacctaattatcaaatcaaaatctgaaagtgatttttagaaatgaattggttgtttctgataaaaagaacttttttgtagtgcattgatggagaaagtgaggttgcttatggtgattagatgtagtcatgctacacttttcaatatatctcttgactcacattagaaagatgaagatatgtggggcttggctatttgatatcaaattccaatactctaaatagaaatatggctatagggagtattactattttccatatttttcagaatcttctagttgaaaaacattgcgtctcttgagctctctgtcagcattttatatttataatctttcagcatcttatatttataatcttacttttcatttccgtaaatcacatctctagatttttataatcatggaagacaagttatgctgggttacttcttaaaatccgcacataatcatgcaatatgtcacataaattcctacataaaagttcttttacatcggccctgaatctgaagctcttaactttgcacttcttgtttttattatgctgtgaaactttgccttatatttgtaaaagctgtatttgattctttatactttaaaaagcaaaagcataaggcagtgtattgggattttgaaccaatgcatgtggtataaacttttaagatgcctcatgatctgtctctctctctctctatctaactcactcactcactcacacacactcacatgtacagacacacacatacacacacatgtaaattatatttacttaaagtggtaaaattgtaagcatatttagattagtaacaggtatacatagtatacttatttgttaagttgaactgagaaatatttcttttagtaaaaatagaagtcaaaataaagttgctagtattattggacttcacttccaataaatagtggcagggaagtaatgaaaagccaagttgcatggcaccatggactgaaatcccttaatcatctccttagaaattcttcaatgtcaatggtgctttgaagcaaaaggaccttgagacctctaaatatatcaaacataagaattgaaaggttagagaaaaagtgataaagtaatgatataacttatgattttgtttctatgcgctgtttttgtttgatgtatgaagcatatgtcactagacacactccatttatttatacatggttctccatgttccttgtgatatcttagccttttttttttttttaaaatataaaatttgttattaaatctttaacattcatggaacacagtgta

SEQ ID NO: 12321 - DNA, 2768 bp, Vitis vinifera
  Intron number 1 from transcript GSVIVT01033368001 (locus G SVIVG01033368001) derived from phytozome v7.0 (chr-ID chr8 ; pos 21175864 to 21178631 reverse strand)
catattctaacaccatcagctcctctagtggactcagaagaagggcctgaatcctagatgttaggcttagcttaaatctaacacaaattaagaaacaatcaacataaatccaatctaacctgatctttaacccgagctactcaactcaagctcaattcaaattaaactctaattatccagaccttaacctgaacccaacacaaattgaattcgaattgaaaaaacataatttaagtccaactcaactattgaaaataattatccaaacctgtgcaaatgtcaaggtgtatcagaccaacacggccaaattgtactctttatataaactaatgaaaacaattaaaactcatatgcaactctaagatactatgtatgaaatttaactaattggtgttattacattatttgctaaagtagaaaattgatgtctaatgtgatttattttataaatttgtacttaacactctaagatgtataattatttatttgtaatttcctctaaaaatgtcaagaattttaccaattttcttttgaacttgaccactacaatctaaaagatatttaaaaacaattaattaacaaattaatcacaatcaagctacacacataactaatttaaacaaaattaattacaaatgtataaaattaatttaaatacaccacgttcaaaaagatgttcaaatttatatgtaactgtttaagttcaaatgtacatatttaaactatataaagatttgtgtatacaacaaatttttgtccttagaaagagaataattatttggaagaaaattaaatgatctatttaaacaagtaccttatttggctattaaaaatttatttagtaaaaatgaatttggtagaaaaataaatgaaatgaatttgaagaaatatataaaaataatttattaacttcaaatcaattttttattttcttccttttttttttctctattttctttgtcaaaatttgtctcaaattttccgctgattaagagtgctaacattaattattaagatatatgccatggtttcgtgtggttctagaacagtgacatcagataaaagtaaaaaaaattgatgctataaattttattaggatgattaaaacaattaatcatctttaaggaagtatgtggttatcatttctatgtttgattaaaacaatcacaaataataaatactttaattgtctgtttcgaaaacaacacccggtagggtgatatccaaaagccactgaaaatctagaaaggcatcaaattgttttaagcaattagaatcaaggctttgtcgggttcttcatatggaatgctttcttcatatacatgcagggctatgaaatgaaacatttcagtttcaattcggaaaggataaaccatgtaaactatttttttaaaaaaataatatatttataataaaattagtaatattagtcaagaataaaatgttcaataataataaatgtaattttaaaagtgaatatttaatattaataaaaggataaggattgtatttcagtgaattttaatacttaaaaacatatgaaattacatttaataccaaaataataatttttataattcaaagctactctaggacataaaaataatgataatctgtgcccccttttttgtaatagcttttaaatatttatattgcctttcatttttgcaatacatagcttgattgaatttaccaaagcttgaatagagataattaaaatttattttttatttttgttgtataaaaaaattacttctaaaatttgattttctatatatatatatatgaattttggtttttttgtagggccaataaagcttaaaaataatgttggttctaatatacacaatgacaatgatacaggccagggatcaagcgattgcaaaatttctatctacacaatgacaattaacattgctaatatacctttttggtgttcatgtagtaacataggctttaataatttttttaaaatactgaggtacaagcatccactaaacacactcattccaataaaatcttcctacgtaatcctatagacttgaactaattattaataattataatttgttgatcacgaataattaaattattgttgttgtctttatatattccttaagaataattttccatagatatacataagtgaatgatcatttacaataaaaataaacatttttataattcaacaaattaaatccacttaatcagtcataattctaacttaagttaatttttttttaaaaatgaaactttatcataagtccaaatgaaaattctcattaaaaacattaagtgctttataaatgaaacttaaacttaatacaattcaagtgaaaatccaaaactacaacatcatgaaatttaactacaatatagctcaaatgacgataataattaagaacttaatgaatttaatcctagtttattttttataataaaatttaatcacagataaacatctttaatgaaaatttaagcttaattaaaatattctttataaataaaacataatccaatatggtttaattaaacatcttgaatgaaaaatgagatgaagagaatgagttaagtcacaatgagatcaaagagggttttcatagagtatcattaattaagaaagaacttcaaagtaagttaaaacaagccatagaggtgaaaaagatggaagttatagtacaactttctaggaagtagtgaaaaaaactaaaaagtgagttggagagataaatggactatgaataataacaaataaaataacagggaag

SEQ ID NO: 12322 - DNA, 3610 bp, Vitis vinifera
  Intron number 1 from transcript GSVIVT01000981001 (locus G SVIVG01000981001) derived from phytozome v7.0 (chr-ID chr1 3; pos 11113913 to 11117522)
ggcgctttgacttttgtgggaaacacgcgtatcatcctcagcagcgtgggatgcttgaaggaccaaataaaatatatatatatatatatatatatggcgttgcagaacctggtgtcgagctgttgaacgacgaggctgaaatcgcgagaagccttgtggagaagagtgtagcagaagacccagcgcggctccggagggagctgcttcttgacatggcaatccgccattttcagcttcaacagcaggtatatgtcacccgggtgtgtcaaaatctctcccaaactgcccattttctccacatttctctatatttcgagatttgaaattcgagatttggaaatagaggagtgacgggcatgaaaaaaattaagaagatgacaagctgaaggtgggcgtgctcgtgagacttcatgtacgtggaaaaaaatgaagaaatgagctgaagatgggtatcagtgatggaaatgggtatgacagatatgggcgtgagagaaacgagaacgatgatcttgactcgcgaaggctgccgtgagaggccatgactcacccttcttccttatagctcatgcattcagatgagtgtcgaaaaacagagaaaaattatagcaaagagacatctccacaaacagagcataataacacgaatagcataggatgtccgtcaaggcttcaccgcatgaattattagtgagttggctgattgagtgggggagaccaaatcgaatatgaacaaaacatgattttcatgcactcacaatacgaacaaaacagagtaaaaacaatttttagcaaaatgcaatggaatagctaatataaaacaataacaagcaacccatatccatctcaaagatccccaagtaaatcaaaagtgtagctttaagcccacattcggtctaaatgatgcaaagaaaccagtgaagagtaaggtaaaaaaaaaaagaataattaggaaaacagagaccttgagcccacacttaccttttgatcttctttcttttcaaatgtctgttttgctttaggataaatacgtctgaaagtgatccaccccaaccctcccagtcacatagctccccgttgctccttttgagaaaatcctctctagtcgaaaacaagccagccccctctcagctctgctctaaaaaatatcctcctgaacggcccgaaaaatcccttcttccatctgtggccatccccctcctttgctttttctatatccctcttctcccttttcttccctgtttgtgtcttcctcagcaagccatcttgcctgctgctacacgtcccatctggtggctaccacccatcctctctagctgcccaagagcagctcacttgagaggccgtcaaaaaataataaaataaaataaaaactaaagctcctggggggtctacacatgcattcttttcattttctctagtttttaatgattttatatttttctttatttaaaaaaaaaacaaataaatttcataatttatgaattaatgaaatttatataattattccatacataactaaaatgggttgtggtgagaccactctatacacatgatgtacttcattaagttgattcagattacgatatttattaagtgaatgattgatttagccttgtttaagaatatacaagagatatcatatgcttatgcttattattgttgtgcacaaaccttgttttctcttcgagcatattattgttcatagctaaggtacactccaaatctatttcgcttatttattccttattattatcatgatcagtctcgatatctattaaattaattaatcaatcatcttagttgttttaccttaattagtagagacctaactttaaggtttagagggatgttacgacttatcaccatatcttttctaactcgaatccgattcaatttaacttaaaaatgatttttaaaaacaaaatttaaaaaacatgatcaaatgtgacttaaaatttattctattttattttatatttctccacatttatgcccacccctcatcacatcttattgtggcttgatgatttatgtacatttaaagatgtcacaacaatctaagagtttgtttgtaattatttctaaaaacaattatttattcttagatatccgtttttcaatcttgaaaatatgtttggtagttttctagtagaaagtagttttttaactcttttttttttccctgaaaacataatatttctttgtaacatattttaatcggttttaatcattttcatttgtgtttatgaaggtgatttataaaaaaattatataaatatagaaaataattaaaagtaaagcaccgaacgaaagtgaaaaaaatagttaaaaacataataaacaaatttagaaaattccaaattttcaaacaaaattttattttaaaaaatattacacaactagtttaaaaactattctaaaacagtgttttaaaaatcagttccataaaatcctaaaatttgggtaaataattttaaattattgtcatcaacaattttttataaagaacaacattttggggtttttaaatcctaaaaaaatgtattcaatcatttttaaatgatatgtttggttgttaccttttatttagaagttgttcctcataaataaaatttagaaattccaatttttaaaacaaaaagaaatggattaaaaagattgatttttatttgttattcctaatcatggtttgaaaatgtcacaaaatttcaacgataaccatattcacttatcagagagagtcaacacaatatttgacattcaaagtccatttttttttacccatttttctagaatctcaccctttaaattcaattttttgccgttggattcaaactcaagccaaaagatttataaatatatgttcacaacaaacatgttaaagttcactattaaaaaacaaattaattaattaattctaattattttattttattgattaataaaaatttaaaaaccattattataattttcttaaaaaaatattttttatatcatttatatgataattaaatatagaaaatataaatattaaaaaatcatatatattttattttatattattaaatttatttgaattaaataaattataattttaatattaaatgtatatcatttatctcattaatcctattttaaaaaattattaccatttgaattttaattttttttatatatccatttaattttatttaattttgaatgtttttattttaaaatattaaaaatataaatttattcaaaaaatattaaaataaaaaaatgaaattctaatattttataaattaaaattaataggataagataaataaaaaattattaagattaatcttattaatatttttctcattgacaatacttaggtaaattatacttataaaatgactttaacatatatatttttatttattttatttttttaaatatttcaataatttttgtctcaatattttattaatggtccataaaattcaagtagacggaacattatttcaaaccatgttcctaataagctgataccaaaaagtgagcggaacgaggagacagcttatagaaaagacaataaagcattttagctttcccgccaagacacccaccactcccaaatttc

SEQ ID NO: 12323 - DNA, 11906 bp, Vitis vinifera
  Intron number 2 from transcript GSVIVT01008027001 (locus G SVIVG01008027001) derived from phytozome v7.0 (chr-ID chr1 7; pos 6524894 to 6536799 reverse strand)
gccaagtgtcgaggataatacagggacagcatactgtaagttcatgcactctttgatttccgtaaaaaaaaaaaaatgttggtgctaagtatattattatctgccttcattaattaggttttactgtgtggctgagtttggattccattaaaaataagggttcaagttgaaaaatgaactcaaaatgcaggaaacttcattaatacctgggacacatttgggtaaggaagcaagaattattttagattttcaaaaataaaatgttaaacgatgctgaaaacatgtaagcagaatgtttcaaatggtattttccaaagatttcctcaaaatggcattttcaggaaaagttaaaatgttgtttttagcatttggaaactatacacccttcaacacatggaatgacatgaaattatgaattctaaatgctttttatcctttttgttttaaaaaatgagaagaagtttcagaaaactatttttatttcagctaggaaatatgtcctttgcttctctactgacaaacttcaaattttagaaccttcatacttgaccaacaatgtgtaatattagcaattacaagaagtagcatcagttttaaaacatgtaaatatgaaaactcaaagaaaaagtaaaaagacatcatattgttaatgtacctctcaactggattactgtgtacaggtgttcattttgttgttttgattactcttagaattcatagataaagttatcactgttttactgtcatatgggggaagcgaaaggagaaactacaaagcaaatgttgcatggaagaaatagaaattctttgatctgtcaagatacttttatcattacaattaaggaggttcagtatttgtgatctaccacacatttcaatggggcagagagaatccccacttatatttctatgaatcaatcacacttgttacaactatgggtatttgggtacaggggtacaactttgcatccacaagtatgttgatacataaaaggatctatgaaattatcaaaaaaatcataaacgaattgaaactttgaaggcaaagattgaaaattcatctaaaaaaaagaagttgaaacaaacaaactgagagaatgtataattatttgcacataatggcacaaaaaatttgacacaggtgctaccaatatggtttgaccctggtaaccaaaatttgattttaaattgtggtatccctgttctttaatcatgtattccaagagttgtgtgtaaattcttcctagttgtctgggtataactgccttgttgaaggttgggaatgagtcataagtcatggtaaaatggaatgcaccacctccctatataatagatacacactcctcgttcctaaattagaggaaatatgggacataatccacaagttgtatctatataaagaaatgaatggaaaaggaaaaaggcaccattgtgaaagcaaattgtctcctacactttggtgccatttgtgggtaaactttgaaagaagaaaaagggtgtcacaagtaccaaactggggagttgagtagaaggatccagtcccctctagttgaccctttgcaacatttgcaaagtcaacttaaccagcaataggagtaatatgagcaaaatttgcacttggttatgcagcaaaatgaagatttgaatagggagaataatgctttgcactcatagttgtgggtaaggcgaactagtgcctcaacttctccttattattacaccctatctcatcaagaggacttgccactatctccgtaagaagaaaaatctggatgcaataggaaacttaaacttccaaaagggaaggggcaaatgaagttacagttagatgagttgaaagctatagttggcactttgaagggaagatccttgttgtagctagttaatgaaatagttcatggccttgtgaacaacctcctttcctaggatctcttccaagtagaagtttctattggtttcctacctcctaaattcagcatgtatgatggaggtagcaatcctgtggatcatttgatgcatttccaacaagtggtaacatttgttcaagggaatgatgcacttatatgtagtgcttttccattaaacttgtagggtctcaccttcatatgattccacaacttgcctcttagctcattttttttttccaatctttgcactatatttatttcacaatacatgtgcttagccttgcaaagacaggatacaaactctactttcaatatcaaaaaccaaaagggaagagtcagcatgactatgtaaagcactttagtacaaccttggtgcaagtggaagggtttgatgattctactacaaggatatcctttaaataagggctaccattggaatcttgtatgagtcacttcataagaaatggtaaatgcccttttaccattaaggatgctttcactaacgatacaaatacgtaatttagaggaaaacttggccacattctgacctaaagtaattgcttacactagctctaatgtgaaaaaaaggtttgttccttctcatggtgattctaaaggaagaaggatatggactaggaaaatggagatgatttccatatgggcaaagccataccctgagatccagatgcaatgtttacaaagttgaatgtgaattacaagcaggtcttttcggtgttggtcaaattacttaacttcatgtggctacaacaattaaaaggagatcattccaaaaggatcaaagttgttactatgagtatcataaagtattgggccacatcatggaagagtgatgtagcttgaagtttgttcttgtgatgtatgtaaaataggggaaacttagctagtttttcatagaagatggcacttagctatagttagccaaggaagttgtactaggttctaaaaatgaagccactatttcgagaagaatcattttcgttattcatggtggactctttagatcttaaaagtatagcaagacattagtactttaggaaggtgggtaaggtaagtgaagttaatcaagtcaaacatattgtctaatctgttgtaatcaaggtaacaaacaaatatgaccttgtttttagttccaaattctaactaggcttatgcacttattgtgttgttgattgatatatatgtctttgtgtcatcttcaaagtttaaacttttcaaatttgttatcattttttccctataaaaaaagaaattgaaaaaaaaagctaatatgttaagtaaaaagatttattcagtaaccaccataattttcaatgtcaacatttaaatgaaaattctccaatatccattgtaaaaataaacttagttgacttctaatatagtatttgacaacaagaattttgattttcatataagattattttaccatttctactacttatgatcaatttttaatcttttaatacattttaaacaattgatataatcttttttaaccaaaaaactttaatttgatttttcttaacaattctggaaaatagtgaaagatgtatgtatcattgtatcgttatatcacgtatcacatcgtatatagtatatgtatcataaaatttgctttaagataagataggaattatgagacatattgatttccataaaaaacatataatatttttgtattgtattgtgtatcatacatttttaataactatatatatgatattaagcctgtgaaatgatgattgatatattgaaatttgttgcttatggttgttatatttcaacttttcaaatataaactattatacttggaaatatctttgaattgtagtataaggaacatgaaaaaggcgtttcacacattaagatatcaaaagaaggcaccaagataggtggccttatgaaattaatagggggggatggtcttcggtgagagcccttaaaggaagaacaataaagtactctaggatgaaagacccaaaatattccctaagaagatccttgttaggattaatagggggcatagatgtatgtccctaagtgagagtccataaaaatataagtatttgagcttggagaatttaattgtacaaaccaaaggtatatagaagttgattatgcttattatgtgatgtggatgattgtgttgttaatgatatgctagtgatttatatgcttagtattaattgcttattataatcctttgtatttttatttaaatataagaataaaagcatcctctattgaaatatgtaactcactcttttcaaaattatttttagacacaattgaaggtgtttaagagaagagaaaaactttattttgagataaaacttgaaaatgtatactttgttggttatgtgattctcctttgtattttgagtatactatgctattttgttacactatatggaaagagaatggggattgaaacaataacattgtatctcaactactatgtaaatgaaccgaagacaaagattcccattttgtcatgtatattttggtttattgatgtaaatttgagtttcaattgctaatggagttttcaatgtttaaaatctattaacagaggttggaaaataatttttagatgctaaaaatgttgaaaagcaagtgaaaatatgaaaaaaaaaaaaaaaaaaaaatttctctattttggtaattatgttgacaagcaattgtgcatgagagggtaattatgcaaatgttgttttgtttttttttttttgataagtaaacaagatatgcattagaaaaggctaaacgccacaaagcatacagggagtatacaagacggctaaagcctcaaaaaagaaaaaggaccaaaaaagaagctacctccccttaagtggaagctatccactccaaaaaacctatgagggagaaagattcctcacctaaatacactttggcccaattccacaagttacagacaaaagaattctttaatttctgaacattcaactcaccccccctaaaggctaatctattcctctccttccaaaccgtccaaaaaatacataacggaatggatttccaaatctttttccttttcttccctacaaatgagcccctctaggatattaaagtctcctttacagtttctgggaggacccacttaacatctatcaacccaaaaataatattccatagggctctagtcactatacagtgtaaaagaatatgatttacattctcttcttcacaaccacacaaaaagcagcaattagggagttgcacccctcttaactggagtctatccagagtaagcaccttcccccacgtagcctcccaagcaaaaaaacagactttagttggcaccctatccacccatattctccttgcaggaaatactgtggcattaggcttatgcaaatgttgttatgtaccatatggcatactcttgtcctgtactccactcaccttgcttttctctacgcacatttggttttctctatgcataattaccctctatgcacataacctctacacccattaccctagggcatagacctcctatccacaactcatgtcctctacgtacacaataactatgcttttgcacaactcatatgttttgcacgtactattatttcctacttcttttcttcaattcagctttgctttgttcaagttttctcctataacaatatttaaatgcccatattctacattttgttattaatttctccatttactttaaatttacaacataaataatagaataaccacatttgaattcaataaaaatactctcaaaaatgaattctaagtatatcaaaatttgattttctagttttaattataaaataacaacttattctgagaaataatgaagaaaatagtttgtaggaacaaggttaaactaaggtaaaaattttggaaaagttatatttagttattctaatacgaaaacaacaaaatcctatactttttatcttactttaagaaaattttaaggatggcatatttccatgcttggtgaaaatttgaagactattaaggcagtgtaaaaggcacacttgaattttgcaacccaaagaactatttataaaaacctctaaatgagatggtaaagctacaatcaagattgaaatggagttataatgcattgatatttgagtttatatactttgaaaaccttaaaagccttagaaacttttgttgttttattatacatcaaagccaaaaatccttactacttgagttaatgataagggaaatacactataaacacaagaatcttttctttaattcacacttcaagtttgaaatagtagaatgatcttggatactatgttaaaccatggtttaacaccttgggatgtgacacccacaacactcctagcaactcatccacccatgactctttgcccgagttattgtttcttcaaattgtctagaaatgtcctatttgatatcttagcttgcccattcccttgtggacacctcaaagagaaataagagttagttataccataccgagcgtaaaaaccactaaacctctagttattgaattgcaacttactattagagatgttaatgtatggaattccaaatcaataaataatgtgtttgcacacaaaacattaaacccctcactctcttattctagcacaagctttaaccttaatccactttgaaaagtaatcaatggccaccaataaaaaatacttctgcctaggagccaaagggagaggtcctacaatatcgattccccattacatgaattgccaaggactagccaggacactaaacagttcagtgtgttgatgtacaaaagttcaatacctttggcaaggattgtacttctatgcatctttatgcatataaagctaatagtaaccttatgccatagccttaaaagttaagccacatccatcaaaatggttgccataagatctctcatgaatttcctttcaaatgtgactagcttctcctttagaaacacatttcaaataagggtcagagaatgaatgtctatgcatctgatagtttataaatggatatctggcaacctttatgcacaactttggggctttcttcctatcattaggcagttcccctttcattaaatatgcaataatgggctatctcaaatcatcatctgacaagcctaaactgatctcaaaaataccatccttgaagtattcaaattaagttttgtcaacataatcaatggatacagtccaagaaaataaaagatatatatttgcaatgaacagagactatccacattgaaattttcttctcaaggacatttctcttagcatacctcaaaattttttaacaacttctatgtcgtttcttgatacttaaccatcttatcatctttcatcacaaaagtctcatttgtttgttgcacaactaattagtagcaaagtatgtgctattcccaaattggttaacaaaacttcatattttgactcattatttgtagttgagaacccatatttaattgaacgtaagggctatccccactccaatttatcaggactatttcagcactagcatccttccttgaagatgctttatcaacatataacttccaaatgtgattttttgagtcttagagattcactttctcggattctccaacctctaaaatgaaatcttctagaacctaactcttcacaacacaccttggctaatactacatatcaaattaccccagtttaatagaccactacatcatcgtcctagataatttgggtttctatagaactattcagataagatatgttgctaacactaacacaatataggcttgaaagtaggggcatagttttgtggctataatcaccaatgcaaatgataactttttaatagctgtatatttcttctgtgattcagccaacactttgctaacataaatggtctcaatcttcctttctggtccatactacactaactgcatgtggtgaagtagccaagtacaactttaacccctcctcagggcaaggatggcttaaaattgttggggttgatagataaactttcaacacttgaaaagccttcttccattcatccttccaggctaccatccctgtctcactcaaaagctaaagcaaacatctgcccaagaatgttacgatcccacttataagtctttgtatatctttaaggcaacttgcagacgatgtggcaatcacagcctgaatttgaggccaatgtacctctattctccttgagatcatcaaatagcctagaagtttttcactactaacctcaaatatgcattttcatgccataagtttccataatgtcaagctatcttttgaatattggaatgatcttgcttttgcatatagcctagaactatcttttgaatgttcctttcaaggctgcacatagcatttgtgggaaagcatttagcctccaagtatctccatcaccttttgagctgatggaaaaaatatcttcttgtggtaagtagataggattgcatgcattagtgtgccaaaccccttcctaaaatagcaatgtagggggaggggatgttaattatcatgaaatgcaccatctttgtaactggttctgcattgataggtaacaatacctcccaatgcacactaacaacttctttgctgaatccaactgaggcattggtaaaggggttcaactaagaaagcaaaacctccatttggttaaaagttgctaggaataagatctcaaatggggtcttgccatcatcaagaatacccctttatctcacaattagctattgttaatgtcaccaccaaggcattattatgatggtatatttgttccttcaaagattgaaaaagtttatttttgtggattatgtgataaatctacatgttaaagtcatattttgttaatttgagcttgtcaaaacttaacattcaatgtttgcatgtgatatggtataatttagctctttaaatcctactatctttcataaaattggttatatatttctcgatacttcatactttcaatagatacttacacatacatatttttctatttatttttaattatataaaaatttacgatacacgatattgaaaaatagcaaaacaatgcacgatatgttttatgaattaacaactatgatcatatatagatttagaattttctcaataatcatcaaaccaacattttaaccactttctatagcatatgcctattcaaaatttcctctatacaactgaattcaattcagaaaaccattgaaaaatttaaattctataatagaaacttccatacctagtataaaggtccaccaattttcagcttctaacccctttattttgattacactttagtttcaagcttgataccaagaaagaaacagagcaattccaaagttctttctaagttttcttgttttgttaaaggttgcccacccaaaacttgggggaagtaagtagttagttgacttttaagttgttgccaagtgtcttataaccgattgatctaagtgtctcagatttgttctcctattcgcacagtaggcatatcaaacgaccacatgaagaggctttgtcgcattagctcaaggcacgaaagtcactatttgaatagaagttaattctctaactttaagatctgagttgtccgagtttgttgagaatgaagaatcaaggagaagatatggccaaggaaaggagagaggaggtcttaatttgagttggaacatatcaatatttttttttgagattatcagaaatagaaataacaatttctagtaatgaatgctagatgggaagaaacattctcagcaatgtaggctaaggatggaaaaacaagttaggtatggacctactctgatagcatgaagaaaagaatgcaaaatggtctctattacttttctgaattagtacaagaccttaaatcatatatagcagttaacttaatcacaaccaaataaggaaacataactatcttattctacttacaagcaaatttatggaatatagatattatacatgtgtgatagctaacgagattatatctacaaaaattatggtattgattcatatcttcccaatagatatgacaccaattcctaacatcatcacattggaagatagaacaaattgaagtttgacaaaagatagactattaaaattaattctcttctgattagaatagttttatactattatataaaaataatattgctaatttagacaatgtcaacaatatggaaattactaaactatcctagttgaaatatttttttgcctctttcttaattcttcaaatggtgcttttaacattgttcccattataatcctccttaatataagtaaaaaaaggtggttgtcattcttgtcttagaaaactaacctgtcttatatacaaaattaacttccataatatttgaagaaattttttatttgcgcatttgattggggctagagagttagaaaaagtttttgttctaggcttttatgttaacttttttggtgttttatcaaaaaattaaagtttttaaatcttagcaatgctctttcatgtagaacataatcctgatcatccattttaatggcttgaaatgtgtagttaagatttgagaaagttgttatatgaggctaaaaaatcaccaatatttaaaaaaagagcaaaaaataatagaaaagtttttctggtaatacacacatgttgagagtactcaaattagaacaaattcaaaaaagtcatatttgtgaaaggaattattagttttgaaaaaaaatttgcttttttgctcatactaatattattacttcaacacattcctatactattgccatcaagatcaaaatcacaatcactttatcacttgcaatgttattgtaatataataaaaaaatatcatctctaaccagggataatgattgaatggttatttttagggcttctaataggacaacttttaatgaggcataaacgaattaagaatgagtttgtatatattttttttaaaatcctagttaaggataagatattgtcaccccatatatatatatatagttaaataaaaataattgaatttaatttttctctcttttaatacacataaaataaatataaatcaactttgtacgaaaataaattacaaaaaactataatatttatttagttataaattaaatttacttttaatataattaatttttcaaaaataaaaaagtttgaaaaaaaaaaaaaaaaaaattaaactatgtgaggctagcatgggaaattctcttactcgctccgttttttttttttaactgatcatcatgggttcagaataaaagtgacctacaccaaatctacttcattgatatccctatccttgatcaatatccccaccattacgtcttatgccactactttttactccattaatttcactattattagagttggcagtccttaattaccattaccataatatggttatgattattaatgctactgttactagtggctctctctctctctctctctctctcacacacacacacacacacacacatatatatatattatgtatgtatgtatttaatcttgttttccaaagaaaaccaaggacaaagcaaatgaattgttttttcttgattctaagaatttctttccaaaagcatagccaaatggttgatgtatgtgtggggacaccatgcaaatgctagatacctctcctattcatgccatgctctccatttatcatactacttggtattggtggcattatctataaatttacaattcttttaactaaaaaaaataattaaaaataagagttcaaataagagctctatatgaatgggcaactcctagtctctaatcaacttaatatttggtcagtattatgggcatgagagcagtaatatgttggtttgaaaaaatataaaatttactcatgtaatttcattcccaaccccatcatttgttccatgctaaaaactaacacacatgatggatattaaattacatgcttttgcaggcaacatttcgacaatatcctcggcttgaaaagga

SEQ ID NO: 12324 - DNA, 9939 bp, Vitis vinifera
  Intron number 1 from transcript GSVIVT01018573001 (locus G SVIVG01018573001) derived from phytozome v7.0 (chr-ID chr1 6; pos 13190550 to 13200488)
cacgcccgctgctgcggcttttccaactttctcaggtagattttttctccattttttctctttatttaggtcttctcaagtagacttctcatctagatttctcatccaagaaattccgggttttgggttctgcttgttttgacggaaaataattccagaaaatttttctagaccccggactccacgattccattttggtctaatcgattagggtgctttctttggagcgcattttcttgccacgaatcatggtatattttcggtttaatgtgttgagcatcacctgttcgatacttttcccctgtgatatctgggttttcatacaaggcaaagaggaaatggagtggccggccaactattcagaaaagaatcaaaacccgccatttatattctgtgacatctgggtttgcttctccttaattgtgttatcagtatattaacagcttactgcaatccgagtgatttaattactatgtttgtagctctagaatgattcgttttatgctgtcatattattttcttgagaatagctctctcgtcaacattttgctagtcaacattttgttatctttctccacttctttttgtttttttcctctttagaacatagaattgtttggtaaacaggaaagtagtagttatgcagaatcccactctgtttaggatgtggttcaatggttagtccatataggtccaagactctgaacatggtgcactatctctaccacctctgaagatgaccaccgtccccaccccacccacaaccccctcacacacgcacacagatgtaggtctctgtggctttggatgtttagagctggatattaccttttgtcattaaatgtggtaggagcacaaggaggaataagtatgagaatctgggttggtcttatctccctatgcctagaaaatcagtagccccacttcaaagaccgatcccagacctcttcctagaaccaccagtaccccacaagcacattatttctatggtttcttctctaggtcactaaaacacaagttcccccaggcaatgtatataacctctccctttcacttctaggcatttggcagccacaaaccaacttgtcaaattagtgacacatactgaggaaaaaatctacttatcagacttaccacaagaaaagcttggtgagagtttgtgggtactcacagcaaaccaaaggagagaactaattatatggatccttctctgtggcacaatctattattgttgcattataagattatagcctcaagtcatggttgcataaattgtgccactagcttcaaaacctttccttcaatatcaaacctactgtagaataaccttaaggttgctaccttcagtcaaatcacagcaagatagggctttggttttataaccttgtgaaatgggaattagagttactgacaatgaaaaagaaagtaaaggtaagaataaacagaagattaggaggaaacagtatcaggtagaaattttttagggaatgaaaatttctttaaaaataaataaataaataaataaaaattggattttgaaaatggaaacagtcataagttcttggaatttcaaaattgcttcacatgaatgctgtttatctaggttcttgggattttgctatgataaattttaactgatccaaagttgatgttactgtggtgagttctcttgtttgagtttaatatcaatgccactattcatttcatttttggctctgggccctttttccaaggactgaaattgcaagctgcagatctttgatcacccatgatctcccatgtgtagatggtagatatgttctgttagcatgttgagttcagtttgctggtgcactgatagttgctacttgcattgctgtaatcaaactcaaaatttttattggttttagctcaaggttttggaattttattgtgataatgttaaattcgataaaagttcccttaaaatttgaaacctcaatcctttataacagccaaggataaaaatattaattttaatggatatatcggtaacatgattttatggatatattgatggatattttgacacaaaatgtcggtgggacaaaaattgtttaaaacttataaaaatgttaggaaaaactttaaaaaataatataagaagtaataatagacattttgaaattgttttgttaaaaaatttgatacatgtatgatataatttgttacatttgacaataatatgagggcgataagaaatatgaaatttgtaaatgtacattcattattaagttatattaaatattattcaaaaatgatattgtgatatttgattataatgtgtttaactttaaaatatatttaatattaaaattatgacttatttaattcaaatgaattcaatgatataaaataattgatgatatatgtttaaaaaaaattaatacttatattttttatatttaattaatatatatatatatataaagagctattaaaaaaattattatgatagtttttatattttggtaatcaattaaattaaatttaaaaataaaataattagaattactttatttattaaaatattcttttaatatttttttataaagcacttccgcatatatgtatttatctttgttagactttgtggattgggtaggctcacaatagggtatggtagcaggtttttgagtcttcacgcctttttgtcctttttcttcatattctttcttctactaaaattcttatttacctataaaaaaaaacatttatatatttatgtgcacatttataattaagggccaattagcccaatggaagccggcaatggatatgacctttttgtcttgggtttagatccccccatttgcaagacaaaccaattttttagtttgattgagctttgtcctagcaaatacctcatgagcggtaggctgcttgatcgagtcaagtgcgttgactgaccaaaaatatctagaatttcctaaaaaaattggtgaaaatatcaatatacattgaaatattgccaaaaatgttgaaaaatgatcgaaaaatcgacaagttgatatttccataccatttttcacttcaatcaactagtttcgtttgtttgttgtggtcaagtttaaaatatcggtaaatatggatatatcggtacttggattttatggatatatcgaatatatcggagaaatatcggtggatattttgacaaaaatatcgatgaggtaaaaattattcaaaattcacgagaatgcttgaaaaaactccaaaaagtgataaaataaataaataaataaataaatatatatatatatatattaaagttattttgtaagtgtaattgatataagtacaattaaagataatatttatcaaatttttataaaaaaattagcataaattcctttaatatatttatattcatttattttaaaaaccaaaaaatacttttattaaaacatattttattatattttaaataaaaaattaaattgatttatatgaaatattttatttgagatttgatttctaaaaatttattacaaatatatgatgacaatttttctattaacattaatttatttaaataattaaaattattaataatttatcttatcaaattaattttaatttataaaatattaggacttcataatttttttatattgtagcaatttttgagtaaaattatatttttaatattttaaaataaaaacatttaaaattaaataaaattaaacggataaataaaaataaattaagaatgaagtgatagtaattttttaaaatagcattaatgagataaatataaaaggtagttaaaaataaaaagacaatataaaataaaatgataatatagatttaaaataaaaaataaattaaaaatgaataattaaaaaataaaaaaggataaatatttaaaaaaaaaaaaaactttcaaaaaaatctccgatatttcctgatatacgatatatttgatatattcgttgatatattcgatatattcgtcgatatatctccaatattttgataggcttcctccgctgctccgcgcgttactccacgcttgattatttcgcctcaaaaccgatatatcgtcgatatttcattgatattaccgatatttttccgatattactgttaccatgcttaccagctcttaccattgccgcctatagatatagatgggaggtaggcaagggtagcttgctttcacacctggctgggtagatataggtacccctgcccccttgcttagcttgactcgttcacggatactttatttaccttagcagctaagctacggcattcaaatttcggtagagctggacctaacctcacgacggagactctcgcttttcctaagggcatccctttttccattcatcctaaatggcgggacgagaagaagaggaaggataaaaagtaaatttaatacaagaaaagaatagctactctataactctactttagtaaactccctttcttaagcgttcgtgcgcaccacccgatgctcactcacttattggagggagaagaacaagaggttatattcttatcttttggttcccaggggaggccccctggaccccctttcattaagagtgacgatcgtgagtgagcacctcactttcacctcatcttgaactctctctaaagaaaaagaatttcaacaaatagaattttttttttttttttttttttagaaaatctaattccactatttcttttaattgatattaaaaatgaaattctagttttatttttttatttttttgttttttatgtttatgactaaaatcataaaaaagaagagctatcttcttttatctttttgtaattaaggatagtctaagtagttagacataggataatgtcttgaatttatattaacaattagaattaggtccatcaactacagtgtgtattatccatataggggatcaaaataaaattgaatgtgaaatatttaagaaacttaaagagtatgtttggttctagcaaatttgatgtggaaatatgggattatgatttgtaattaagtgccaagattagagggattgtgttaggatactttctatttttgtagatgagagaatctctcctaattagttattgtttccttagagatagtgattgtgcatattatatggcttagattaggaatcccacttgtatatatataggtcactttgtattcagttttgacacagaaaaaagaagaatattttcttcatggtatcagagcattcagatctgaaccacgtataaaaaaaaaatcatctttttccatggagagcagaacggaaggattaaacttagaggtgacgtccagacctgaagcagttcactccggcagtaccagcaccacagatggcatcattcttcccataacaggtcataaactcaatgcgcagaattttatttaatgggctcagtctgctcggatcttcatctgcaggaaaggtaaggaagaataccttacaggagccattgttcagccgaaggaagatgctccaggataccaaacctggaagttggaaaatagtatggtgatgtcttggttaattaactctatgaccaatggcataggagaaaacttcatgtattatggcacagcaaaggagatatgggatgcagctagagagacctactccaacatcgataatacctcggcaaatttcgaaatcaagagtattctccaagatcttcgacaaggagattcaactgttaccgaatattttaatatccttacacggtattggcaacaactcgatatttatgaagaattggtttggaagtgtcccgaagatggactcctatacaaggtcattgaaaaggaacacatctacaaatttttacttggccttaataagaatttagatgaggtacgtggaagagttctaagtattaagccattacctagtgttagggaagttttttctgaaattcgcagaaaggaaagcagacaaaaagtgatgttgggtacccaaaattcctccaaaaatcttgagaactcagccctagttgcacgaggaacccaatccaacaacaacaaccaccaaacgaagaagaatcgtccatggtgcgaccattgtagaaaacctggacacacgaaagagacttgttggcatctacacggtaaacctgctgattggaaaccttctcggccacagcaaaacagagaaggtcggggttacaccgccgcagccgaagagaacacatctggcactagctcaaatcctggaccgtttagcaaagagcaattggaggcactacagaaaatggtccaacagactcttcaatcaattggaacaactattggttctgcatctgtagcccagaaaggtattttttcccatgccctaaatgttagacaggaaaatcacactacatggatagtggactcaggagcttcagatcacatgactgggaatctcatggtttttcatgaatatactccttgccataacaattcctctgttcgaattgccgatggaaccctttctagggtattcggcacaggttcagttattatttccaaggatattactcttcactccgtgttctatgttccgaaattggattgcaacctattgtctataaatttgaaaacttcaacaacatggttcagacgcagtttcaggcaaaaattcaagtccatcggacagataatgctcgagaatgctataacaacattcttgggtcatatcttttggagaatggcatcgtatatcaaagctcatgcattgatactccacagcaaaatggagttgcagaaaggaaaactagacatttgatggaggttgcacgatccctcatgatagcttcaaacgtgcctaaacaattatggggtgaagttgtactcacaacaacctacttgatcaaccgaatgccttctaggattcttcaatttaaaaccctgtgtcaaatcctcctcgctacatatccatccgctcgaataatctcgtctatcccaatcaaagtctttggttgtactgctttcgttcacatccataagtcccaacgtagtaaacttgatccgacagccactaaatgcatctttctcgggtactcaccaaaccaaaaaggatataagtgctactctccaacaaccaagaaattctacacttccatggatgtcactttcttcgaaaatcaacccttctaccccaaaactgcaattcagggggacaactggtccacagatgaattccaattttgggaaaccgaaatcagcactacttctcctttgagttcatcgctacctcctcaaacagatactactctttctgtccccgaaaacaattccttggatgtcccttttgtcacacctgagtcaactacacaaggcagtaaagaggtaatagtttattctagaaaaaatttaaaggaaaagcccgagaaacctcctcaaaaggagcccgagaacagcactccacctgagcagaaccaagaattggaccaggatccaagcaacccaaactcgcaaccaggtaacataatttatgatttaaattccagtaatgaccttgatgatcttgatcaacccattgctttaaggaaaggtgtaagatcttgcactcagcatccaatcagtaatcatgtgacctatggaaagctttcacagaatttccaagcgttcatcacttctcttgaagatgatcgtatcccatccaacatccaagaagcacttcaacaacctgaatggaagactgctgttcaggaagaaatacaagcattggagaaaaatgggacatgggaaatctcagaattaccagagggtaagaggcctgctggatgcaagtggatatttaccgtgaagcacaatccggatggaagtataaacaggttcaaggctcgactagtagctaaaggatttactcaatcctatggcattgattatgaagagacatttgcaccagtagcaaagctcaactccatcagagtgttattgtcagttgcagtaaatttggactggaatctgcaccaacttgatgtcaaaaatgcatttctcaacggagaactagaagaggaagtctacatgaagattccacctagtatggaaactccagaaaattcaggaaaagtgtgtaaactaagaaagtccctatacggtctaaaacagtcacctagggcctggtttgatcgactgactagagttgtgaaaaaacatggattcatctaatgtcaagcagatcatacactgtttatgaagcactctaaggaatgtgaaatgactttgttcattgtctatgttgatgatattataattaccggagacgatgaagaagggatagggaatcgcaagaagctgctagcaagagaatttgaaatcaaagatcttggacaactcagatactttcttggcatggaagttggcagaactaagaagggaattgtggtcacgcaaaggaagtatgtccttgatctacttcaggagactggaatgctaggttgtaagccagtggacacgcctatggatcctattggtaagactgataaagataatgacagtcatccaactgacaaagacaaataccaaaggttagtaggaaagttgatctacttaactcacacaaggcccgatattggtttcgctgtgagcatggtaagtcgctacatgaacaatcccactgaaagacacatgaaagctgtatacagaattttacagtaccttaaaaagagcccaggtagaggactctacttcaagaaaacctcaagtagggaagttgaggtattcacagatgctgattgggcaggatccttgacagatcggaggtcaactactgggtattgttcctatatgtggggaaacttggtgacttggagaagcaagaagcaatccgtagtggcgagaagcagtgcagaggcaaaattcaaggcaatggctcatgggatatgtgaaggaacgtggctccaaagaatactcaaggaacttggaattatatcaaactccactatgacagttttgtgtgataacaaggctaccataagtattgcaaagaatccagttcaacacgacagaaccaagcacgtggagatagaccgtcacttcatcaaggagaaacttgaagggggaacaatcagacttatgtatattccttcaagtcgtcaaacagcagacattctaacaaaggcacctccaaaggccacctacgaaaacatgaaaagcaagttgggaatgctagacatctactacccaacttgagggggagtgtggaaatatgggattatgatttgtaattaagtgccaagattagagggattgtgttaggatactttctatttttatggatgagagaatctctcctaattagttattgtttccttagagatagtgattgtgcatattatatggcttagattaggaatcccacttgtatatatataggtcactttgtattcagttttgacacagaaaaaagaagaatattttcttcatttgaaaaaagaataatagggaaagaaataaagaggaaagtaaaaggaaaaaaatgaaggaaaaataaaaaaataaaaaatttaaaatcaataaattatcttatatgctactttaaacttatttcatttattttaagtgttttacataaaggttaaataattttaaaatatatgaattattaactaattttaattttatttaatttttaaaattttgagaaaaatatttttcataggattttctttctttctttagttttttggaatcaaagcaagtccaaagtaatgcatttttaattatttttttttttgtatatcagagaaaaatgataaaaataattattaactttaaacttatttttttatttttctggtgttttgtccttgtgcctttccctcttattttctttccttttactcccttctttctgagattcaaatggaaattatatgccctaagtctctctttatataacattgtttctttgtctagttttgtagttttgtagggataagagctgagaaccc

SEQ ID NO: 12325 - DNA, 10318 bp, Vitis vinifera
  Intron number 4 from transcript GSVIVT01015519001 (locus G SVIVG01015519001) derived from phytozome v7.0 (chr-ID chr1 1; pos 4405975 to 4416292 reverse strand)
gaaaagatattccgattgtccatcgagtaattgaggtatgcatctttagaactatttccttcttctgcctgtttgttcctgctagtggaaccaattaattatttctcaacccattaattaattaatttcctgtttgattcggggaggtggaggtggggggtgtgttgtggtggtgttgggtaagtgtggggttgttggcatgtgatgaatgccatactgtttgtttagataaaccgtgtactaatggataaaggtggagtaacgcaggtaagaatgctgtaggttacacttcttaacttttcccagccataattgttccctttaatcagaagctctgggctcaaatatggcataaaggttctttgaagtatttgaagtctgtcagtactttccccctttcctttgagtggtttacagtgcattatgttggcatcagcatataacatctcacccatgggaagctaaccatttagccagaaaacaggaagggccttaaatcaaatcacaaaattctgctttgtagggtagctagaggtggtttctaaaatctcttgcaatttaaaacttcatgtattgtgccaatttattgtgatgatgctgactagaaatggaagatcaacctatcgatcacaatagtcattgaatttttaagtcatggaatccatattgctgaaactgattagaatgaagcatttaagaagaagacatattagggaaatggtgtaaatcatttgtaagaacctatgttgcataggtttaggcatgagtgtggtatgtgggtgtgtgtctaggtgtttgatccttcacaactcaaattttgggatattgggactcgactaaaaaggatccaaaaaatgggcatgggtactgggatatgacataataaaagagaaattagttaaaaataaattagaagttaataaatgctttttaaaagctcccatcttttccctctaatacgttttttcttccttttatcactaaatattcttacaaaaattcacttttcagctaacccttctttttctttaatatgattattacttaaaaagttgaaagaataaaaggatattattaaaaaaatcaaacagccacactcaaagtaaaatagaagtgtccaacaaggatcccacaccaacacccatttcatattgtgtcgacacagttacattgagtgaaattgaaggatccgggtatcataggtcaaaacgaatatcatacatcaataattagctatctacatcttgagtttttacctatttcagttatcccattaaagaataactaaccagctagattcttattcttgctttaatttcacatatgggatttattgcaagaaagaacatctatggagcctggattggctatggtgcaagagactggcataacctgactgtctgacccaacctctggaccagtttgacacttgatataaacctgtatggatgggctgtgctgagatccttttgtgtgtctaggttttaggccaatttacaatatatgataacatgattggccgattttttgggctggaacacgagtgatctaaagcctagcctgatccaaaccaaactaaaaaaaatccaagctttgattgagagatatgaatcttaattaaggttgggttgtgtttgggttcaggcttcagtttcactaaccaaagctcaaccctaaatctgacatgacataaatttcatcgttttgtatatgcttttggttacataactatacttttggatgttatatattaatgtttttgttaaagataattaaaaaaaaaaattgaagttgtgataatttgtttattaattttcatatttttgtttgtggtaattctacattgccttcacttttattgcatttaatacgtgaattagaaaatctaggcagataaagtaaaatattaagaggaaaatgggacaactatttttgtaattgttaacataatattaaaccttagtatgttgatatcaattcttttcattatatgaaatcatcattatataaattccatatttgtttcaagtgtatatgtttttttttttttttaaatgggtgaaaaggtgaatattataaaagaggaacaccaaaagagcatcccaaagtacataggaagtatacaaaaaatgtctaaaggcgccacaaaaaacaaagaggggcaataaaaaaaacaaccctcctcaacccgaacctaaccagtccacaaagtctacaatggaaataggactaggaactataaacaacttacaccacacctacagattaaagaggaaagaaaatttaagcccttgaaccaacctcccctcattttcaaatgtcctatggtttatttccttttgaattgttcaaaataggcgtaaaggagcagtccaccatgtctttttcctttttttatccacaaaatagccttgtcatcctagagtgtctctttaaccaaagaggtgagcacccactacatgccaaacagagaaaccaaaagttgccataagacccttgtttggtcatagccgatgaggggagcacccacgacatgccaaacaaagagaatagaagatgttataaaacccttgtcctatcatagtgaatgagaatgtgatcaacaaattcttcctatgcaaggcaaaggaagcatccatttttcaaagaccaacctctcctttgcatgtgatccaaaattaaaaccttattccaaatagcctcccaagcaaagatacccatcttaaacgacaccaagagttccaaatcacacctgttggaaaaacgccttgttttcctatctccaatgccttgcaaaggatcttaacaaaaaatatctcatcctttgaatctatctacataactttatcgtctatatccttacacaccctcctcccttgcgatccaagaaggaaatgctccacaatttccacctcccaatcgttgagccgcctagagaagcaaggagcccaacaaccctcgtctgatgatggctatagcaaatgaggaaggaaaagaaatgcgcaatggttcatcaccacaccatttgtcctttcaaaacctcaccctcctcccattccccataaaaaagacaactttacaactcaaaatgtctcaatccttcttgatggctttccataaccctacctttttccctttcctcaccctgtgggagtgtcacactccttcttccttatattttatactaatgacttgcctccaaaaagctcctttcccctcagcaaaacgccaacttcatttgcattgtaggactatgttgagcattcacaaattcttgaccctaaaccacattttttattgtttgaacatatgatagaccaccttgccaaatatggtttatgcttaagagccccttcttcccaaagaaaatctctttgaatttgtcccaaccttagcttgactagttttggaatataaaacaaggacataaaataaataggcatgctagagagagtgttatgtattagggtaagtcttcctcccttagcgatatattgtcttttccaaacagctagttttttttgcgaaacttctcctctacgtcatcccaaactatcacaaacttaaacgaagcacccaaaggaaggctcaagtaagtagaaggaagcaccctaaccttgcaaccaaactcttgagccaactcctctacattctccacctttcctattggaattagttgtctcttgtccaagttaacactcaaccctcatatagcctcaaaccacataaatacctaacttaagtaagtcatctgatctagagaaggctcacagaatactaaagtgtcatccactaatagcaaataagaaacttctatcccctttctctctttgcctctcacctaccaccctaacaagaaacctccaaccttagccttttcgagcaaataactgagcgcctccataacaatcacaaaaaggtaaggtgaggggggtccctttgcatcaacccttaggagctttgaaaaaagcctgacaaagagtcgttgacaaaaatagagaagctcactatggaaatgcaccaactaatctaattgatccatttatctccaaaacacatcttttttaacatcatgaataagaagttccaattggcataatcgtaagccttctttatatcaaacttacaaattagaccacaaacattacttttcataagtgaatcaatggcttcattagtgatcagagaagcatccaaactttccttctctccacaaaagcattttgggaaagagacactaccttccccacaaccttcttgagcccattagctaacactttagctaacttgtaaaggctacccaccatgcttataggcctaaagtccttaaggtcttcaacagcccctttcttaggaattaacattggaaaataagcattcatagactttacgaatctttcgtgctcaagaaaatccctaaaaaatctcattaactcatccttaaaaaaatcccaactgaactaccaaaacaccataggaaaactatcagggcttggagctttgtccccactaagaatcgagagagcactgaacacctcttcatcaaagaacggagcctctagcatagttgcatcatcgcctcctaaagcatcaatggttagcccattgcaactgggtctccactcccaaatttcagacaaaagaaaatgaaaatccggagccaccccaaatttaatctatctctctctcctttactacccaagtctcaataattttaatcttaaccagggaattccttctcctatgggcactaaccattttgtagaaaaactggtatttctgtcaagtctatatgttattatcttaaatattttaacatatttttatggggcttatttcttggtatgcttagttaattgacatggaattaatatataattggatgtgaaaagataactttttttttttttcaaaaaaaaaatcaatttttatccaacacaagcacctaaatccaaccaaatcaagcttggattgaaagtcattaaatcaagttgaggtttggttggccttgggctaatttccaaccagatcaactcatctaagttgcaaccctaatttctcaaaaagtttgcatagggaaattgttagttaaacgccatcccctcttcgtaagctaatgtttcagaaatttctcctacactaccttctagaccaaagaaatccacaattaaaagagtcttttgaatcccacacctcctatgaaggacaacctatagaaggatttaatccctggtttttccaataaagggggttaacagtgggttttctcatgcctcttcttgttctctttctgggttgggagactgtcagtagaattcgggagtcggggaattcagaatggagtcagagcctaagcaggcttcatgtgatggtggtcctttgtgaatgatccttaaggatgggcactctatagaattttcaaaaaatgctctaatccttagggaacaaaggttgatgtgggcatacttacggaagcttactcaggagaagcactgttaaatgcttccaattctttggtggaagtttatgatgcaccactggcaatggtgaagggaacggggaaactgataaacggccttctctctgggtaaaaaaaatatatctatagttctgtatgaatgcgggggtctctgtggaaggccatgaaaatgatattcttagagtcctaatggagattgaggcaagaaagggtcccaacagttcaattacattgaagaagaggggagtgaaaaacagttttaaggaaggatagggaactcagtaaacattttagctctgttaatcataatggaacctgtagggaaggaagctgagagtgcagctgaaggttgctctttggaagatatctctaaatgaagttgcggtctctcttggaatgtggaaggcatgcatgatctggataagaggaaagtaatcaaatcttcatacaggctaagaaactggacttggtttgtttacaggaaactaggatcagtttgaccattgggttagttagaagtttgggggtaggtcggagattagaatggtctcttgatcctagggggttagcaggagggattttgctgatgtggaattctaaagcattggattgcttggaaatggacgtgggatgtgttctctatcttgtcaatttaataattgcacagatggtatcatttgggtgcctatagggacctatggtccactaagagggaaggagaggagagatgtgggaggaattggtctcaatcaaagggctgtgagaagaaccttggtgtttaggtggggattttaatttgatttgctatcttgttgaaaaaagaaactgaaaatagttgccattcactatgagggaattctctgagcttctattggagtttgagttggtggatcctcctctagtagagggtggttacacttagagtggaaagtagtatagcctctcaaaggccaatgtgggtcattttctgttctctggtgattgggaggagcatttttcttttgtttctcagtagatactgccaaggaaaatgtcagatcttttcccatttttcttgattgtggaggccttagaaaaggaaagtctccttttagatttaaaaacatatggtttgaagtggagggatttgggaatctagtcaagtcttggtgacagaatgatgaggtaaaaggcctagagcaaagtagggggtctttatcagtggttttaaggtaagaagtagagggggagaaggcatagaaatctctgctttattgtttgcagactacacttacacttttctatgagcctaatgtggagtaattgagatagtgaaaatgggtgcagatctcttttgagcttgtatcataattgaaaattaatttgcagaagagtgggattaattcctgttgctgcattggagaagatggatagattggcatccttttctagttgtaggttttgggagcctccaatgtggcacttatagaggagaggtttaaaaggagacaatccaattggaagaagtaacggttgtccagggaaggaagattgaccctcacaaagagcacctgtgtatttcatgcccaggaaagtgagaatagggttagaaaagattatgagacatttttttgttgggagtcattcagaggggaggaaaacgcatctagtgaattggatgaccatttctaaggaagataagtttgaaggattgggaatcagaaagttagatgttcttaaaagcacttttgcaaatggctttgaagatatgtgcatgagtgtgacagtgagtagagaaagataatccaatgcaagtttggagagttcaataggggttggtgcatgctagagatgaaatagccattgggatgggcctatggaaggatattaggagagaatgggaagagtttagcctaagaactattattttggttaggaatgaattgagagccaaattctggttggacaaataggtggcaagtgctctttaaaagaggcttttcataggctattcaggctagcctctactaggaatgcaaggataggagacttgtggaagataggagagagtgaaggaaaataatcccttcatttcagaagaaattttcaggattggagatgagagaggtggaccagtttttagagctcattgctgatgccagaccacaagcaataggggaggacaatttattatggaagaaggaaaagaaagaaagatttcaagtgaaactttctatgactcatgtgttgagaattagagctattccttcccccccaaaaaaaaactcctgcattacttgtgttgtgccactttgcagacctgtttattccttgggaaatggtgtataggaaaggatggacaatggtgaatagactcaatatttgcaaagttggtaaagaatctgcaaatcacatcctaatccatcatgatagaacaagttgtggtctatgtcattagcattttttttttctctttttttgttgcagtgggtttttccaaattcagtgaaagatctattgggttggaaagtgtcagtgttggaaggtttggcaaatgactcccctttaattgttttggtgcatgtggagaactataatgattggatcttcaatgaggaagagcttcctgatcaaaataggagaagaaccctgttaagtccctcctggagtggtctaaagtcccattgggattgaggaactgacactcatagatttcttagatagcctaaattgtggacagttggtgtctagtttgctgttttgtgtgggtgattcagtttccattcctcttcttttggcatatctggtggaccccctgtgtacaatttcttgtcctcggtgtaactccactccaaacaatcctcagtgggtctagacacctccaccgacattggattgaatcctctgtgggagaataaccacattctccaactcccaatcatgaatgctcctattagaaaaaggactccactgacccctaccaccttgcaaactccaaatatcagctaccgtagcatccctgtacaaagaaatgctgagcaaagaggggcaggaatctactggtggtgaaacactacaccaaacaccaaaccaaatacttaattaatagctaatagaatatgtattaagtcttgatataatatcatttttgtggaatcagctttatggggctgaccttgttcaaaataattctttttagggctgtgctgatgctgtcttatgtttgaggtcagtcttgtctgaccttaggccagcattctgatcactagttcaaagtgtggtaaggcccatgtacacccatactttttttttcattcgactaccagtgccagaggtgttgaaagaactctagctaaataaactatggagtggaaatgatgagttcatattcctctgtggggcatgggacatataaatggtaagtaaaagccaggttcatctaggttttaggtcatctctctttcgagctcaattcaacagaccttaatatcagctattaagagttggctacatgaaacacttgcagtatgaactctattaagatccatatgtatcatccattaactacaggttttacagaccattatccctttttcctctctgttggtttattgtggaggctgaatattacttcgtattatggaatttgcaactttgtttagaatgatatagaggttgttatcctcctatattgttttcaaaaatatatttctacagtccattgggggttgttgatctagggtgagaaatgtagagttgggaacaggattgccttttaggaggatgacgtgggcagggattggttgcatcttatgttctttacttttattcttgattcaggaggggtttgtggttccattttcccccttttgggttagcaaggcctcttagataggctctctaccttggtctctcaccccctccccttcctccaaaaacaaaaaaacaaaacaagagaaagagagaaaacatgcttcattattcattctccacgtttttttaggggtttggattcttaggttctctcttggtgctcttaatggggtcacagatgttgtggactagttggaaggttaaaatgcattgctagaatgtcatcccttttaaagttatatgccttttgctatcttatgatccttatgaaaggagtggatgtaaattcattctagatagatggaattggaatgaggtggatggaagatataataaccaatattcttcctggatattactttaaagaatttggaattggaatggggtggacagaagagataataaccaatattctttctggatattactttaaagagcttccaggtgtgtttgacatttttgttcatacaatttagtacgctactctgtattattctttctcatgaagttgtctaaattacaaatatagtcaaagctttttttgttataacatttcttatattctttctaggtcatccttctaatttctatagtttaatgtttccatggcatcattaattagcaacactctattaatgagaatgaaaaagcaatgcaggaagaagaggctcaactaagctggggtaccaaaaatgggctgggctagggaagtcattctcctttatatagctgagtttgcttcaaagttcagtgtctcatgtcttattcagcatgaagcctttctaaataactgatgctcttctaagttgagcttcttctgtcttgaaatcaattttttataagaatctcctaccttgaaatctcaatgtgaatcttcgcactgtgataaaatttaagtttcatttaatttttgctgccactattggatgttgtttactattagcagcaaatttgtgcttcagttgtcttctactctttcataggttc

SEQ ID NO: 12326 - DNA, 901 bp, Vitis vinifera
  Intron number 1 from transcript GSVIVT01027006001 (locus G SVIVG01027006001) derived from phytozome v7.0 (chr-ID chr1 5; pos 18616021 to 18616921 reverse strand)
aggtcactccctttctctgtttaaatttatctgtaattcttatgttttgtttgattggtgggaaaatgaaagaaatcgaagggagttcgtgattctttatccttttcttaattattgagggaacccgcagaatagaatctggactgtgaactattttcatatcatgacgctcaaattgtgtcgttttcctgctcgatgaattttctcagccaccaaaaggaatggggtggttaatgttccatttggtggttaggaaaatgtaggaaaagaaaagagaagaaagtgaagttttgagtgtttgagttttcagtgattggagttggagaaactaaagtgatactctatttatttcttcggcatcagttgctttgaaggaaaacagtctaaagttctgtttggttgttgagaaaatgtaggaggcgaaataatttaacatctggaatcaattgttcacgagggcttggggaagctactacgatgatttggcttggttgagctgatttgttttaattcctccggaaatgaaagcaatggcaaaatttgttttctttgcttgtgtgtcttctcagcaaccaaacagtggattagggggatcttttccgagaaaagattttgtcacggtacaattaaatataggtgctaagagataatctttccctggctaacttaagacacccattcccaagctccaaagcttcagaataaaaaacgtctttccataaaaaaaacaacagagtcacattgagtataggcccctgctaatcttttcttcctggtgctcctttttgtttattttcagcaacattttcataagcacttagtagcttcctttccttttacaattttgcattgctgaatgtggataggttccaaagatcgaaaagattgttctgaactgtgg

SEQ ID NO: 12327 - DNA, 3133 bp, Vitis vinifera
  Intron number 3 from transcript GSVIVT01032450001 (locus G SVIVG01032450001) derived from phytozome v7.0 (chr-ID chr1 4; pos 27518970 to 27522102 reverse strand)
tacaagtaagcctttttgacttatttattgtttcaatttgttcttcaatccctttgttgattagaagataatataattcaatttttttttcatcagatataattggattttttatttatttttattttttacattgatgaagtaatttgaagtttgaaatcattgtgacacttaaaggggttgtttgagacacttgatcagtcgagataagaattggggcattcaagccaattttttgagcttgggtttcttgatttcaaataacctgttcaagcttagtgcatgtatgtttgccgaaattcagaacttttttttttttttttttttgtacttaacctagttttctctagtattcaccttgtgcaaagtttaagactcctttcactaccaatgaaaatcaacactacaaatgctttttgtttctttgtgaaactttaccaactttatgtcacttctctatttatctactaaaaagttttttctggttgattttttgtaatattttgtgtgaaccttgtcacacaatggcgttgtggtttggtttttattaattttatttgtttgaaaaaaatatttatttgtttttttttatgatttttattaattttatttgtttatttattttttatggagaattgattttttacttttgttttaaagttgttggaaaaacataacaagaaacaaaacctaattgactcccgggctacactagtaagcataggtttgaaatacattggtttctagtaaataagtggagactttcctaacaaaagtatgcattctatttttaataacataagacttgatggattacaaaaatataatacaataaaagattgagtttgaatacatggatgtcaaccttgagtaatggggcccttgaagcctagctcaagtggtaaagggatggagaaggtttgtgggaggttcctagttcaagtcccaatgtagacaaaaatttacctatcaaaaagaaaaaacttgagtaatgggactttaattatttcttattttaatattttacaaagatgaattcaaaaatttgtttaactaagataaatttcatcattaatttccaccaagcaattacaaaaaaaaaatttacgtcatacaaaataattgatttggaaatataactattgacaaattttatttatgaaaaattattatcatttgttcggttttgtattccaattgaatttaaaataatttattaagaaagagagttttattatacatatcaattcaaaatgtttttatccaagccaaattattactttttatttcatttcatttttatttatgcatattttttaaactaaaatgaaatttccaattaaacactagaagttgttaggaaaatagtctcataggctaaacaaagaaaaagaaagcaaaaaatgattctctttacttcaagctcaacctctctacaaaattagtcatagccaaagaatggtcctggtcctctatgtgcatcctaacccaacccaaaaatatggacatagaattagatttaactgtttggcctgactgctcagcatcattaaatgccctcctatttttttctttccatagagttcaaaacaaacacaagagagtagaaaaggaagcaaatttcaatttctccttttgagaaggagctctaaaagccggaatgctcaatcaactatatttactcttttggaaaagttagaagaggtgagaagaataattgggaaatagttgttgctgactaatgaagttaaagatcctttcttggaatgtgagaagggccaatgatagggagaaaaggaagttaattaagtctataatcatgtctcataaagtggaccttgtttcccttaaagaaactaaggtgcaagagatgtctattaagatgattaggagcttgggtgtgggaatatttttggaatgggaagtagtggaagctagaggtttaatcggagatattttggttttctaggacaatagggtggtggatttgttgttggatatggaagtaggagtgttctccgtctcatgttgcttcaaacattatgaagatggctttgtttggatgtttggaggtttcaaaatgtgttttcttttcaatttgacattttactaattaaacaatttttaaaagaaaattgaaggacgacatgatattatgtgcttctattttatttttatttgtcgttattttatcatttgaataagaactttctatacttttgtgaaataaattcaatgaaataaaatagaaataaaaatgatcattttttatatatcatataaaatgtaagattattgaaattgaaaacaaaatgattacaacaatatttgaataatgatattaaaatgaaagtgtaaatattaaaagtgtgctgaatcaatggcaaaagaaagaaatcaaattaattaaagtgtaaattgatgataaaaataaaaataaaatataaaaattaatgttaaaactaaaattaagaagcaaaataaatttaaactaaaaataatggcaacgagtcaaatgaaagaaaataatatgccaaaacattcaagcccctcaaaacacatgtgtgagtggatgtgtatcattttgctcaggacaaaattggaggtctacaatttgttactcaaactgcatggtctgaagtattcatgagcctacttgaactcagcttggtgttgctcaaggtcaagttgggcttgttgataagtgaatgtggtaggggttcttaatgagctgaacttgattagctgcactgctgtttgggggatgatatgtattaaccagatggtgaggaaaggtgcaatagttgttaagtagtgttggatgtgcaagtgggatgaagaaatagcaaatcatcttcttgtccaataagttgcaggatcttaacggccctttctttgtactagaaaatactgctgtgtcattttggactaccatgcattgcagcgttggttagtttgcttttacctgacctagaaagaaagataagaagtttttactgatagcactacactactctgaaattgaatgttttaggattagatctattctttaaaattattaggtgcttataagaatgcttgccatttacaggagtgtgaacaatacttgttggcttccttttccacagaactg

SEQ ID NO: 12328 - DNA, 12636 bp, Vitis vinifera
  Intron number 3 from transcript GSVIVT01001156001 (locus G SVIVG01001156001) derived from phytozome v7.0 (chr-ID chr7 ; pos 1207671 to 1220306)
aacctgctagaagatatcagtgataagatgtaagaggaacactaacatctttttctagcagctgtctccagacatggatgtgctctgattagatctttatttgcctatcatattaccaaaatttcatttaccattgctacaagccaaagaggctaaagaaagagtatacacggagtatactaggatacgcaagtgcaaaagacaaaaaggcaaacaagtctaacccttacttgatagctaaccagtctacaaaatctatcaaagagaaagtgtgtttctctatatacaccctagcccaattcacaaaagtgtagaaaaaaaaggatttaatttcttggtcgctcctctcaacatcattgaaggccctcctattcctttctttccaaatggtccacaatcaagcagaggggggcagctctccaagctttctcccttttcttgcccacaaaggaaccatgccatcccaagaggttccttctcacaaaggagtgcatcgcccattacaccccaaaaaggaagaagatcagaagccataatattctgaccttctcacaaaacaaaagatgatctgtggtttcctcctcatttttacatagatagcatctgttggggatgctccatccaaatctcttcaggcggtcaatggtgagtagcctgctccaagccgtctctcaaccaaagaagctagccctaattggaacctaaggcgtccaaataattctagccgggaagggaggtctaatgccccttgagagtgagctataaaaagacttgactgaaaaggtcctattcttgttctctctccgtcggagcaagtcatccacacctcttctaatagtcaaaggatgaagcttgcttgacaagctttcaacttcccccacctcccaatcatttaggtgtctattgaaatgaagcccctacctaccccaactccgtcctcctcccaagcctcagcaacctagccttctttgttgacggttagattaaacaagatggggaaaacatcttccagagattgattttcacaccacaagtctttccaaaacttcactctagtgccatcccctacgatgaagcgggagtgagttcgaaagttctcccaaccatttctaatggccttccaaacccccaccctataacggtttcttacacctttggagcaccatcccccctcttgaaggtcgtactttctagagataatttgcttccatagggactcattctcgttagcaaatctctactgccacttcccaagtagggccttgttaaggataacttaactgcgaatgcccagacctccatcctttttagcagcacaaataaccttccaactcaccaagtgaggtctattctctaaggcgcctccgtcccataagaaatccctttggattttttcaagccttacacacactctctttggaatcacaaagagagagaaagtaggttgggaggctagagagggtgctttttaacaaggtaagccggccacctttggagaggtattgccttttccaaagagacaaccttttcctgaatctttcttccactacatcccacaccctagtggatttgtaaggggccccaaggggaagacccaagtagaaggtaggtaaactaccaatcttacatcccaagaccgaggcaagagtctccataggaaagccttaccccactgggatggcctcagttttgctcagattaacttttaatcctgaaatcgcctcaaaccacatgaaaatccagctaagatattgtaactgttctgcatcggcgtcacagaaaatcaaggtgtcatcggcaaacaagagatgggacacgatcaacccctctcttcctcttcctcccactttgaaattggaaataaagcccccatttcttgcacttgacaacagctaactaagagcttccatggcaaaaaggaaaagatagagggaaagagggtctttatgtctcaatcccctagagctacgaaagaagcccgaagggctcccattgatgaggatcgagaaggaagccgtagagcagcaccattttcatccaattaatccatctatgcccaaattgcatcttagacacatccataagaaagtcccaatttacatggtcaaaagccttctcaatatccatcttaagaaggaggcccgacgtgttgtctttcaatctagaatcaagggccttgatagcaattagaacaacgtctagaatttgtctcccttggacgaaagcttgttgaaaatcagaaatcacctcccccatcattaatttcagcctattagcaagggctttggcaagcaatttgtacacactccctaccaagctgattggtctgaaattgcttagctcttcggctccctcttttttaggaatgagcacaaggaacgtggaatttaagcttctctggaaggttccatggaggtagaactccctaaagagtcccaaagtctctgatttaacaacgtcccaacaaaacaaccaaaaagccattgtgaagcggtccgggcctagggctttgtcaccgtaacagctgctcaaggctgcaaaaatttcttcctcaaaaaacataacttctaggctactggccaagcctttccctagctccttgaagttaaggccattaatactaggcctccaatcccctgattctgagaggagggactggtaggctctgcaaacttcttctttgatttcatcaatagaagagagagagacctcattcactctaattttagacaacaagttcctccttgccttagcattgaccattttgtggaagtacttggtatttttattaccttctcttaaccagatctctcttgacttttgtctccaagaagtttcttctagaagagcccatttctatagtccttaagagccagttttttagcctccgcttctctaggagtaagagagttctcattctccttggcctcccaaagctgtaggcaggagaaggcctctgctctattgaaagagacattgcctaccacctctttgttccaattcttcaaatccttctttagcgctttgagtttcttagcaatgcagtggctgctatagccttcaacaaaataaccattccaccagcttcttactaggtatttgaagccatctgttagatagtgtatagttatttaggttatttacttttccttttccttttctttccttattgtattgtgggtcccactaacatgtatatatatacccaagtccaatgtgtattctatagtttttcaataacaataattagggattttcccttttctctctctctcttcacatggtattagagccaagggagaaaaaaaccctaattattttcggtttatccgtgaatccattctgggaaatctttcagtgaccgtgtttcattccggtcactcttcccatctcctaaaactttccgatcaaccgtatcaccgtcagaaaaccctcaccgctggcgacatccttttccgacaccgaccataccatcaggtgcgcaaggaggagatcttcaagttttctcgaagcaccggagggagaatctcagccatgcgccggccaagcgcgtttcttctttggcagcctaaatctcacgcgccggcgcgtgagggagtgtggagcattttccggtcacgtgcttccacctctaacctcgcctaacgccgtctagccactctccatctgtgcttgtgtcatctgagccctgaaagtgcattttttgggggtttttttgtctccgccggccctctaaacaaccttttcggcgaccttcggtgacttcctcttcacctcgagccctgcacgtgtcttaggaagtccgcgataggccgtattagggctctcttcgatccaaacgtatttcgttcaccagataagtaaatatggctactaaaagttccactttttcctttgttatatctggatctcctatgattacttcggagaaattgattggcagtgaaaattatttgtcctggtctgcctctgtggagctttggtttatgggtcaaggttgtgaggatcaccttgttacgtaggaggcagatatccctgaggttgacagagtacaatggaggaagatagatgcacagttatgtagtgtgttatggcaatcagttgattctaagattctgcttcatcttcgggcctacaaaacatgctttaaattttggaatcaggcgaaagggctatacacgaatgatatccaacgtctttataaggtggcttcttctattgtcaatgtcagacaacaagacatgaatttatctacttatattggccagattgcctctcttaaggaggaatacttgaccgtgatgcctcttactactgatgttggggatcaacgaatacagattgacaagttcttcatggttcttactcttattggcctccgtccagatctcgagaccgtttgcgatcagattcttggcagttccttcgttccatccttggatgatgtgtttgctcgcctcctccgtatttcctccactcaaactttgccatctgataacacttcagattcttctgtgttagtttctcaaactagctctcgaggaggacgcagtggtaaccgaggtagaggtcaacgtcctcattgcacttattgcaataagcttggcgacactcatgatcggtgttattagttacatgggcggcctccccgcactgcccacgtggcccagtcatctgatcctcagtcgcctcagcctcccagttcctccacatctcagggtatttccctcactgacagtgagtatgatgactatctccgttatcaggccatcaagtcagcttctattgcttctgttgcccagactggtaatgcttctgcttcacatatctggtaataaggattttttctcttctattactactacctttgccttacctactgttactttagctaatggttcccaaactatggctaaaggttttggtttcgcttatcctctcccttccttacctctccattctgtcctttatgcccccgagtgtccttttaatcttatttccaccagcaaaagaattcgcactcttaactgttctatcattttttctgataaatttgtgaccttgcaagaccggagtacggggaagacgattggcataggacgtgagtctcaaggcctctatcatcttatcgcgccttcaactcctacagtttgcatttccactgatgctcccctcctcatccacagtcgcctgggccaccctagtctatccaagtttcagaaaatggtccctagtttttcatctttgtcgtcacttgcgtgtgagtcctgtcagcttgggaaacatactcgtgtctcgttcccaaagcgtttgaataattgggcaaagtctccttttgaacttgtccacactgatgtttggggtccttgtcggactgcgtctactttaggatttcagtattttgtcactttcattgatgactattttcgatgtacttggttatttttaatgaaaaatcgagctgagttattctctatttttcagaaattttatgctgaaatccaaacccagttcaatatttctattcgtgtgttgcgcagtgacaatgccagagaatatttttctacaccatttacttcatttatgtcccaacatgggatcattcatcagtcttcttgtgctcatactcctcaacaaaatggggtagctgaatgtaagaatcgacatcttgttgagacagctcgtgctctccttctccatagtcatgttccttttcgtttttggggggacgctgttcttatagcatgttatttgattaatcgtatgccctcatctgtattacacgatcagattcctcattcccttcttttcatgaccaaccactttatttccttcctcctcgtgtttttggttgtacttgctttgttcatattctcactcctagacaggacaaactttctgccaaagccacaaaatgcatcttcttggaatattctagacttcaaaagggttatcgttgttattcctctgagactcatcgctactttctctccgctgatgtcactttctttgaggactcaccgttcttctccacctctgagtctcttcctgtttctgaagtcttaccccttcccattatctccctacctgatgcagtgccttctcgcccactttaggtttatcatcgcagtcatcgtgtcgttgttcctccttctttggccgaggtacctgctgactcacttcctatccctttagcttctcttgccccggctctgcctccttctgttgagttacccattgctcttcggaaaggtaatcgatctactcgtaatcctcatcccatttacaattttttgagttaccatcgattatcttcaccctattctgcatttgtttctgctatatcttctgtttctcttcccaagagcacccctgaggctctttctcatccaggctggccacaggcaatggtagatgaaatgactgctttacactccaatgacacttgggatcttgttgttttaccctttggtaaatttacagttggttgtcgttgggtctacacagttaaggttggccctgatggtcaggttgatcgtcttaagacccgcttagttgctaaaggctatacttaggtttatggttctgattatggtgacactttctctcatgttgcaaagatagcttctgttcgtctattgctctccatggctgctatgcgttcttgacctctttatcagttagatattaaaaatgttttccttcatggggatcttgctgaggaagtttatatggagcaaccacctggttttgttgcttagggggagtctggtttagtgtgtaggttacaccgttctctatatggcttgaaacaatctcctcgagcatggtttagccgttttagttctgttgtttaggagtttggcatgttccgcagtacagcagaccattccattttcaatcatcataactctttggggcagtgtatttatctggtagtttatgtggacgacatcgtcattacaggcagtgatcagaatggtattcagaaactaaagcaataccttttcacccactttcagactaaagacttggggaaactcaagtatttcttagggattgagatagttcaatccagttccggtgtggttctttcccaaaggaagtatgctttagacatcttggaagaaaccggtatgttagactgtaaaccggtagacactcctatggatccaaatgtcaaacttataccaggacaggggaagcctttaggagatcctgggagatgtcggcaacttgtaggtaaactgaactacctcaccattactcgtccagacatttcttttcctgtaagtgttgttagccaattcctacagtcaccatgtgatagccattaggatgctgtaatccgcattcttcgatatatcaaaagcacaccaggccaaggtgtgttgtacgagaacagaggtcatacccaagttgttgtttacacagatgcagattgggctggctcacccatagatagacgttccactttcgggtattgtgtttttattggaggtaacctaatatcttggaagagtaagaaacaagatgtagtggccagatctagtgctgaagccgagtatcgagctatggctctggcaacatgtgaactcatatggcttaaacatctttttcaggagttgagatttggaaaggatgaacagatgaagctcatctgtgacaaccaagccgctttgcatattgcatccaatccagtcttccatgaaaggaccaaacacattgaagttaactgttacttcattagaaagaagatcgcatcaggatgtgtggcgactagttttgtcaattcaaatgatcaattagcagatagttttactaaatctctcagaggtcctagaattaaatacatttgtaacaagcttggtgcatataacatatatgctccaccttgagggggagtgttagataatatatagttatttaggttatttactttttcttttccttttctttccttattgtattgtgggtcccactaacatgtatatatatacccaagtccaatgtgtattctatagtttttcaataacaataattagggattctcccttttctctctctctcttcacaccatcaattttcagccacatattttcaaaacggaaggggtttttgcctgaagagaagcctccagcttctaagactatgggattgtgataaaaaaccagacagggaagagcagattgtgtgatggcagaaaagttgtcctcccattggtccgaaatcaggaagcagtccaatctaaaggcagcttgagaatttaaaccccctatccaagtgaaaggacctccagccaagggaaaatccctcagctccaattccctaatcacctctgaaaatctcctcatttcagctatgagtctaggggcattccttctttcctctgggaatcttacagcgttaaagtcccctctgatgcaccaagggttctcccaaaggccacagatgactcctagctcctcccaaaaatcttccttctcgctaccaatcactggcccgtacactccaaagaaaatccaagagaagccatcaacacagtttataaaatgaacagaaatggagtaccccctgctttctacctcccacacttttaaccatttgtagagacatttctttcaccttcgtctccaaaaggcaaaccaaatctggtttctgattcctcaccacacccttgatcaactttcttttctcaatatcattaagccctcgaacattccaacataggattttaattctcattaatcaactggaatcaattcccaggagcattgactggattttttagttatccctgatgtccccccatagctaactgagcgttccaatctttttaactctctttcgaaacgggtagtgcaagattttttcttcttccgtctcttgcaaagggtgctacttccagtcctcaacttcagtttcttaagcaaggccaaaatttcgacttcatgcccttcgacaggcattcccaagactttactaaagtgaaatagttttgaaagctcctcttccgatcatccttctttgcaaggaggaacaaaagatagatctctctgcttcgccacatctttttccagattaggattcggggcttcagtgaaaaccactgtcgacccatctctgagcatcatggacaagggattcggcgaagctttcgcctcccttggcttcgattccacaagaccagagaaggatcccctttccctctcaaaccctgtatcccagaatggagtagaagaagaagataactcctttctcgaggagatcaaaggtaaagaaagcttaccttgagaattgtgggcttcaacagaaggggagggggagtctcggctacaggcggcgacgcttccatctgaggggtcccaacagtggcaagagttggtgcggggattcctttcctcagacacggcgagcaactaaggcttccttgccctaagtcgctggaaggagcaaagacaatgggcttaaaggggttccccagtttggtggaaacgtgggccttccccagcttaggcccggaggttttaacataggccaaggccttagcatccagacgctagcccatctccacttcgcaggcttgggaaaggaaaacagctacaacgatcttgtccgaggcaggggcaccactccccaagaccagtgggggcagcttttcaggctgcagagaggttgaggaagagggcaaggtgcccacactcccctcagcgcgtgaaggggccacctagtcttccttgagcttccttgcaccgagctcgtgggaggggagcacagtggagatgcagggctcttcttcccaccagagttgcagagtgaaacaagagggaccaactaccacctgcagcgagcttggatgttgccaatctctggtttcgacgaggactctggcccacttgagaatccagcgcttggctatgttttcatccacagccatgaatctcccacaagagtctccaaacctcttgaagaggcttcttccccaaaaatgcagagggaggcccaaaattttgacccacacaaggcgcgctccccctccatctccctcaagacatccaacggatggtttccatttttctaggcagaagcttctcacccctgatttagacaccctctctgcttcatctgcaaattcaaactccagaagcaaaagattttctcttacgtttgacagccaaaggttcccttttaaaaaccaagagttttttgcccacgacccgaaggaaacaaggtcagggaggcggccagagtctccctcccatatgcccacaagagacctacccagcagctcctcatttttatcgattatttcttttttaatttctagccagatggcatcacgaggcgcggagcaatcccgaagagttgatgtgtctctgtccagttgaatattttttttctcacttctgctaggcgaagcttgagatggcatggagttttccgacagagctcctttccattgaaggggagagactcccaaacttctcagtttgctagcgaggattttccagcctccaacaagccctcttccttcaggaaaatccaaggagaatcttttgttctccgcaactcttacaacacaaaacaagaatctccctgctctattactacggagttccaaactgtagtctctatctccttccgaccaaaacttcctgaaaagaactctctcctttagcccacaacatgacttaaccccttctagcagcagagacaaccctttccctctgaatctgatccatgaagagaacttgggacctctttcacagatcttcccacgcacttttcctttgaactcctctatgccaatctcaaacgtcttcaactcaacaccaaaccaacacttacccccaggggaagatattgacatctcaattctccagttttattcacactccaaataagctaataggtcctccccaaatcatattctacttcattgcaccaaagcaaggattctttggcatctcttattctctttattcgaagtagtttggatgatccctttttccgtgaaagataacatgttaagttggcatggttccttggcatacgacattaagagggttgagagagagagagagagagagttagggttcagggggagaaacaaagggtttttcttgactttggtccaagggttaccattgctacattgctaagaacataaaagttacgaagtctgttccaagaatcatactatcttattagaattaatgtgtatatatatttttttataaccttcatatggctttcttgaatattttggtttcaccttgactgtagaaaatggggtttgtttcctcacatagccatccttgcttaagcagcccatttgaagtggcaatatcatttttattttatttttaaaatttttaaaattttttgtggtttttatgtttaatgttagtatccatatgaatcttttacagtggtggttatttatcctcttgttctcatcctaaagtttgcattaaaagaagtttaatgagctacatatctgacatgttatactagagttgtgaagtcacaactgccgcatgctgcagaacttgtaaagttctgtataagtttgttgccctgctgcattgatatggaactctactatagatatccctattaatttctagtactttatagagaatatagggtgtctttttggttggagcctgatgactatttaactttagcacctaatttataggtgccttatctttggaaattcgaccaaggaaatctacacttgaaggtgtgctcaaattgctcttttcctaggaaagtctatagccagaattgttttggttggtttattactaatcatgtcactcatttgaatttatcactggaagcattttaaaagcagccattgttctggctgcggttccttatctctttaatttctctctctatttttctgctagcttggattatggtatagaggtccacaggcatgacaatttagtgccaggctatatgattccttaaaaatgagtttagacagtagaaaagaactttgaacaatatcactattttttgtttgaggattatatgggtgtcttattccacttttctctccatagtgcgtttactttgtgctcttttcttgttttctatgacagtagacccatttttaacaaagtggaggaataattgatagagaatgtggttgacttatgcttcagttgcagcacatccaaaattgtcaccaagcacatattaaggcttaaaattaaaattgttcaattcccgctgcaaactctactaaaatttgtagatttgtgaagcatgaactaatgctgtagtgcttggccctctctcttccaagttacagtttagttagttcatgttgattggcatgctgacctcaacaatggcttcttaatagtgctctttgtgattcttgaatccattttgtcatttttgaaatgcgagttttaaaaattactctcttcaccaaggcagaataacaattattagcatggccggttatcatatagacttagcgtgttgttgttgttggttttttttttttttttctttttcttttttgtggatatttttgctctcagctttgattgctaagatgggccttcttctgcagagataaggcttattttgtggacctttttgtgagag

SEQ ID NO: 12329 - DNA, 3028 bp, Vitis vinifera
  Intron number 2 from transcript GSVIVT01010051001 (locus G SVIVG01010051001) derived from phytozome v7.0 (chr-ID chr1 8; pos 13848536 to 13851563)
cattggaagattttgaatcataccctgctttattggtgagtcccattccttcagttttttccactttgcattttatgaatttgcacttctattttgaatgttatcggttggaatttgtgtaaggagaggttaggaaatgttttggtgaatttgtcaaatgaaggttattggctttgttgtagatgagggaaaaacattagtctggaacagacttgtgagaaacattgtttcacagaggtgggtaattacagtgaaagcagatatggaaatggtgagatgaagttggttccaaggcctggagaagcataaacctagaaggggagagaaaggggctagacttaattgaatgatgagaccccgcagacagtaaagattctaggtggagaagtatatatctgaagccatattgagtaacatgagcatggtttgtgctagacaagtttactttggttgactaatttgttcagtatgatcttgaagattaaacaatgccagatgtgtagagaagtgtatagcacacataatatgatagaggaggttcaaaaggctgtaaaaattgaattggatttcaatgtcataaaatgaaaattgtgtgaggttgaagtagtgtatagtacgcacaacaagagcagaggaggttcctaaacccatacaaattgatttggatttcggtgtcatcttatgaaagttgtgtgaggttaaagaaaaaatttatcaagaaactagatttaaaataccagttggatttgttcatgtacatttactttgaagggtccattttaatcatatagttgtgctaggttaatgcatcatttgactttttaatatggcttgcatcttttcattacttggaaaaagcatgttatacattttcttgagtattggttttgtgacttttatggaagaaagagttcttgtgagatgtcttctgccataataataggtagcttttagtcatgcaaatgctaaatatattttaacaggaactgtttgggattttatttttcttttttaagctgtctgatatttgtagttccttgagaacttgatcagtgtacgaagaaataagcagtttaaaaatgttttgacataaatgagaatattgattcagaatatgattactcgtgcttattttgtgcagtcatcaagcaacagacaatgtcattcaggtccaaaactagctgggtgtataagattcacattgttgtcttactttattcttctaggccatatagtactgctgaaccataaaataaaataaaaaaggaaaaaagtgcagctaaagatgtgggtttggttaaattcggagaataagatgcacattgttggctcaatgtgggtttgggtggattggaagaataagattcacattgtttactcaaataatttggaaagaaaattttggcttggctggttttttcttcatgaagaaaataatagaattagattgataatctatgaaaaatctctaaattatagttgaaatattatagggccattatttccaattaaatctttcctaaattgtggcaattcatgttcatgtttggagaaacagtggtccaatatttgttgttcctgtggattatcaattttggagggagattgctactttatcttctaggatatggaggcagattttctttgggcttcgagggctaccaattatgaggcagatccatgtatttatgctatttagaggggcatttctaccattgttgaggcgtttctggttgagactggcttttattcttagttttgttgctctttggtttccatcttttttgaaatttgtgtgagcatgcttattaactaggtgaaccgaatatgaaatatgaaatatgggtaattatgctacttgaagtcttagagtggtagttttaattgttgtggtccctatttattttctttgtttattttctatttttgtacttgaaaatgaacacatctaataggtatgctgcatttgctttttcctttaatgatttacaattagcaaatgactttccactcaaacctgctagtatttaagccaagccataaattgctattcaagcactctgggtaagaagtaatgcctctagtcaatcttaggcagagctggaacctgatgcaagtcctactgaacaaagtctgaaaacattaatattggttttaagcttgtctctgcttgtttgcattgcaaccatgtaacttaatccaataaattttgactcaaataaacagtatagttgaaccttattgaagaatggatttctaaataatcaaaattaacagaatacacttgagcaacctaaaatattcatctttcttcacatgctctgaaaaaacatctataccaatgccagggggattgatttatttaaagctaaccatttctgatgttgtaaaatcatcactttagttaagggggttgagtgtcgatttccaatgcttgggtttattatctcaagtcaaagaaaacactggtgtagatttttgggatttcctatgggccctaattttgttcaacaaagaaaaagaattaaaaaatgtagactttactgacttatcataattgaaagagttaattctcgagtctgttgatttaatcttcattttatttgaatatttttactggagatataaatgaagatgtcaaattgaaatgtcttgcacaggactaagaatcatcagattctgtgatccaaatttaggtttccatgcttggatatggcatgcatgcacatggctttattcagaaatatgctagtatgtcaactctctcttgacgagttgtttcacatcgttgcactttattacgttaaaagttaaacttgcaaactgcaacacattatagtctagggacttggattcagtggcttggcttgtcaggctgtaggccatgatattgcaataatgacccctcctatgtaggatccttcttcaacttagtttctccattaaggtgggaaatcctctttgtttcgtatctctctttctctataaccattacaggaggtgttttaatgatgtgacaatgcaggtt

SEQ ID NO: 12330 - DNA, 6799 bp, Vitis vinifera
  Intron number 1 from transcript GSVIVT01019573001 (locus G SVIVG01019573001) derived from phytozome v7.0 (chr-ID chr2 ; pos 1691302 to 1698100 reverse strand)
acacttctctacaatcttgttcttcttgtagtaaggtagcaaaagggtggcaaacctagtgcggacccacatttttcatgtgcatccccactcatcggcgagactcgttttttaatatgaaaaactgtattttatgaaaaactggagtcgccacttatttttaattttttatagggaaaataaaatgagaaactaaaaccttaagaaaaatgactccttgaattttggaaaaacatatctttgaaaaaaccgaatttagatcatgggatcaagttacctatcaggaagttatctcaaagaggtaacacctctctaagccctaaaaaggtgtctattagttaagttgaggaaagtataacaattagttggttgattgaggatacctaggtaagttaaagtgattttaaaactctattatgccaaacaaaaaagtcaaatcgtaatcataaagaagagttagggtgcacacatggattgtttcttaagcactatcatgagacatcaaagttagtccaagcaacaagatatataacatacaacatgcattctattgtattcaagaaaccaaacactagtcaaagcaattcaaaacacaatcaaacatgagggtattttacacaaaaaatatatctatttatagaactaaaaggataaaaaatgggaaaggcgtacctggacaacatgcataatttataaggtgctttcaaaaatgctagcgtgggttagaacaagtataatgacaaataataatgatagtgtatcctaatacacattgtacatgcataattcaaatgaaatggtatgagtctaaagaaacaacaactatcacataggacattgtggaaccatatttttcacgtgtgtccccacttaatggcaagactcatttttattagtgaaaaattagttttggaaaagttggagtcatcacttattttattttacaagggaaaataaaacaaaaaagaaaactgtaaaaacgtgactccatagttttagaaaagtaagtcttaaaaaacccgagtcttggtccgaggatcaagctacctattggaaaggtacctctaagaggtaacaccccaataagccctaaactctgtctttaatgactaagttgaggggaatgtaacaattaattaattgattgaagatacctaggtggactaaggtaattttagaattaacatactaagtcagaaggtcaaatcatgatcataaaagagagtcaaagggtgtgtacctgagttgcattttaagcgttatcacaaaacatcaaagtcggttcaaatagtatatcacccaacatgcgtttcatcagaaataatcgaacaatgaaacaaatatcaagacacccaagtactatcaaacatatatatagtttacaatggcaagcatattcacagaatttagaaggtgggtgatagagagtgtacctggtagcaagctaagcaattcatggagaaaaaaaaaaaaaaaaaaagcttgacaataggtataaagcatactcatgtatatcacatataagaatcaaaattaatcaaatatcaagcaatcatcgcatttaaatcaatataaaaaaaatgtcaagaatgtcgggcccccaccaaggcccaattcgattttagatgaattgattctatgaattccattatttggaatcttgaagtgtattcatgcttgttgaaaatcgagataatcaagaaaatagttgaagatagtgaaaatgcatgccgaaaggaagatggcaacaaaaagtttgttaaaaataaagattttagtgcctaacaagtctaaggatggagtttaaaaagatagaaatgtttagttgaaaaatgatttgaaaattctattcaaaacagtagattcccaaatcaaagaagcaaacagaggaggtgtaccaaggtggccaagctggattagtgtccgggctgcttttgaaactgaattgctagggttgccagaggatgcttctgtagattgctgaaatggaattctgcatactgacgtcagttgtcactgtcagcaaactcaattcactcaaaacaactgtggagaaatgaattttactgccatctcttcctaaagtttctgttttcatgctactgccatcacaacccaagccagaacttggtgcactccaactgatgtcttccaatatttcttctaattcaggttcagagagtgatgagaagtcatttggatttaccacattggaggaagtagaaccattgtcatcattctaacggtgcctcataatggcagaagagagaaaatgctggcggaaaagcaatttcaacttatcatctgatctggaaatgtgtataagcaatttctcttatattaacatctgagttctgcttctgtcgtcaacctgctcacaaacaattttcttcaactgagtgcttgtgtctttattgatcttcagatgttcagtttcccgaataacttctcattcttcaggcgtatcaaattgcccagactcagaaattaaccctcagtcaataggattcagcaacttcttcgcgtgtgtgaaggcaaaggggcagtaagctagaggctttctgatggatcctacatttctggactttcgagagtggcttcctagaagataccaaactccaccatcctcttgtttctcctttgctatttagatttgctcagacatttcctgctctccctgattccgcaaatttaaatttctgagcatttggagcatgaatcgtgaccttcaaaacccttatcatgacaaagatcaccatccccattgttacctctttcactgcatatctcatttaataattggtgtcgacgtcctccccaaactggataagattcggtctgaaacctggaagcagcttcctctttagacgactattctagacgaactgtatgaaggatgattgccagcttgagaagaagacttccaactgtttagatagatgatcaacatgggtatttaaccttctcagttcaggcttttttcttgataatatttatgtatccatgttggacccatatcagtattgcattttcatgcattgccaaactgtgattttcccatcagtggcttatcatcatggaagtcagagcaaacgatttgatgtcaagattacgcaacctgttggtttctatcagatgaaggctatcatcgtgaggctcttttatcacattttgcactctagacaacaaatcctgactttcaggaggttgtttttttcaaactttaaggtaatgttacaataagtagttctggctccgcattggctgatttcatgccttacttgggttggttgaggacgtgaacccatggactgattgtttggtatagcttgtgtattgattcccgggagttgagcatctttttacatgactccgcattctcgaacctctaaatatctgtccctttccttagcataaatttttcagattccatgtacccatctaactcctatatattctgtaggaaagcatctatcactaccatagttggtatacgtattctccaagctggtaaacttagtggtaaggtgcacaagctctttgaagatggttgacccagaccttctcgtccccatgttgatctgtattcatcataatctaattcaccccttgcttcgtgttagcacatatactgtaaactcattgaagctagtgattgttgtcagggttgaactgtactagctcatcttatatcagaagctttgggtgggagtggccggcgtgattcaccttggaccaagtcatcttcatcatttgcccagcagctgtgagctttgagaatagcacacccaaaggtggccatgcactttcatgtggaagtgggactcggggggaagacaggcgtgtgtacttcttcgtcttggacacagagtctcctcgcgaataggctcaataccttaggacacaacacaatcacactaaacctagaatgacttacagtccagctttcttacttgtgcccgccaattctccgtgttttgatgaaatcaggctttattttagagcattcacccaactcccagcttctaagtagacctcaactcctggtgtccacaaatttcaaagtagacattgatccgcatgtgatcatggtgatgtgagatctaggtgagaaaaaactgcatctggaggagtattctgccgagatgttgacaatgggtctgagctgggcacagacttccatggctccacgcacaggatcagagagggaaagttactgatgaggtcttgattaaggggaacaccattattcactatcatcaatgcctgtttccttttcgtgaaaaacgatctcactctaaacttcaatttctcattctgaatttgcatcaacaacagaaggctgagtggcttccattaaaaaaaaaaaaatcaaggccagttgtgacagccgtttgatcaattaaatcatcaacccctggcattggagctatctttagatgcttttgtacagaagttgggggttctgttgtgggctgtcttctagctctacaagagatgctaacagcggtgagaatgctgaaaggttgtttcttggtaatacatgcagtgtaggatattcaaactcaaaagattgcgatggtccgacatatcggggatggtggcgatctcataatggattcatcataggtttaagaggcaaaggacggcttggtcggctatggcaatgtttccacgcattctttgacaaaattgtaaggcctcctcgctgcaaccattttgagtatgtcctaaaattgaaatttcaaatatgctttgtcccctgtagcagttcctgaaccattcggaagaccataatgaatcaaaccattcccaataacatcattaggataactcacctttgccatacccgtgttcatgctttcctgcggattaattttcaactccatgcctcttggcactttcatctggtaacagcattcgcattcttttcatcaatctcttaagaacaaaggagcgattggaatcgactcatcatcgatagggtcttctccatcaccaagttttctttcaaatcacccattgggagcaggtttctgaaaggtattcagtgaattacttcactagcattgtgattagagactagctcctattaggggaatataggcgaactccaactgattcctcgtactgtgaacatgcagaacatatagacatctcatgatcctccgagcatactgcttagaacaaatgcttatatcctacatcttgatgacccactggttagtttgcatcattaggctccaaataaaactgcaaatatgtagcagctcccttgcagagtacaaataactctccactagacttacaaatctttagcagtaaattgaaacacgcagcctctttcctcgggcataccaaagcacaaacgagacattcagagcaaaccccaaagatgtgacccagaaacaaagacaaggattgagataccaaatacagagatgaacgaccccaaatagagtacgttcaaaatgacaaacaaacaaacaaaagactcaatatgtgggaacccatttcatgctgaaatcaaagggcttcatggtcggtggcatgactcgaaccatatccaaatatctttgagtgaatgccaagagaaggtaacaaagaaaacagagcaataatatacccaagtaacaaatgaaagccaaaaacgaccagataaatgcatgaagactgatataataagaaagatgaataggaaatccacaatgctaatacctggaagtctcttccccgtgcaagatgtgctcgtcttcaagcactcatctttcctcggccaccagccaaagccccctgtgtctccctctgcagcacgtccagatggccctattccagttttatgtgttgtggagatgctcatccctttcctttttcctctcgtttccctcctgcccaagcctttttatcaccaaaaaccaagaacccctctgatctcttcccctcctctcctcatggtgtctgatattattctttatgatcatgcctgctatagcagagtggaggccttcctttttcatggcacgactgcctttttttgtggagactctaaaggtctcctctagatggtcccaaatctacccgtttccaaaactgtctatgcttcttgtgttttcccatatatatatatagcatgtggaacctttcctttccaaaaataattcgtgaatcttccaaaaaaaaattgcgttcataaaactagatctcttagttgttttaatagttttcacttgtttttaccaacggttttaaaaaataatcatacaaatatgaaaattaattaaaaataaaataatatatataaatgttgtttttaaaacatatttaaaaaatatagaaagtaggttaaaaacatttaagattctcaaaagggtttttgttttacaaaccatcaaataaatttttaaaaactagttttcataactgttttcaaaaacacttttcacacaatgctgaaaaataaagtattctactaatccacagtagataatccagcagaactcttcccttcttttaatattatctagaattaaaataaccaacaagcttacttcagcaccccatttggtttgcttctcaaaattgcagtctgcaacacggtgtgccattgctaaaacttctttggaattgattgacttgttcactagatgatcctggttcagttctggggtttctaatggcccaccaaagaagactccacgccagtgggtgatttgatctaaaataagcctcgggacacctctccgtaaccatattcttcctacagtaaggcagccagtgggtggcaaacctagcagcctcc

SEQ ID NO: 12331 - DNA, 12157 bp, Vitis vinifera
  Intron number 24 from transcript GSVIVT01009194001 (locus GSVIVG01009194001) derived from phytozome v7.0 (chr-ID chr 18; pos 5992683 to 6004839)
gggggttgtcacatatttgtcaatcttcttcagaggtatgtgttcagtaggaaaatttcaataatgcatgaacaaacgtgataatgaacagttttgtacatttctgagagagggaatatttctttccattgtctaggaagttgtttctgattctacattagagatctttttttaacttcctaaatattttacttgagccttaccatgtaattactttttttactgctcttcctacaaggagttttatcacccagacaacatgttgcaaagttaaaacaccttacgcttgaccgatgaaatctttgttgaagatcatatcattctttttgatgagaagatcatatcattcttccaagctatattattcatatcatagaaaataagacataagaccacgcaccatccccaatttgtcttgcctctgcaacttttctccctgccatatatatattcttgattaatgacatattttcttcaaatttttttccaattcttcaagcttggttactaatgttattgcaacctaatcacaatactttccttttatttgtcttatcctcatatatgatgtaggacaacaaaagcaattatatcaaggtagagaaaaatataggtaacagagaaatttagatgagaacaggggaaaaaaaggaagaaagtcggtgatgaaagaatataagttagatgaggaggaacatggacaaattttgaatcacaataacatttgttgccttcctttgatgtactcaaccctatctgtaaacaattcaagatcttacatgaaataaaatactaaactgataagagtagaattcctaattttgtgattagaataaaaccttctaaccttatgataagagtaggaatcctaatttaatttgaaatagaatctgtcttattctccacatctacacacttatattcaaattaaagtggatggtcttgatccccatcactaattctctggaaagagaaaacttcctgtgctatacaaactgcttcacttaaagtgaagatgtgccatcaacatccatgaatcattggcaaataaataatgggtgatgaatagttttttagcactccttgcctttgaagctcaaggttttaatttgcattcaccttttatatgagcattgaatcaaggggatgccaccacctttaggattatataggaaggacttgaaagaatagagttaagaactcgagaaaccaacatttctcaccaatgttataaatggacaagtggagagcactcaacatggcaatggaggtcatgctaagaaggttttccatagagtaacatccaaaaatctgctaaaaaacctatttccaggaacaaaagtctaaaaggactacgttgtgtataattctcagaatgcctttatggagagtaagctaatatttagatgtggcccttatttctaataagacaatctccaaatcaatatatttaattggaggtttaattaattaatttattttatataagctatccaccctattaagagtgcatgatatgcattgtgagctcaaatcctataggtttaagctcttaggaaaattggttgtctaacatggtatcagagtcttgtttggtgggaggtcatgtgtttgaacctaatcattgcatatatttatttacccaatttattaagtccacgtgtaagcccaaaaatagaggctacggatgagagagggtgttttttttttgatcaggatgagagagggtgttaagagtgtataatatacattatgagcccaaatgttacaagcttaagcttttacgaaaattggttgttcaacacacttaataacaaaagattgagcttaaccataaaggatgcaaaccctaagtgatatgagatcgtgtctcccccttacaccacttaaatatgatatgggatcgtgtctctcccttacaccacttaaatacctaggaagctcaaattcaagaggacactattgttgaggtacaacccgaggttgagacgtagtttagaatataagttggatgttaagaagacttatgaccattttaattaagcttttctcaatctgtaattagtatgatggtctttggttaaaaattgattacgtgaattaaattttatatcttgatgatgagattcttagtgttggtgaatagaacactatatgagtttttcaaattttatgggttttaggcaaggagactcaccttaagttgtttctttaataaagcaaggggggaggagcttcattagaggtttcaagttagatggtcgaggtggagaaagtatggaggtttttcctttacccttttgtgatgacactctcttgtttgggtaaggtgtagtgagcatatgatatatttgagtggattctatttttggttgaggtggttttgggaattaaaaccaatttagagtagtgttttaaaaggctattgaggattacaccttgagactcgccttaaggcaaggatatgcaaattagccttgaggctatagtttgagtaatatagggtaatcgaggcttgaccgtgaccttgttgaggctaataaccaagaagttatagcctcaaggctagtaaggcttaagccttaaatttaaaaaggttttgatgggcttagggccttcatgggctttttttttaaatacatgttttaagaggtttaagtctcaatattcattggttttatgggttgtgcttttatggggttttgatatagatttataagttttgttttccatccaagactagggttatgccttttaaaaaaaaagagcttatttgtctactaattaaccctttaaatggaaaggaaaaaaaaattgagaagaagaaataaatgaattattggtcactacattaattgagcttatatataatcattatatcattatcttattattgataaataaaagaaaaaagatcactataattaatggatgaagaggaaaaacgagttaacattaaccctaatggcctttttttgtctcaaggcttttttttcatttcatttggggaaaacgcctcaagatcacctgtagcctattaaaatattgatttggagaagtgtcaatcttttagaggaggagctaatatgagaaattgacttctttcttagggtgtggtatggacaagtttccttctactttggccttccttgaggttccttttccaagtcaaccatggtttaggaagtgatcagaaaaattccataaactggcttgcttttcttggaaacgttagtatttaactaagtgtggaagacttaactcttggacggagtacattgtcctgcttgcctgtctacttaatgtccctttttgtcatttgaaggtgggtgcatttaaggcttgaaaaaactcaacatggcttactatttgaatgtggtcctctagggaagaaaccctattttctgaattagttggttgtttatttcaatagaagaaagggtggtttagacatcaaaaaccagtcaaatcttaacaagagtttacttggtaaatggtgttggaggtttgcaatgaagtgggataaattatggggaaacattattcttggaaagtttgggaagtgcttagggtttggcgcactaaggaaggggatgagaggctagggtgggtttatggggacaataaggagaggctagttgaatttttggtagaatttttgttgtaggtattcccaattccttttagtattgttgtgacttaggaggcttgggttgctaaaatattggacaattttggtgaaggtggtcataggaaccctgttcctgtttttataattaggacctaaagtgcatggagcttgtccctaagtatttcgatgaggtagtggtgcttaggggttgtgaggataggttggtgtagggttgtgtcaaagatgaagtcttcagttaagctgtttcattgtcttggagtgcaccttagggagatcctttcctcctaaggaaatatgaggttcctgtgctcccttggactgcttgggagttcttctaggaaaggattttggcttttcacctgattattaaaagggggtggacattagctaattgtgggctgttatttaataacaataagaatcagccaaccgtaatctattgcactaagaacttgggaagttacatggggaagaataatgaccttaaatccccttagaaacaaggttggaggatgccaaattgatgttactttgtaaaggagaagaagaaatggctaatctcattctgggaatgttatattgttgtatactggtggggaaaaaaacaacccacaagctaggtttagagaaaaaggaaactctattaagcttttagatgaaaaagtaaaatttcatctagtcaacagggaaaaaagattgtttgctgagaagtatgggaaggaccttgaaggtctcagtggagaggaagacattctgggttagcttcgagggaggaatcggaggaagatggtgttcaataacagagcacagtaaaggctttgccttcgtccttggttttgagaaggaagaggttagctggttgatagaacaactgacaaaggtaattgagatgaaggtttttatgggtttcaacagaaaatttagaggaaagaacagtgttcatctattggaggttggcttcaacgagcatggcaggtatataagattatcagaatttgcatccagaaggaagtcaacctttctggttatacctgagggggacaatggcaggggatgggaacttttgaaggaagcgttgtattcaatgctggtggtcccctcctcgggttttgacgaaaaaggtaggcagagcagggaaggaaggaatctgcacaaattcgcgggtcccttgcaacggtcctttgcgaatgtagtcagtgaagaaagaccgaggagtggcggccttgtatctgtagggagatgggcgagggccgtggtgtgtgaatgtcaagatgattctgttaactgggacgaggttggtcgggctttggcgagaaggttagggcacaaaggcgtggtgacagtggttccattcgccagaggaaaagcattgttttttgtagaaaccttagaggaggctgtaacactacacgagtcaaggttcatcaagattaaaggaggaaatacagtcttgttgagaaaatggtcgccaaaggaaaactctgaaatagaggggaaattcaaggaaggttggattgagttaaggggtttaccattccatttatggtctgaggttcacttgaagaaaatcatggagcaatgggggacggtgacagagatagattggcgtacactgaaaattttttatctaagcaaagctagggtgagagtagttatgaaagaaagatcggtgcttcccgctttgattgaggtggtaaacgggagttgggacttcacagtctcagttacagtggtagggaaagaagatggcatgcaggctagaaaaatgggtgagttaactcggcatttggctgaggctcactcagggatagctggcagaaggagggaagttgaagatagatcaacggctggaaaggtgtccttggctgaggcagctgacagactgatggagtggagagaggttcaaaaggctggaaatgctcccgggaggacacgtggaacgaagtggacagaagagggaaacagctggcctcctacgtcttttaattcaaaatttaaaagtctggaggcaggtggtgttgggccaaagcaggagggcaaggtcaaagcccagtgaaatctcatggatgagatctgggcctctaaacatttgtcaagggcccaatattttagtaagcccaggcctaggtcagataatgaggtgggctggaagagggaagcccctgggagaggcccgatccagcagatgggccaagagtcggggggtaagcaaaacagatcgaggaagggcccgacacacagggtttctcacgctgcaaaggggaaggcgaaggtaggttacgatgactctgaacttcaacggagggaacccacggtgatgcgcggttcaaagaagctgtggaatgtcctacttccgtcaagctctgaaagccgacaaggagatcgaagctgtgaaaagccagttacggttgagagatcgccgacaggtagcgattctctttcagtggaagaaggcgccgaagtgggatctattttgtttcaagggggttccgaggaaggaatgacgccgacggaggaaagcgaggaacaaaggaatactcctagggttccttttatgtcaaaagagaaggagagaatgcgcaataacgctataggagaagaaggagaaggtgttaagggctttgtgggttattctcattgtggttcttcagtcgcggatcatccttcttatcacgagaacatagaaaaagggcttatctttgggggagactgcggattgacgagagtgggaaatttccaggtttctgttcatctttctcctcagccttctctgcctttacggtatcccttttctggtgtggctcctccacaccagagtccttttgaacccgattcttccatttcagcctttcattcccagtttcctatgaaaaaccgagtgttaactgaaaattgcttaaaaaaaaaaaagacgatggggatcatcgtcttgggtatgctggcaatcctaatcatgatggagtggtgtcccagatggatggaatgaatcatttgtcagagagccttaactatgatatgaccaattccagctcgcctcatggggtccctattatgggagcagtaagcaagggagtctcagatttctcccagacgagtggattccatatagaaggtctttcccctagcaagatggctaaagtctgtgaaatcttgagttccttggatattaaggtgtactcaagaagaaagaatagaattgccataggcaattgagatttggtggtgatggtctggtttcaggggcagtgaggtgtttttatgaagatcataagttggaatataagggggttgggttctaggacaaagaggagggtggttaaggattttctgcggcttcagaatccggatgtagtgatgtttcaagaaacaaaaagagaggtgtgcgacagaaggtttgtaggtagtgtttggtcggtcaggaataaggagtgggctattcttccggcgtgcggggcttcaggagggattttgatcatttgggactcaaaaaaaatgagaggtgaggaggtggtaattggttccttttccgtctcagtcaagttcttgttggatggaagcggaccattgtggttgtccgcagtctatggtccaaataatccatcaattaggaaggagttttgggtggagttgtcagacctttttggtcttacttatccctcatggtgcgttggaggagacttcaatgtgattaggagaagatcagaaaaactggggggatctagagtcatttccagcatgagggattttgatggttttataagagaaagcgaattacatgatcccccattaaggaatgcctcttttacttggtcaaacatgcaggagtcaccggtgtgcaagagattggatcggtttctctattcaaatgagtgggagctttccttccctcaaagccttcaagaagttcttcctagatggacatcagatcactggccgattgtcttggatactaatccgtctaagtggggaccaacaccttttaggttcgagaatatgtggttgcaacatcataatttcaaagagagctttagcagttggtggagagaatttgaaggaaatggttgggaaggtcacaagttcatgaggaagttacaattcgttaaggcaaaattgaaagattggaataagaatacttttggaatgcttaaggaaaagaaaaaatccatttcggatgaaatagctaacatagatgccattgaacaagaaggggctctctcttctgatcttgcagctcaaagagctataagaaaaggggagttagaggagctaattttaagggaagaaattcattggaaacaaaaagctaagataaaatgggttaaggaaggggattgtaactcaaagttgtttcataaagtggctaatgggagacgtaacaagaatttcatcaaaatcttggagaatgaaagaggtttggtgttggacagttccgagagcatcacagaggagatattactatatttcaaaaagctctactcgtgtcctcctagggagtcatggagagtagaaggtattgattggtcccctatttcagaagagagtgcatctaggttggattcctcttttgccgaagcagagatctttaatgccatctttcagttagatagggataaggcgccggggcctgatggtttcaccatagcagtatttcaggactgttgggatgtgatcaaggaagacttagtgagggtgtttgcagagtttcacaacagtgggattattaatcaaaacactaatgcttccttcatagtccttttgcctaaaaagagtcggtcaaagaagatttcggattttagacctatcagtctgatcacttgtctatataagataatagcaaaagttttgtcagggcgtctaagaggagttttacaagagaccatccactccattcaaggtgcctttgtacaagggagacaaattctggatgcagttcttatagccaatgagattgtggatgagaaaaagcgatcaggggaggagggagttgtgttcaagatagactttgaaaaggcttatgaccatgtgaattgagatttcttagatcacgtgttggagaagaagagttttagtcctagatggaggagttggatgagaggttgtctgtcatcggtttcttatgctattctagtgaacggtaatgctaaaggatgggtcaaggcagctagaggtttaagacaaggtgacccgttatcccctttcctattcactattgttgcagatgtgttgagtagaatgctgttgaaagctgaggaaagaaatttgctagagggcttcagggtaggtagaaatagatgtagggtatcccatctgcaattcgcagatgatactatcctatttgctagccctagagaggaagaagtgcaaactcttaagagtttattgttagtgtttggtcaaatctctgggcttaaggtcaatcttgacaagagtaatctttttggcatcaaccttgatcagaatcatctttcttggttagcgttgctgcttgattgcaaggcttcagattggcctattctttatctgggtcttcctttgggagggaacccaactgcttgtggattttgggatccagtgattgagagaatctctaggagattagacggatggcaaaaggcttacttatcttttggcggtaggataactctcctacactcttgcctttcccatatcccaagctacttcctttctttgtttaagattccagcttcagtggctgcaaaaatagagaggttacaaagggactttctatggtcaggggttagggaaggtaaaagagatcatcttgttaggtgggaagcagtatgcaagccgaggattataggaggtttggggattgggaaaattcctttaaggaatcgtgctcttctagggaaatggttgtggaggttccctagggagagtacatctctttggcatcaagtcattcttagcatttacgggacacactcaaatggttgggatgccaatactatagtcagatggtcacaccgctgtccttggaaggccatagcacaaggctttcaggatttttccaagtatactcggtttatcgtaggagatggggaaagaattcgcttttgggaagatttgtggtggggggaccaaattttaaaagaccaatatccaagactatttcgagtagtaatggataaaaatattccaatatcttcaatccttggttcgtctcgccctttctcatggaactttaatttccgtcgtaatctaaccgattctgagatagaagatctagagcgcctcatgcactctctagattgtatgaacttatccacttccgcttcagacgcgagatcatggtccttatgttcttcaggtttgttcacagtcaaatctttctttacagccctgtcccaaatgcctgattcatctccatttttccccactaagtttgtttggaaatctcaagtccctttcaaagttaaggcctttatctggcttgtggcacataagaaggtgaataccaatgacttgctacaattgaggagaccccacaaagctattagccctgacatatgtaagttgtgtatggaacaaggagaatccgcagatcatctcttccttcattgctcagttacgttggggttgtggcacagactttttcagctagccaagatgaattgggttcctccgaaaagcatttcagacatgatgttcatcaattacaagggatttggcaagtccaagagaggggtaattttatggcaaaacgcgagtataacgttaatctgggttgtgtggcgtgaaagaaacgctaggatatttgaggacaaggctaggaatgcagggaatctttgggattccattcatttccttgcgtccctttgggcgttttgttcagcgggttttaagggcaccccccttaacgtactacaacttgattggctatcagtgtgttgttcaaatagttctattgggacgatctagtgctttgttattttttcttgttgtctagttttcttttggagggaggatttctcatcctccttttgtacttcttttctatcaatatattctagtgtggtttcctatcaaaaaaaaaatctattgcactaagataaatcttgtgcattatggattttgttaatctttatttttggcctctcatggcttctgtcttggttggtgaaggaggtatttattaggttggtacgagacttttctaggaagaagtgaagaaaaggtttggagaataggcctagtgtacttgttctagaccatttaagaacttaatcaaaggccctttgaatacttgttcaaaactgtcttttctgtatttgcttttcctttggtttatgaagtcttccaaaggtggtgtcttttcctcattagattttattgggtatttgggaccttactagggttgtcttggccttttatttttattttcatgcctgtcagtgccctttgaatatttattctgtacttggtgtatgccccatttatgataaatttctatttgcctacaaaaaaataaaaataaaagaagaaaaattttctaccacttctctttctaaagctgactttagatccatgtccaacaataaatatatatgaaggaaaaaattccaagcatttcgaagtactttaatgagtctctctgatattgatggccaaattggcatacctaccattactttgaagactacatttcctcctaataacagacaatcctgctttctttggaacctccagatttagtaatgtcttgtttgtgaaatttattttcattttgaaaactgaaattatttttatttttctgcacaagcaccttctgttagattcatgctcctatttgattttgtcttttttattagcattttatgtagcactgtaatcctaaaataaccaatagcattcatatatatctgtttcttcatggcttcgagcttgattacagttctacttgttttattctataatttaatttattatgaatgagctaacaattcaatttgaagtaataattggtacaatttttttttttttatagaaacaaatacataaaattcaatttttttctaataaatttttttatcgaaaattttatgaagaaaagccagtatgatataattgatgttgagagtcattagcatttttatccttgtggataggataggtaaatatgctttatataattgtgaaatttttgggaagtttatatattattgaaaatgatctgctgattatctattttctattttctgtggattatttatgaaatttcttttataatcacacagcacaaaatttctagtttctttcaaaatcaacattaggtttgaaattttaactgacaattaggcttcaatattttcaaagttccttttaacattacacaccttttgggcttatgtgggaaactgtgatttagagctgcaaaagcatttttttatttatttttattttttatgtgctcttctttgaatcgtctcttccaatttgtttattgtagggagtttgagcctgtcagattgcttggcttgcagt

SEQ ID NO: 12332 - DNA, 8635 bp, Vitis vinifera
  Intron number 1 from transcript GSVIVT01025241001 (locus G SVIVG01025241001) derived from phytozome v7.0 (chr-ID chr6 ; pos 2788887 to 2797521)
aagaaaaataaaaaaataagtttaaaataaataatacttctttcaactcattttatttgtttatctctactatataaatattaaataattttaaaacatataaattttgataaattttaattatattttattttcttctgtatttcttacggtgaaaccaaatataagaataccatttttcctaactttttttttctttcattaatactttccgaaaccatacataacttaagatatttacatcaattattttgggataaaagctaatataagaaataaatgtaaaacgcagaaaacatgagacaatgcctcaattgagggtataaatctatcttatgattagtcttgttatagataattgtgtaattagatgttattttaaaaacatatttactaaaaataattataatatttttaaattttttaattaactagaaatctaattctctccttacttcttcaaaacttaaaacttaaagttttttgctttaagtgtttgataaactcttctatggcataacatcaaaatttaaacgaagatgtagaataataaatataagtaatttctatgatatagaaatccattgaaagagtacaaagaaatctacaccatacatggtatatattatacaaatctaggcatcttttatgtagatataggtttccatcttcaattttatatctacatactatcttaaaaatattttgatcaaacacgattataatattttaaaatttttaattataaaacatgctataaacttttataagattgttatttaagacaaaataaatttatttccaaaaataagtaatatctcaataagaatcctttgtaccttttaagacaaaataacataaatgatctattcctatcaattcaaatatgaaagcatgattaaatcgaattaatgcatggtggaggattaaatctattcctttggattcttcacttccacatcaatatctttagatcatataagagtaatcaaacatggtggaggatttctctccataattcgtgttcggttgctaacaaaatataatagaaagaatcaaaaaaaaaaaaaaacactaaaattcattggaaagaaaattgaaaaacgatagttcgacatgtccttgtgccctaaaacataagaatgaatgagtttaaatattaaaaataaaataaaataaaataaaacaatctaacctaaggcaaatggcatgccttaatggctaataatgttaaaaaaaaaaaaaaaaaccaatcaaaaaatcctaaaattagcttgttggactcttttccagcttggttagtgcttgggaaggccaaaaaacaaagttcggatgctttgtatggcttggtttgaagtttgaaagctaagttcgttttcaatttctctagttagaaaattattgtagaagttcaaaatttaggtgatttgcaaattcaatttttaccactttttagtctcctcatgcttagttcgagttaagtttgaaattgaagtgattttcaaactcaacttctaccaatttttgcttttacctctacttccatattgaaatgtccaatccaaatttgaaatattcaattcacatttgaaatgtccaattcgaaacaagttagattgaatttttaccttacatatatttgctttaaatagtcatatcacccttgtttcaactctaatttgtgcacttttgaagtattagatttccgacttcccaagtttcgaagttataagtggtttgccttaagaaactcttaggaagcaagttagaattcgattcaaagtcaattatgttgcatcaaacataagtgatattttgcccccttgatttggctttcgttccaactcatctctaatatagttgcatatttttctcatcatttttacaaccttcattactcttatcacatgttaacacatgactctttttacccttacttagtttctcatcgtcctttattgttcagaagtgtggcatcttattactatcataacaatgattgcccaaacatagattgaccctatgcagaggtaacacacaaattgacctttgtggtaaagtcgatatgggggttgagccttcccgatggcaaagatggcagagccccttgatgaaattttgtatgtatgagtattttaaattaggatattttgataatttcatacatataatttagttaccctaatcatgttatgtttagggttaaaattggtgcattaagagaaatagagaaacacaaataataaaacctaaagggtgtgaggtgttttatgattctcttataatctgaatttcacatggtgaaaatctagaatggttgtaagttaatgaaactctcatattaaaagtgaaacattataaatcttctatgttcttatattttaatttctcaaattcatttattattacttttgataaataggattaggatattttaattctaacatccatgagtctcatatctcccacctagaaatgtagtcctttttttctacctcgattggtgtgagttttttatttacattctcttcatccatttatttacaaataagctcaaaatagataattaatatacaagtcggtaagttttccgatttaaggataaattcgattatgaaaacatcactttttcgtaagaaccctacattttattgaaataattattaaaactatttgactttttttaaaagaaaataaatataaaaaatcaaccataagtgtataacctttttaaaacttaaaaatatttttaaaagatagattctgaaccatggaactatgcagattcgtccgtacaattggactgatagctccagacccacctgatttcttatattatacacgtggcccataaggaaactggaagtgcatgtgttattgtagtcagccacacagagaagtacttgtgctttgtctctttgagctagactcgccaaataatcgataaagaatcgccacgtagggaacagcgaggagcacaagggaatataatcggcgcccaacaagccgaggattgtcattactcttaagtgactctttactcaaggtcctctgctcagatatgatgctttctagaacccgatgtccaaacatttttaaaaaggaaaatacaaaaaaaaaaaaaaaatcaaaatctttaaattaaaaaatatgggaatgccttggatgctcgaaaattgttttttgaattttatatttgaggaactaaataattttcactttctatttttttttttaagtttgaaaaagaattttaaaaaatacaatatagtttttactttttttaataagaatttttatattttgtatataaaattttattttaaaaaataaaaaatatatccaaacaccagctaaaagttaaatattagatttttagtattaattattttataattttcattattaaaacataaagaaataattccccttaaggttacttctcaataatataaataaataaaataaaataaaaagcaagaggtgagggagtggagtacaaaattgaaagcacatgggtaaagaagaagggagggaagaaagaataagtggacaaaccatatgaggttcaatggaaaagacaaaagtgtcctttgcttcaatccacgctagtggcatggtaaaaaaacattgacttaggtgtacttttcaactcccaaaatatactctaaattattacttgttccacaaggtaaagacaagtaagatctcaaaagggtaaaaaattaatagattactaaatgaaataataaatattatataattcattataattattttaaaaatgatgcctacatgttgattaaagaattcatcaatggcggagggtttttttctttcctttttattgtaaaagataatataatatatatatatatatatatatatatataaattcgaattttacaaggaatgctatgaaggtaccatagccttattgctaattaaattatttctgaagaaacaaattcattagcatttggcattaagaaatagatttataaaatgttacaaatttaacaccaaatctccatagcactgtggttagaaatcacgatggagtgggttcgggatgggtaatctcatcccaaattcatcctatttatttatatttattctcattcccactccaaaaaaattaaacaaatggagtagaacaaggtgagtattaggaaattctcatgctcgttatgttaaaaaaaatttaacatttttaaggttttttttttcgaagtttaaattttattaaaaataaatataatttataaataaaaaatattataaacattcataatttatttttatgaaaagtatgttatttatgtttaaaagttgaaaaataaaaaaaataattaaaatagtttttatttaaaattatatataatgaaggcgaagcgaggtgggacaaagtcatacctaaacctatttcgaacctatccaaggtttttaaaaacttcacaaacctactttgaacccatttatctttaattcaaacccttcccattaagggtgagataaaacggatacttgaaaaacctgtcccattaccatctccaatcgtggtcaacttaacaaacccctgtaagaaaaatgaaactaacttatagacgagaatttaaaatttgaaagcttagagaatagtctccttatcttgaaagataagtgaatcaaactcccctctagggagatacattgtataaattgagagagttgagagagaaaaggtactcttgtactgaagtaacatgccaaataaaacgaatagtattgtagacaaacaaaacctaaacctagtctcaacgctttgttccttaaatcaccgaaggcaaagtaaggaaagcgagattgcatatgtaaatttcccttgaaaattaaggaaaagctagcacatacatgtaaaaagcatcaaaatttaatgaagagttaaagtggtttggacttgaaatatatattttagagtttagacttatggttgaacaaatgagacttgttcataataactacttgtcattaggttggctaactgctagctaagctagagtatttgaactaggcaaaatacaaattgagctagagtatcgaaactagtctagctaagctagagtaccacaactactactaaaaccgaaggccactatttgactcatggaaggaataaagtaaggctttcaacgaaggccactatttatgactcatggaaggaatagagtcaggctttcaccaaccaagggatattaagttattttaaaccaagtgtgggtaccgattgttctagtgtaggtcattattccaaatggaataaaatataatagttgatatcaatcttaaatatgaaccatagtgtgcatgcaagcatgcatttctatacgcatatctatgcaccaaaactctcccttaacataaaggctttttaaaactcgatccagacttatatgacttgactctgataccacttattaagatcaagaaattaattatctcatttgaaaactaattaattattatttaagatcaaactaattatttttatatggttgaagttacaccaaatcccgagccgataacactagacatacatcttgaaccaacatcaaatctcaagcacacacgatctcaatccttacttttaatgcaaccatcatttttcttgaaaatgacatcgtggtcaacctaacacataccactatattgattgcacaatttatactaacaaaatcaaataaaccttcaaaaaaaatacaaatcttcaacaaaaaaaaaatacattattagctattaaagtatcaaactaattaaaaaaatcattaaattgaaaatatcaatgtgtgagtcatgctaattctagatatcgaatccatctccacttgattttggtggagaattctatatatgactgattcgacatgaattaaattaagggaaaaataataaaataattttggtagagaattatacataaatgaagatttgggatgttgagaataaatgagagtctacaatgtgaatttaaattattataagtaagaagagcttcaacggcacgcaccgttacattaattgaggaggaaccaaagttgagttggagataactcatacttcctcgctctccgtgtgattccatttactagcctttgcctccattacaattcctcacacttttacaaattaaaataacaataaaatttattgactaatttttttcaagagtttgttccacgtcgattttacagaacctttttaatccaaaagtgtttctggaaaaaaaaaattgataaaatttaaaaaatatacaaagttacttataatattttctaaaaacaatacttgatagataattataataaaaaatactttaaaaaaatatttttattaaaaacacttctcaagtgaaaacactacaattccaatctaattcaacttgatatctaatttgatgtgattgatgtaagtataactcaatttcattttttaaaacttgaattaaattcaaattaatcgattcaaattcgaattaaactcactcacccaaaaaaacactcattcccattttttaaaactcgagttaaattcaaatttattgatttacatttgaatcaaacaaattcacgtaaatcactttcaatcttattttttaaactttgagttaaattcagatgaatcgatataaattcgaatcaaactaatttatcataatcacactcagtctcattttttaaaactcagttaaatttaaattcattggtttagactcgaatcaaactaactcactcaaataacacccttgatgtataaattgactttgctctccaaactctataccataagtgaattttttacttaggattataaacatgtgggccaatttttaatacaaagaaattgatgtgagaatttattattattattagaacttatctcaaggaagttcaaatttaaaagcctcagggcaatttgcacctacttgtgccatcaccaaccacttgttgctaacattaattactctacaattttaaattttaattaaatttattaaaaatatttttgtctaatcacgtactttttttttacttaacggtcataatttttttgaaattggattctaatcatgtgataaaggtggtgttatttcaccaagttgggttaatgatttgaacgggagggacaaatggagcagaaaaaaacaataaagaaaagaaatggggaaatgggtaattccaaaaaaagacaaggtacaaataaataataataaaataattagtttttgatttgaaatcactgttgggtgaagaaaacgaggttgcacgcctattcttttcacttcagttgtttcttcctttttcaggctgcagctccctctctctcccgcctcttgccttgcttctgctactttttccaatattctttattattaattttttttttctttcatgggtattatttttttctttatataaaattaaatataattatatgccttgtgtttgtttatgatttgcatgaaataattaaaaaaaaccaacttctattagatttaaaatataaatcaaacttttacatgaatttccttttccaacttcttaagcgcctggtagtgatttgtaaaagtatttttaatttaaaaaatgtttttgaaaagaaattgggtgtttggttatatttaagaaatatttttaaaaatatgaaaaattatttgtagtgttgaaaaaaattagttgtagtgttttctgaagaaacatttcaacttcgtttggtaatgattttaagaaatgttttcggtataaataatatttaaaaaaaataaaaataaaaagtgtttaaaaaatttatgaaacacattttaaaatctgaaaaatcacttgtagtagtagaaaattatttgtagtgttttctaaaaaaatacttcgggtcaatttggtagttattccgagaagggcttttggtccaaaaagtgtttttgaaaaaaaataaataatgtgtggtaaaattttaaaagtattttgaaaaatataaaaaaaattacttataatattttttgaataaatacttgatagttgatttttctaaaaaatactatcgaaaaaaatactttcatagtaaatactttaaataaaaataccatcaaacgttagataattctcttaaaaatatttggagataaaatatttttactaaaaacatcgaaaaatacagttttgaaaacctcatcatttgtgtaatatataattgaaatatacatatgaaaataagataattatgatttgattttcaaaaggatgtttctagtgttatctttcgcaaaattgtcatctaaatagtgaggaaaaattattcaaagcctaactaataaacaagagtgatggctaaattatgaattcttttcaatggatccttttcatcgttcttcaccaaataaataatccaaatttaaatgattttattatttttttaatttaaaaaaaaaggaaaaaaagaagaagaaaaagatagaattttggtacaaaaaaagtcactaaggtccaaaaactcacatttcaaactgaatttaaaaaccaaaaagtggtatctctcttacatataacagcaagagcaactgcagagcaagtaacaaccaggagaggagagagagactgaagac

SEQ ID NO: 12333 - DNA, 5925 bp, Vitis vinifera
  Intron number 2 from transcript GSVIVT01025741001 (locus G SVIVG01025741001) derived from phytozome v7.0 (chr-ID chr8 ; pos 12331332 to 12337256 reverse strand)
aaggtcgtcctaacaagctcggattgtcatatcaggtgcggcgattttggggttatttttctgctatctcaatgatttatattgggaactgtttttcatgtagattttaatgaatttgttaactttagatttaatcagaagtggattttgtttttcgtttttgtttttgttgttttagtgatagtttgaatttagattaaaaccagattgcctatcatttatcttgatcttcatgttttcacccgtggtgttcttaggattcactggttcaatatggttttctttctttttgatcagaatatggttttctttcttgatgaaaaataattgcacgtatagaaatgaggtttatctctgttccttcggtactgataaatttatagctctcaacatgtcatcagacgtaggttttttttttttttcctgtagacatcaaaattatatcatccttttgtggtctttaatttgatgactttattggagcgatgatcaagctagtgaaccttaaaaaagataagcctccaagtaccatataaactttctttgtaatgcttttttcaacttcacaatatcctgtgaggagccttgagtgttcaagaaataccattttgacccatcagcttagtagggggggcgggggggattatataagcatttagctaaaatgttggcaaatatgctcaaaaaggtggtgggagaagtggtttcaacctattagcatgcttttatggacagtggatagattctagatgcattcttattgctaataaagtcattgattcaaggttaaaggtcaataacgtgcaagttattttcaagatggacattgagaaggtgtgcaatcatgtcaactgggacttcataattccagtcttagctaagataaagtttagtctaaagtggattagatggataaaatggtgcataactatgaaaagcttttctgttctagttaatgagaccctatttagtttcttttagagcttgatgggcttaaggtaaggggatccctatctctttatttatttattttggcgatggagattctcacttagattttatgcaaagctaaggaagggggttttattttaggtttcaaggtggatggaaggagcaaggagggatgggagtgtcgcatcatttgtttgttgatgacactctttttctttgtgattccaattaagattgattgaaatatttgagttaggttcttatgtggtttgatctttggattaaaaattaatttggagaaaagtgagtttattcatattaaaggaataactaatatgtagggactggcttctatgctgggttgaggacggggaagttacccactacctacttgggtctttctttgggttctcctcataaacctttaagggtatgggatgtggtggaggagagaatttggagaagaccggtggtgtgtaagagacaatatccctctaaaggagggagacttaccttgatcaaaaacacgttatcaagtcttccaatttatttcatctcattgtttgtcattccgagaagggttagtttaaggcttgagaagatctagagaaacttcgtatggggtggtggtgcactagagaaaagatctcatttggttgattggtctattgcttgcttgggaagaaaaggacgaggggcttgggcattcataatctttcaactttaaataaggctttgcttgccaagtggaattggagattcacaattgaaagagagtccttatggaaacaaatcataatagggaagtgtgtttgaggggcgtgagagaaggctataagggtgagggtgtggaaagttattagaaaaggggaaggagggaaggttatcaaatgcaggtcatgcttcatagttgagagtgggatgaggattaaattttggaaagattgatggtgtgatgacttgtccttagaagaagccttccaaatgttattctctataaggatgggtaatagagctatgggagcaggctaggaagggggttagtggaggcccttgcttttcaggacaatttaatgattgggactcaatgatgtggagggattcttatggaaattgcacactttgtcaattaaaagggaaaaggaagacaagttgagttggaaggaaaccaagtgcgacaatttcttggttagattgcttaatccctccttaaccaagtgaggtagggagcctttccctacatggctagtgtggagtacttgggttccaacaaagtaggcttctttgcatgggaaacaacatggggcagaacactagaccaactcaaaaggagatgatggattttattatgttttttgtgcaaatgggagggtgaatcaatgggtcatttcattcttaattgctctaaatcaagaatgttatggtaggtgatcttttctccttttggagtggtctgactgacacactcttcaattaaagggaacctattgagttggcaaggctcatttaaaggaaagaagcagaaaaaagtttggaggggcactcccttgtgttttttttggaccctatggaaggaaaaaaataaggtcatttaatgatttcaagtagttagaccaaacaatcaaattgtattttatgtctagttttttggattgggctagagtatacatagaggatcatttagtgtttatgatagaatttgtagattgattgagctacaagtaaggggagggagtttattttttgtttatcctttccttgttttccctagcctaggtgattttgacttaaaagcactaacacacaaccatgttagtttgatactatcaagcaacaccttaaccaacaatttgatcttaaccctagaacctttgacctgtctaggagaataatttcttgatcattggaaatattgctttccccacctttcctcttaacattttaattttggaattttttttataagtaagagcaattgtattaagaatgcctaaagaagtacacctgaaagtatacatgatgtatacaaggctaaaaagccaaaaaagagaagagaaaacataaaaaccaccaccttacttgcaccctaaccaattaatgaaatcaagtaaagaccacgagctagagcctacttgaaccttgacccattccaaaaacatgtacaaaaaggaccgtaaaatagcttggtctgcttgttcgatgtcttaaaagacttttctatttctctctttccataaggtccagaataagcataaagggactgcatttcacaattttttccttttcttcccaacaaaagagttgtgacagctaagtaagaatccttgatggaaaataacataacccactgaacataaaaaaaaaaaacaaaaatgagtttccaaatcatggttgtgggatcatgaagaagcaaatggtttgctaactcctctcagctttacatagaaagcacctacttggtaaagtccaacccctcctctttagttgatccatagttagaatcctcccccagaaagcttcccaagaaaaaaagctaaccttcttcagtacccaagggttccaaacaatgcctaaagggaactctctagcattgcaaggcgttagggaggagtaaaaggacttcacagtgaagaggcctttctttgagattctctaattcatgaaatcccttctaagaacttgtccatttaatcattgttgtgtcttgtgaaaatagggttccagtgacccacttcccctatccaatcccataattaagctaaccaaacttctctagaagaggctaacaagtacaagcttggaaaaattctatcaaaaaaaaagtacaagcttggaaaaacctcttttcaaggaattctctccataccacctatccttctagaattgcactcatctcccattccccaccttaaaagccaccctttttctaaactccatccatccattcttgatggtcttccaaagacccaccccataaccttttcttgaagcaccagtacaccaacctcccttcccctctccatatttccctataatcacctatttccaaaaaggctcattctcaaaagcaaatctctaacaccattttccgagaaagtccttattcaacatggaaagattttttatgcccaagcccctgtcctttttctccatgcaagcaatagaccaattcaccaaatgaggcctactctggagctctccttcccccaaagaaagtctctttggatcttctcgaatcttaagcacactttgcgaggaatgatgaacaaggacataaagtagattgggaggctagaaagagtgttctttacaaagtcaatctctcttcttttgataagtattacttcttccacaaagtgagtcgcttctaaaatttcttctccactacatcccaaacacaaggggatttaaaagtggctcctaaagggaggcccaaataacaggagagagaacccactttacaacccaacacccttgccaaatcctcaaaattaggaacctcccctattggaatcaattcgcttttatgtggattgatctttaacctgtaaatcgctactagaaagtggtggattctaagaaaaggtgtagattaagaggagggggactgaatcactaactatgatttccttatttcatgattcagtccctctcctcttgatctacacctttttttggaatccgccacttttcagtagcagtgtgaagccttcttgtctttctcaaatccctgataagaggggccaattcaactactaaaacccatagccttcgacaaactgctgagtggaagggtgaaggggaccttctactacaatcagttgaaggtcctcaaaatggagaaatctctcatttaaaccataaatctttatgaatgttacttataaaaaaaaataaaataaaataaaatctttatgaatgtagttttgctacatgtgcgtttacatgtgtctgtaggacattattacacttgtaaacgtttgtatgtgtatatatatgtatatagattatttgaaaaatgactatttggtttaggtactagataaagatgtgtagaactttgtacaggggcgtttgatgtccttttgctaatgatttatacttctttcctaagatgcaacttgtttcaacagaaaatagttctttaaggaaaagataagacgtcaatgcaagatgctaattatatttcccacaataaataaagagatgtgataatatttctcagtattcccacaataattatctttctcttctcttttcttgcttgcctttgggccagatttgtatactccgtgtgtactttgttgtgcctttttgtaagcgcctttaatatattaaacttatttacctatcaaaaaaaataaaaaattccaagtattccttagaaaacttccatgaaataaatggaccttcaaaacgagaagatttttccaacaataaccccttttatttatttattttagatagacaaacagagaatatgttaagagcaccaaacaaaaggggacaagccctgctaatttacaccacttttggaagggggaaaccttttggtctctttgtctctcatctacacaataaaaaaggttttcctagtcatctctttgagttcaattgggtattgcttttagccaaaccccccaaaaagtaagaagtaaaaaattattttgatttggtgaactgttcttaacttccctagatctctggatttgagtttatttggtaagtgacttttagcacccaaaaggatccacattcacttttttcttcgctttattactgtggttcccactcgtagaatgcatccatccatttagttgcccttgtaaagtggggtggtatattattttttgatagaatggtaatatattaatatattaggggtcaaatatttggattttctttgaaaaatgcagatcacttggaaattataattatgatgcctcatgtaaatgttttcttctgcataacagg

SEQ ID NO: 12334 - DNA, 5411 bp, Vitis vinifera
  Intron number 6 from transcript GSVIVT01037391001 (locus G SVIVG01037391001) derived from phytozome v7.0 (chr-ID chr6 ; pos 14515787 to 14521197 reverse strand)
tagagcaaccggtatgattctaatattgatttatttagtttctttaattcattgtgcagtttatttggattaaacactaggataacaaagaacatgctttcatcaaggtttagttgttagctaatggcctgacattgggcaagtcttcatatttatcttttagagatttagataggaaatgtcagtggaaaattgaagttgtttgttgttggaattagtcctagaaggtagcactaattagaagaaacaatattgttggttattttcagtaattaatatgcatatattattgtgggagttattatttgctctttttagggtgacttgggttcttccattctcacttaaagagactacttggttgacatgggttctttgtgggaagaagcataagaaggcttggatgctggctcctttatgccttttttgggcagtgtggaaagaaagaaataggatagctttcaacaataaagagctttcaattcataggatgaagaattattttgtgtgtagtttttggtcttggactaagttatttatagattatggacctttacctttaatcgacttttttgattagttgggttctaggtgggtgaggttttttgtatcccctcttaatttttttgttgtttttgccttctagcgcatgctgtatacttgtatgctatgggccagcctttaggcctcttttttcttcatttataagatttacttttgcttttactgataaaaaaaaaattcatatattttatggatggttatttatttaagccttctctttatgactattctacctagtccgagttatatatgagtggttatatagaaggtacaaaccatgagttccttgtaatttgataaattgttcatgattgttcacaaatttagacaattcagtagaagttgtagtacatcaccttccttgctagtggaatgagttatcttccttactagctttttctagagctctagggctttgaggcagggttaccccctttccttttttacatatttatcctagtaatggaagcattcaaccttttatttcaatggcagtgtaggatgttctaagtaattggttcaatgtgggggaagggggaaagatggagttaaggtctctctcattttattttttggcagatgataactttttctttttctttattttatttatttatttatttgtgatgcaaagtgtagagcatttgaggtatatgacatagacgttcttagatttgaagtgtcaggtttgaaaattaatcataaaaagagtgagctcatcttttgtgggtgaaaaggtgaaaagatgggattcagcattttcgatgcaaagtgggaagtttccttactgcctatttaagattgccacaggagaccctctttaactctagcaccttgtgggattcagaaaatgagcactttaagagaagactttctacttaaaaaaaaaaaagtgtttatcacaaaagggggcaaattaacctttattaaaagcactccctttagtttgctgatttactttatgcttttaagaaacttgcctagtaaagtaaggattcagctagaaaagattcaaaaagactttctttgggagaatcattagtcatggaagaatttgcatttggtgaggttgccttttgtttgctctgataaaagaaatggtggtttggggatcaaagctcttgttattttaattagagctttactaggaaaatgattgtggaggtttgttgaagagaggagtagcccttaggacaggttattggttatggagatttgttgaagagagaaatagtctttggaggaagattattgtttaaatatggagcaatgaatggtggttggtgctttcgatagggagactcatggtgtagggctttggaaagctagaggttaagaggagtttacacccaaaactttaattcttgttggtaatggtcataggactaaattttggcaagattgttgatgcagagaaattccccttaaagaggcctttcctaccctctttcactccagttctaatagaagttcaagagtgacaggtgtttgggtgggggagaggaaacgcgaacttgtgaaccatagtttcaaaagggcagtgtgtgtgattgggagatagagacagtggggagctgttcaagacacatctaggcagtttctttgcaaaaaagtatggatgataggttagtttggaggagggtcaaagatggaaggttccgtgtgaaatcttattgtagcctcttttttacagagaaaacatgtcagtttcctaccaagtatgtgtgggggtttggtgcccctcttagggtttctttgcatcggtagctgcttggtagaagaacttaactattaatcagcttatgcaaagagggtgggggcttagttaattgttgcactttgtgcatagtttgtgaggagacaagaaaccatatccttattacttgtgttaaagcttgggtgctgtggggtttcatgcttgctctatttggtatgcaatgggtattcccatgttctgttatccttattttgattttggcgtgggcgtagtctgagaaaatagcaaagtaaggcgtggagcgttgatcctccttgcttgttctggagcatttggagagatgaatgataaatgttttcaatgaggaactcttgacatgaaactgaaaagactttttcctatgtgccctttggaatggtcaagggctagggtttgtaaatttatctttgttagattttgtggatggctcaactttgggttcgggagcctcctctcttttctatcttgcttgctttccttctaccttttaggtgctctatgtatacttctggtgcatgtgggttaagccccccttttcttggctatctttaatcaatttttttttgcctataagaaaaaaaaaaattccatgttgcacagcatttatcctctgcatttttgttatcccttttgaacttctacaaattttgaagtcttcaaaatcaaaccaaatagaagaaaatccattttttacattcctttcattggcacagcaatgatcacaaacttgtttgcaagattaaaataagatgaaccaggagggacagaaatgatggtatgtctccctggtggcagacattgcagtagaagatttctctcttcaggggcaggctatgcatttgaaaagtggtctagcttcattggagagcattaatgatgatgataactttactagaacaaagacatctaggtttgtttgctgaaatctaaggctgagaaattttatggtttatttgatgcaatcagggctgagttggaaggggaatgttttgattagcagaatcagaagcttggcaagagggctgaggaatcttagggtttatttgttggaatcagggttgagttgatgtgggtttttgatctgtaggaacagaagttcaaaggaagagatttagggagaagagatttggaaattagggttgggttaggtggggaaggtgtgtttttccttgcaggagaggaaggagagatttgggagtgaatacaaaaatagaaagggatcattaattttgacattttcaagtttttcactgtatcgaatgagagtgtgatatgttgttaagagagagagcgagagagtgcgagagcgagggtgagggcgatggcgacgagggagaaaaccaaacggagaaacggatgaaacggcaaggaaagagtttcggggtggaatcgaaggtctttgaagtagaggtggagaagagaagaggtaaaaccctactcttcattgtggaaagcaaaagaggggtttcgtcatgggttagattggggccggcaagcgctgggatttttctggaagggttggaccattgcgttaagcatgggaaagacgacaaatgggagaagggttggaaggaaaaggggagaagttactccatggtgtgcgaagtcaataagacggggagttttatcaggttaggggttgtagatgcggaggagaaaagatacaagatttgtatcccgagaggcagagggggaagggagggatggttagctatggcggaggtggtacgggatctgactgcgaggattgacagaagggaggaaaaaaaggaagagccgatccttgaaagaatgcaagctgaaatgggaaagagatgggggaatagggatagtctcttggtcagaatggaggtagagggagaggaaattagcagaaatgtgaatagattggggcactgtttggtgggaaaatggaaccctagggtagcaggaggagaggatctggcgaggttggggtggctgatggcgagtgtttgggggctgaaagggaagctaggtttggcttggctggaagagggttaggcccttttagagttcgaacttgtggtagaagccaggaaagttttcgccgctgggaaaaggtcggtgggtgggattcaggtcgaattggagctttggagtccaagtttcgagtgtttggaagaaggggaaataagagaagaagtttgggtgagggttaagggcttgccattatcgctttgggttccgaccatactgcggagggtgggggatgagtgcgggggctttgtagccatggattcttcgacagaaaaaatggaaaacctccgatgggctaggatctttgtgaaaatgaagagaggtgagttgccaagctcgttagaaattggaatcgaagggattttttataatcttagctttggtgggaggtgttgccgtcaattagacagaagccggagggtcatcggggctcaatagatcgtggctgaggagaggtcaggggcgacgaaggcgcacgcgctggctggcgagtggaagagtggggtagcgtagggctcgaggcgctgtcacggacaactgacgggatggaagggcagatgggcgggacgggtagggtttcgtctgtcggccggatccaattcgggtcgatgatccagccctcagtgggtggggtggaagatgggtcgcccttggatgggctcattgagaacaatctgggtttgaggaggactggggggcctagtccgcaattcttatctgaaggagtaatttcaaaagaggctggagttggtggggttgggcctgcgggtgagacgaaaggctctaaaggaaaggagaaggtcttagaggaggagtttgggctgtgatttgggcctaatatggtccaaagaaagagtagcgggccgttattgagccgctttaaggatattggggtgcagcctggtgggccttcagccaagaggagaaaaggcccggcagaggctcagtctaataaaggcccgatggggttcttagctcaacctgggctttgtggagaagccaactttgagctggagtttctttttaaaagggaaaaggaagctgctttagttcggaaggcagtcctctactacttgttgacaaactgtgcaaa

SEQ ID NO: 12335 - DNA, 5198 bp, Vitis vinifera
  Intron number 5 from transcript GSVIVT01028847001 (locus G SVIVG01028847001) derived from phytozome v7.0 (chr-ID chr1 6; pos 18118853 to 18124050)
tctctattctccccacctctaattcattttcccctgttcttcttcatcagtccatttcttgctctgtttttctccttcaacgtcctttccatagctagcttgccccaaaaagtctcgtctgtttctcttcacaaaccattctggactcctccatttttcagtccaactttcttttctatctgcttttcttccaagccccttcctcaagctttcaaaaattccacaaaaccctacatctccgaaaactaacccatttttggttgtgtggcatttgtgcatctacacaaacaccaatgcactaagttaacttctcatgcattgcaatgtgtgtttgttggatatgcattgcacaaaaagggatatcgatgttaccatcctccaactcgaaaaatgtatattacaatggatgtggtgtttcatgaagattcgatgtgtttttcatctgagtctgaacttcagggggagtaccataaggaaattcagactctcgattatgattatcatatctctgtggatgatgaatctggacaatctgaactagtgaaccaggaagcaggtgagttggatatgagtggtcaacaatttgagtccgaagatgtcttcattgaaataccaaaccaatcgtcgtctgttgagggtgttcttaatttggaacctgatccattcatgaaacggttaccacaccgtcataataaaggtattcctaaacccacatatgaacctgaattgtctaccaaattcaaatatcccatgagcaactatttatctaaccatcgtttgtctgaatcaaataagtcatttgtaaatcaattatctactgtagctattcataacagtgtgcaggaagccttagctgatccaaggtggaaagccaccatgaatgaagagatgaaatcattgcaaaagaatgaaacatgggaactcgtagaatgtccaccaggaaagaagccagttgggtgtcgttggatctatgctatgaagtagaaggcagatggtagtattgaacgatttaaaacaagatgggtagcaaaagggtacactcaaacttatggatttgactaaacggagacatttgcacctatagctaagatcaacacagttcgagtattactgtctttagctgcaaacctagattgaccattacaacagttcgatgtaaaaaatgtctttctgcatggcgagttatctgaagaagtatatatggatcttccaccatgatgcatggtgtcggaaaagcaatgtcagaaggtgtgcaaattgaagaagtcatcatttgggttgaagcaatccccgagagcatggtttggaaggttcacaaagtcaatgagagcttttggctatcgtcaaagtaattcagatcacactttgttcctaaaaaagcaacatggtaagattacgacactcatcgtatatgtggatgacatggtagttacaggaaatgatcctaaagaaagaaaagccctgcaaaattatctatctaaagaatttgaaatgaaagatctaggtcctctgaaatactttcttgggattgaagtttctcgatcaagtgaaggaatttttctgtcttaaggaaagtatgccttagatcttttacaagagactggaatgtcgggatgtcaacttgttaatacaccaatagaagaaggtctgaaattgtgtgttgagcctaatcaagtatcaaccgataagggaagataccagatacttgtggggagattaatgtacttagctcatacaagaccagatcttgcttatgcattaagtgtagtgagtcaatacatgcataatcctagagagcaacatatgaatgcagtcatgtgtattttgaggtatttgaagaatgctcctgggaagggaattttgttcgctaaaaatgttgatcatcagagtataaaagtatatactgatgctgattgagccagtgcagtggatgatagacgatctacatctggttactttacctttgtaggtggtaatcttgtgacatggaaaagtaagaagcagaatgtcgttgctcgttcaagtgcataagcgaaatttagaggtatggctctaggactttgtgaggcattatggctaagactccttttacaggatttaggttacctatctaggcaaccaatccgattgttttgtgacaataatgccgcatgtgacattcctcataatccagtacaacatgattgtacaaagcatgtcgaggtggatagattcttcattaaggaaaagttggatgataagattgtggaattgcctaatattcgatcagaagatcaattggccgatatcctcaccaaagttgtctcaagtcaagtgttctcaaaatttttagacaagttgggcatgtgtgacatctatgcaccaacttgagggggagtgttcagatattagaaatgttttccttatatcattctttccttatatcatttagtattgagatattaggaatgtttaaatattaggaaagttgagatattaggaatattgagatattaggaaagttgagatattaggatattagttgttatttccttatatcattatttccttgtatcattcttttccattcttagaatggtgattaccctctatatatactttgtacatgaacgaatgaaagtatgaatgaaaaaactatcatttatcaatttgaagatggtatcaattacggttttgaatccttttatcatttccattcatttcccagttagctttcttcctttctctgttaggtttcttacctttaaggtttcgtccttctcgttgcatctagttttctttagttcatcattggctcaaattcaaaattttccaaattttcatcttgtttcgtcattggtaaggtaagatttattagtttttcagttttggtttatgtttttattttcatcttaagcttggtaaagatttgtttgattttattttattttgattgtgagcttagcaaaaagaaaaaggttttttttggtaaagaaaatggatatggaatggaggactatcatgattttttttgttaaagataccaaaaatggaggggaccactattaagaactccaaaaatggagagtaccatggtaaaaaactctaaaaatgaaggggaccacccttaagaaatccaaaaatgaaggggatgagtggtgatttttgttataggaataaaaaaaaataagagtactccacttgtctatagtttctggtgagctcaaaattttcctttctaagctgatttggaatgcaagtgtgtcaagcaagatgagtttccctttttttttttttgggatgagaaatagaatggaagaaaattctgagtattgggaaacttatgaggagaggtgaagtttagttaataggtgttgcctttgcaatgagaaaagtaaatcctgtgttcatatcctcatccattgcaaataaaagtcttctctttgtttggttcatacttgttagccaaggctcaaccactccctaattatactaccttgcttgcttaagatgtgcaccttattagaggcacacctcgtctactttgttttcccctttttaacactctattcttaaaattttttactatgtattaaaatttatataatttcattattttgttgctgaatgcttctttaaaatgtttggaatcttaaaatttttgttgcttggattcacggttggctaatattttacaaaattgatatgcatactaagttgcatttcattttgcttgggaatgattgtgcttcaagtgtgccttactcctattaatgagattaattaaagttaaatatttttattaaaccactcacatatttttagtcaatatgaaatcaaaataatataatatttttatttaaaaaaattaaagttaaatattttaaatcaagcaatatagttttatatataaaattagagttaaagtcgtagttgatgactacgactttgactatttttaaagtagtcaaagttgtagttaccaactatggttttagaattaaagttaaagccatagttggtgactacaactttgactacttttaaaaataatcaaagctgtagtcaccaactacggttttaaacttaaagttaaaaccatggttggtgactacggttttgatcgtttttatcaaataaaaccgtaatcaccaactaaaccgtagtcaccaactacagttttatgatgtgataatttacatggtacataagatattatttttagaatcggtttactttatggaatttttttttaaaaaaagttgcattttggtcaaagctccaaagatggagaggggttggttttagtgatgggcttttccatgttggccttaatgtattaactaaagggcctgtctttttcgtgggcctctatttggcaaacactagtttgcattctgtcacgtcagaatgctaagctatggataattacgaaacatgggtgcttacgacggatgattgtgattcttgggattttggaagtattgtgaagtgggcattgtggaaaaataagttacttatttgatgatcatgactactgtcatggttcataagtcttgaagttctttcaacaaacccaattttaagttgacaacctctccttccccttccccaccccttcatatccaaacaaacaataggatggggtgtgtagccatctccatcattgaataatttatgataggatttgtatctttgaatgatggtacaaataaatacgttaaaaaacatgcatgtgttatcattaattatcggtatttattccatatttattgaagcaatatctttcgagtgggatacaacttggacaagttgacttcatccaacctaagtcgaacccgataattagacaatcaattttagtacttagattcattcatattatattttttcgacatgaattcaatttggattgtgattagacttcgatcaaaatttaaataactcgaacttaaccaaaatccgatttaatatttgtatgataattatgatatatatatcatcctatataatgatattaatttttttgacaaaaaaaaaaaattatcaaattataattatataatttttttggtcatttttcagtaaaatatataaatttgtttttattttttttttattatataaaacttgattccatttattatttaattattgtatgtcaaaattttgaatcatataatcagattcacttcaatttaaaaaagcgagactattaa

SEQ ID NO: 12336 - DNA, 5026 bp, Vitis vinifera
  Intron number 6 from transcript GSVIVT01003912001 (locus G SVIVG01003912001) derived from phytozome v7.0 (chr-ID chrU n; pos 13518954 to 13523979)
caaggcctggtgaacaaattgtcatcctttctcaggtttgcactcttcttcttgaagcttatataaatttggatgcataatggcttacttctgcatgggtgaatacattttgcagatgaaactttacccatactggaaatgatcaagttcttcaagctaaagctgtcttctattatagtttagttacaaatctggaagaagcaaaaaactattaacaactatttaaatcgagagaatgagtgaagatcaattataaaataatatatattttccactatgaaatgtggtcaatcttttatttgctcatagtcaaggtatttttatgtgttttgtaatatatgatccattctggtgtgttgttgcaaaaggatcgtctcttgtacagaaaagtcttttttatcaaggtcctctcctacctaaagtagccaagagatcactgctgttgagtcaccttttaccagcaaatgagaaacacccaagtgaattgcccctctcaaaccttttaggaaagttaggatctgtaccttaatgagtaggtttccaccaataggcttctaaggtctcaagaattaaccttctcatctctaacgaagctattaataacccttcatcagaaggtttccaagaagggtgttaagtccttcattagatcacaaaagggacttggtttgctctcaatgggtgcttgtaaaacgtttaggaatgggaagatttataatgagaagctgtaggtgctagaggtgccaatggagctggttaggatggagatgagtgactattcaattttatgtcttgatgaagcctgcgtttgatcactcaccaattttgtttgataggggtgggctgaggtgcggcaaaactccttttagatctaaaacatttggttcaaagtggaaggcttaggatattggagaatatgatatacaccctaatcctacaagcttaagcttgtaggatttgggttcacagtgtatatcatactctccaacataggagactttctcaagaatttgtggatggggtagaacttcaaaggcttttatattttggattccaaattgaaatctttagaggctaacattaaggttaggaacaaaggagtctttggaaatttatcaattaaaagggtggaggctttaaatcaagtgggctttaggattctaagcagaaagaagttgctttatatgtagaagaagttaaagttagaagggtcgctaggtgaaagtatctcctaggggaaataaaggaaagggtggcttagatctatcatagactcttgtccaaatcaagagattggaaacccaacattaatgttatgtcttttggatccttggacaggcaaaaagtaaggggtttgcaagtgtcattcttagaggaagaggtgtttagtgctttgtcagatttcaatagagatagagctctaggtttgatggtttttctataactttctaccacattgaaattttgtgaaggatgtggtaatggtttttttaggaagctttatgagtgaggaggttttgaaaaaagttggaatatcaattttttggttttaatcccaaagaaagatgtattaaggatttgaaagatttcaagcttacaagcgtagtgggaggtttgtatgatcttctagcttaggttctagtcaatagactaaggaaagtcgcaaagaaagtaaagtgcttcttgtgaggtgaaagtgatctataaacttgatattgaaaaggcctatggctatgtcaattagggtttctttctaacaatctttgaaaatatgaagttcaaccatgaatgaattggatggattaaatggtatacgtttataataaggttttttgtgcttgttaatcacaccctatttggtttttttagagttctaggggtttgagtcaaagagatcatttttatccctaccttatcattttggtggaggctttcaattgtatctaagagagggctagggaagtaagttttttctcaagttttaaggggaggcggaggggtggaggtgtcctatatttttttttgtagatgatactcttagttcctatgaagctttccaagactagttggtatatttaagttggttgctcatgtgatttgaaggcatcttagggctaaaaattaatttggaaaaaagtgaattaattccaattgggaggatagctaatttggagttgactttggtgttaggttgtcgaatgtgttggagaatatgatataatgaaccaattttcctaaaaacctaaacttctagaatttgggttcatagtatatatacactgttggaaagtatgatatacattatgaaaccaaatcttacaagtttaagctgttaggaaaattagttgttcaacatggcatcagagcttcgtttggtcggaggccatgtgtttgaaccttaccatcgtatgtttatttccccaatttattaaatatgtgtaagcgctaaaaaaaggctacacatgagggagggtgttggagagtatgatatacttgtaggatttaggttcacaagtatatcatactctccaagagcatgatactttgccacatagtgctttttctcgagcatggaaaaagcaaaaagggtcttgtcatcaattgcatttcttctctcaacaacacttttctttgctagtggagttggagatgtgcatacgaaagtgtggctctatggagatagattaatgttggcaagcatgaataagaaaggggatggtgcccttgtgaaataagagatgggtttgaattggattgtgcaaagatgcctagagggtttggtatttttcaataattgatttccattgttgtaggtgatagaaggagggtaaagttttgaaaggataggtggtgtgaagacttgccctttagcttctcattcctctcgttatatgtcattgtcttagctaaagaggctcaagtggtgtattcttagaaccaattaggcaaaggagaccattgaaatctttatttctctggatagttgaatgattatgagcatgatagcataaaggtgtttctcttaagaatgtaagaaaagtcaatcaataaagatgaagaggatataatggctcgaatggattcaaagattgaaaatttttcaattaaatccttttatcttgctttggtgctaaggaggttgatgtctttcccaatgggtgtaatttggaactcctgggttctgactaagttgagttttatttttgcttggaagtaacttagagaaggattttctcttgattaacttcataggagaggttagacttttgtgaataaatgctttctatgaaaaagtgaagaagaacaattgatcacattttctttgattacaccaaagtaagggttttgtgacaattgctttctctttgtacaaagtagcttaggtgatgccttcgatggttagagagatttttttaagatgacatgggtctttcatggggagaaagcataaaaaggtctggagggccaattttttgcgttttttattttttattttttaggagagaaatcaaagattatttgaaagtaaggagtaataatctcaccatattagttgtccttggtaactcatcttcactttcttggaaccttaatttccgtcacaatctcattgatttggaaattgagaaccttaaaagattcatgtcctcacccactttggtgcacttatctccatctaccgtaaatacaagagcttcgtctttatcctcttcaagtattcttagtaaaatcatgtttcttagccttgtctaatttaccaaatccaatcccattctttcctactaaaattttatggaaatcaaaagccttatcaaaggttaggtctttgcttggttaatggtgtacaagaaggtaaataccaataacatacaatagttgaaaagaccttacaatttccttagtcctcattggtgcatcttatgcatgggaagtgaaaaattaatcaacctttttttctacattgtccgttaacattggggctttgacataagcttttcatcctagctaagatggattgggttccacccaagagtattttgtgatatgatgatcatctcatttagagatttggggagtgacatcaaacacaagatactttggtaaattgtttgcctcattgtgctttggattgtgtggcgagagagacatgtctagatctttgaggaaaagtggagcatgggagagatgttgtaggatctacttaaacttctattctttcttgtgcgtctcttgtaccatcacttttagaggcattctactaaatatcattcaacttagttggctttctatttgtaaatcaaatgaggtggataacaatgagaggagttgagttcggttttaaggagatgttaccttttcttttcctttagtggcctatacctttgtgtataattctccttgtatagtggaggtatttagtcttactttgatcagtattttacattttattgggaggactcattctttctcttgtgcttttttcataattaatatatcttttgttttttattaaaaaaaataaagagtaaggaacagtaggatcaaatgctcaaatctatattccttagtaattctgtagtgtgggttatactgtttatagacaaaggttcaatgttttggttaattttgtaggatacatcttgtgcactttggtgttgctttgataggtgccatttataatttctttcgtacttgcctagaaaaagaaatgccttttacatgagatatatatatttcaatctacccatgggatttataattcaggataacaaaatgcataaattgatatttggtttacacataatttgacaccttgcagtgcctctaatgctctatagatgtccaactagtaactgtgctgcttatgttgtgaaccccttggtttattgctgagaaactagcttcttggactccttattgtaataatcatgtacagaatttccatatcaacctaggaaaactgtcttctttagccaccatgtgtctcaagttataagatacaattccttatttggttcaggtgctg

SEQ ID NO: 12337 - DNA, 6809 bp, Vitis vinifera
  Intron number 7 from transcript GSVIVT01036033001 (locus G SVIVG01036033001) derived from phytozome v7.0 (chr-ID chr4 ; pos 7614696 to 7621504)
aggtgagccacttaaatgccttcatagatggcttctgaggaacaatatgacatctgttttacctcttgaaaatcttatatattctatgttaattgtaaagtaaaattccctgtggtccatatctcatatttatttggtttgcttttatgaggttattttgccccagtattttttagatcttataactggaaatgatgaacaaagataagcatacatatactcacacatataatacatttaaaccattctggttgtattttgctctgttacagcttggttaaaaaaaaatcaagctatgggtatctaaagtttccattacaacttgccacattacgagtctagaagttataggtttgcctagtaaactatatctgcatggacttattctgttgattctgcaagcatttcagtcaaattgttttcatcttaatcaaatatagagttttgagaatatgatagaataaaattgtgtgctatcaagaggaaaatcttgagattagagagcaagatggtagtgaaggggtctggttttttgatcattgcaaggagtcaaggaacttccatcccagcgccttgaagtttgagagagaaggagcaggttggatagctcagcagctgccaaaatatctagttggttgcatggcttgtgaggaagatcagaggctttctgttggaactcatgtcttcatagtaggagtgtttattttgggaggattcgaagatcatagcccgtaggaaaaatttaatcattgtgattcatgagggggccagttgcagctgatgggtgaacatgcgatttttcagcagttggaaactagggtgaaaatatactcgtgtttttgttcatttcaaatatcattttttgcacattctttttgttgttttttggggggttttcattcattgttcagggcctttttggcatgacacttggctttcttgattacacttgatctaattgcacaatttgtgattctttggagggggataggaggcttaagggagatgatgatgtgtctagatctccatcctcctttgcctttaaataggagtctttgggcttattttctttgttttgggggtggggggaggggattcttcgattttgaggggaaactcttcccattttgagagagagttgaagaagtaaggagaatttgaatacttagaggcatccttggcttggaagaggacttctttgcaaactagaagccaagtattttgcttggaggagaatttcttggatcgatcacttataattccgagatttgtgttgttttagtttatttcttggggttctttgatggtgaatatataagatgtggatcttggaagatcatggtttgtttaattgtactttttctcttcagctttgaatttaaatatggttttcttcattttctttgtcttgtgtgcttattagatatttgattatacgtcgaaattggtgccttgatgttgtttagaccttggatggtggttatttgttctattcttggactgatttttattttttggagttcgtcgatccttaaagcatgatatgagccttgattggatatgtaatatactttttttctctttttctttttttgcttcttgttgagcatgagttattcttgttttcccaagattctaggggtgtttttgaaaagagaaaatcaagagcaacatgtgtttgttattttggcaataccattctttaaaaaaggctttgtttagccattctttaaaataggctctttagagccattcttttaaaaaggctctttggagccattctttaaaaaaggctctttagagccattctttaaaaaagactctttagagccctttttgtgggtttttgatcttgttctcaaaactgaatgttaggttctattttttccatgttttttttttaatcatatttcaagctccttttaatggtcattttcgtgcccaaaggctaggttcaaggcaatggaccttagtgttgtaaatttgcttgaaaacattaactagttgctctagattttttgttaatttctaaagatttttaaactgatttttatgagtcctatttgtagacatcttgtacatgttaaatacgtcttaccttggcaaatgatcccttgctaaccttgttgaataaatttattttttacatgcttgtgcactgtccagtttttgagttataggatgttcttttgaatgtgattcttttggtggatgtttgaccttgcttgagtcttgatatgttctagatgccttgtacattcttgagaagttttgttttgttgataaatctctttctaaccttttgaattagtttattctttcttatgtatgtatgttgtcttatttttacactcttgaggtaagtcatatatattttgttggttaacctctttgttgaacttatttatctctttggtctcttttgcttgctttgctttggtggaccttgatcttccaacacacatggctcatgtattcgtcatcatacccgtgccttttgtcaccatgccttgttgtatgtatatttgtgcttttattttcttggtatccatgattaattagtcaattgccatagtttcctccacttgtttagtagaaagctctttagggcttagagaggtgctatccttatgataccttcccagtaagtacctagcccctaagcttagactcagtttttcatagccatgccttttctttttccaaaaggagtcatactatgattttctttcttattttgtttttccttttaaaaataaataaaaataagcgttgacttcaattttcataaatcaaattttcacaaataaaaaatgagttgatcataaatattatgaaaacaagagcacatatatacaaaaaggcatgatgaaaaaagataaaggaacgatggtgaacgtgtgggtatctaagaaaaccaaggtgcacctggacaaagtaagcaaaaaggataaaagagataaacaagttcaataaagaggttaatcaacaaaatatgcaaagcttaccccaggagtgctaaaacaggacaacatgaatacataggaaagaataaattaaatcacatggttaggaagagacttaacatcataaccaaaagtttctagtatgtgtaaggtatctacaacatgtatcaagactcaaataaggtcaaacatccttaaaagagaaatcaaatttgaagaaacatttcatggctcaaaaattggacggcacacaagtatgagaaaaataaattcattcaacgaggtttgtaagggatcatacaccaaagcaagacacatgtacaagttatataaaacacatatcaaaggtcaaaaatggtaaaaaatgcatcaaatggggttgactcaaagaaacattaaagagtgaaaaaaaaggagacaacatgtgagtttgtcaaagaatgatttattaaactaggttaaaagtgagttacacaccaaggaaaaaatcctctaacatatacaagatgtctagaatacatttcaaggtttaaagatgcccaaatatacaccaaataatctagagttgaagaaacatttcattgcacaaaaacaggacagcacataggcatgcaaaagatcaatttattctataagcttagagatggatttttgaacaaggaaaaattccccaccatatttaagatgtctagaatatattccaagctaaaaaaaataattaaaaacacacaggattgagtcacaaaaacttttcatgatgcaaaaacagggcagtatataaaaacatagaagaatgaaccaatttataaggcttcaaagagttatacaacataaaaacatggaagagtgaaccaccaaagaatgaattctctacattattcaatatatatgtacaatttaaataaaaacctaaataggcaccaaaaagcctaaaaaaaatcagatttaatgaaacattagaaacacccgaaataggacattattttaaaatttaaataaacaacaattttaagcttgcatgaggatattatttaagcaatgacttgcaacctaaattatacacaaatgattctcaaagcaagataaaggatattacataatcgacacaaataaaaattactcaaagagagcttaaggagatacattaagcacagctgaagcaaatcagacgcatgcatatgaactagtgctattgaaaactttcaatcaaatgtgccaagaccttggcctagttttattttgcaatgaacttcccacattctcaagcctcaaatgagcatgtaaaagagttcaaaaggctaaggatatgtcccataaaattcaattttgaaaagaatttcaaaggctgtaaaatgaagggaagaaagttgaaccaaggattagaagtaaaatgtaggcttaaacaatagcctaaattaatttgcagggatattttaacattctagccctcaaatgtgtatattaagaggctcataaggccaagaacaatcttgttagattcagattttttaagaacaatccccgactctagcaataagaagggttgaaaaacaacgattagggaaaagtgagtgatgttggctaagagcataaccatagttcaactatagggctcccacactttcttgaccctgaaatgaacatgtaatgaagttcataagaatcaaggaatgcctaattatactaagatttgagaaaaggggctaaaagacacgaagacatccataactaagcatactcttaagtgactttaagatatgtatgctaaagctcatggaaaccattaatgatcataaattctccgtaccttcaagccccaaatgactataaaatggagttcataagggctaaaatatgactcataacaaccagtttaaatttttttttgaaaaatggtgaaatgaagagcacctagttggtttttcaagttaaattaatgaggccaaggccattttcttgaaccttgccttagccatgaaaatggccattgaaagaagcttgaagtgaagttaaaacaaggcaaaaagaagtgaataagtttcagttttgagaaaatggtcaaaacccacaaaaattactctaaagagcctttttctatataaaaaaaaaggttttagcaaaatgtcaaacacatgttgctcttaattttttctttccaaagacaaacaaatcaccttcaaaaccctgaggtaaacacatagaaagggtgttcctcaagatttgaataaatcaaaagaatgtacaagaagacaagtctcatatcatgcttaaaaagagtatcttttgaaccactaagtagacaagagttatcttttgaaccactaagaagtacaacaacaaccgatgaagaaggaaagcttacacacactatgtaaggaagcaaagcaagagggactgagtacaagattagggtacatgtgcaacatggacaaaatggagggtctacaagtggttaagtgtctacatgtatggacagagtctgtgaagcaggagactaaaatttaaggggtatgtggtggttcaacccctaattttagcccttgctctactctgtctagcagttggggaatcccttatctgtagtttatctgactggaaggaaatcatttacaattcagtaggattttattcagtttaaatgtcttggcaactcatttctgtttcctttcaattctcacttggacccagtaattagagacctgagtattacttggatactttatgttttgagtaaatataacagaataagctaaatggcttggctactctctctctctctctctctctctctctctctctatctatctaattttttggggattaatattcataatatattggtttaaaattttcttgctgtgccatggacatgatgatttgtgtcaagttagtgcattctcaattttttgtttaagttgaaggtttggtacctttgtgatagcaagataaagcctgtgcatttcaaaaagggacaaagttatggtcagaacatgggcaaattgcatgttgataatgggattcaggaactctattattctctagcctcctctttaatttaccattttctcaaatttctaagtctagaatgatagttttatttcatttattctctatgcataaatatatccatacattgcatatgtgaaaaaaggtttccttttaaccaagttaacggaagcaaaggagataaaatgtactgagttaaatttaaaatgtaggcagctaggtcacactagcaatactggggttggatggtagttcaaatacaggataggtgtatggaaaattgtctagaaagtttttattgcatgatttaacagctctaaactggggagtggtgggatgaccctctttcaggaagattgtagatgcatcctttaggacctttttcctatttatacagaatatcaagggttttatggtgaattacttccttgaatgtaagagctggaggcattgtgtgttccacctattctagagaagtgtatttagtcagaataatcagtttgcaggccaaacaatgtgcctatcattctctctcccccatgtgggagtgctacaactcaaaacctaattgtttcttattaacacagcattgctagatcctcagttgtttctctctaggaaatggatatacattaaattttttaatcaatggtccacatgttcccaaagttcaaattaaatggtcattgtttttacttagtcctatccacttcactcttttttattttttatttattttaatgtgtagctccttaaacattgtattatcttcagtgagaatgtcaatgcatgcttatggatatcttcaggtctcccttgtattggcaggtaagacat

SEQ ID NO: 12338 - DNA, 1624 bp, Vitis vinifera
  Intron number 3 from transcript GSVIVT01007565001 (locus G SVIVG01007565001) derived from phytozome v7.0 (chr-ID chr1 7; pos 11962190 to 11963813)
accaaaaaaggtctctttctctattgatcaaaaaggtattatggataggatctttttgttgttttatcatatgaagaatttcttactttgatcaattgttaattcttttcatggttaagtagaagttaattgcactttcttcaaattgcaatttgcccatgcattgcttgaacatgtttccaggtaatttgttgcattcatccatgtgtgtatttatttattggaattcttgttatgtttatttgcacatgtggatttaaagagtagcaaaccgtacacatgattggcacttaacaataatttcttttgttgaagattttacactttgtttcatgttgagaatcacagttataataagttaaaatcatgtaatcatatttatgaccttttagagttagtaattaaggatgatttgttgtttttcttttccttttcttttttttttttcctctttttgtaagcttgaacatggtttgagggtattctgtgtattttagctcaaaattccatgtatatgactgcagcaagtggttgaaaggacagatgaatggattttcagaagtaaaagaaaaatggaagtttgttttggccaaacctctatctcaaatagctagagattatgaaaattgtgtatcataattatttgtgatgatgtagttcttgaatagcttggaatctgcaatcggcaactaatctatcgttagtagccactgcttattgataaaggctagagaatggggctatttgagaggaaagataagggaggactcagtgtggccctatggcagtaggatgagggggccatgctatgggatgtggatttgggcttcaaagagtgaattgtattctagatcaaaaccccaggaccctatcccttagaatgtggcttcatgggtcttatatggaagattggatgcatgtgagggtccacagcagtcacagtaggccctaaatcaattacaagattaaggatgcctgcttgatgcaaggctagccagtctctaaccaaagttgccattgctagaatattggaggtcaaacatacatgtaacagaaggataggttagctggtgccattactgggaggcacacctccctttattatagatttgaacatagtgacatgcactccttgtggtcagtccaggcatggattagtttcaggaagcattttctttttttatcttgaaataagcaatgtaccatgaatcttgttatattcaatctttgaaaatgatgagtgattctctacagtggaataccaaatagggggttcatggttgaactcatccagctgggttttaaggtctaaataattttaaatttctgtatggtagaatgacagaatggcagaatggcaaatgggttcatgtggctgactcgtccagctggattaaggtctaaatagttttgatgaagcgcttttttgtacacttctgaaaacttttccatttgtaatggtattctggtcattttcttctaaagagaaactatctcataactttgcacatgaaatatctattccataatactgtgttttttttcctctttgaggtgctttccttgtgtgtgaaatgtgaggggcaatccactaatatattgcttttgttcttagcttcaaagc

SEQ ID NO: 12339 - DNA, 1768 bp, Vitis vinifera
  Intron number 2 from transcript GSVIVT01033687001 (locus G SVIVG01033687001) derived from phytozome v7.0 (chr-ID chr8 ; pos 18686098 to 18687865 reverse strand)
gccccacaagcgcaaagtctccgtacgcaagacaggtaaggttttgatacgcttctctgttcagaactctggtattgataatgttgtgttgtggtccaattctttaattgtgagttatgtgatatactttttgttgattgattttattacacttgctttagaacatgggaatcgtgttttttcatgagaagaaattgtaaaaggggaatttttatatactgctggatccaattctagaattcggctgattgatgcaaggcataagagtgcttactcatggaaggaaaccttgtaactcatatgatttgtccagaaaaataacagtaaaatcatttggagaactagaaagctagggattgttgcttgacttgggatcaaatctgaagtagttgggtagggcatttcccatttttataggatcttatgtaccaaaaacaatggtatctccaattatagcccctctaggatgtaaaatatatctcatctcaccatccccatagtgtatgagacaaatgcatgcattttgattagggttgtattctatggttacgattctaccataaatgtctttttcattccatcaaaaattgattttacggtatagacgcttatgacctccccctctatgccctgcaacaatgatttctctagcattatgacctttaccacaacgatgtcaaattattttgtggattggatttcaagacgggggaattttggttcttcatatcacacatcttgtttcttaataatttaaacgaattctattctattctaacagatagaaaaacaaatcttaaataggtgacaaggttgttactccatactggctgaaaaatagggtgcctgcccctgtgacattcaaatcattatgcaccctggccttctcatgtgtaaagttttgcacttttgtggatcttttatgggcaattcagtttgagtgagttgaaatagttaaaatctgaaaaaaaaagaaaagattataactctggtatatttagtgtcttaaaataaaaatgggcatcgatgcataagtcaattctctaattgggtttacccaatcagcaaacctaaaacaaaagcagtgaaggttgatccttcaactcaatccaactggacaaacccagggtcatggtgatttggttagtttctcaggttggactgaagcaaggtgtatttggattcatcaataattcaagtttcaaaagagccctaattaactgtcccttctgctaaaaggaaaaaaaaaaggatgctttatccttcaaacatttacagtggcataactatgctggggttatcatacgccatgtcagactgtgctggaacttgtgttatgtttgactgcaggaacgatttgttcaacttggactaagaagtaagataaattttactattattattattattattagtagtagtagtcatagtagatatagtaatggtagtagtagtatctaggaaagtattgttatcattatcattatcaggactgatcatgtaccttagaataaaaatgagatattattattactacaactattattgttattatttgattagtcatctgttcaaaatatgattgttttttggttagccaacaatatggtggatatgaacttgcaaagcattgtacaatagagttgtttttgacttaaattttgaagttttacatagagttcaggttcttaatctcgagaactaagttctatgattcttgggtgtgttttcagttaaaattggtaggcccgggtatcgggtaacaaag

SEQ ID NO: 12340 - DNA, 5465 bp, Vitis vinifera
  Intron number 1 from transcript GSVIVT01012061001 (locus G SVIVG01012061001) derived from phytozome v7.0 (chr-ID chr1 ; pos 1716353 to 1721817)
cacaggagaataaaaggagggcaagtggaaccaaagtaagtaaattgaatgatataatattttattggtcacaagatttgtacaaatgttttggctttttaagacagggttgccaataggagccttctcgtttcggattgtggattaatcccacttttttgagtacccaaaaaattaggaatcgtgtcatctttttgggcattcaaaatagggaaaaagaataagaaaaaaagaaggaaggtccatttttttgagtggttttttttttgatgttgcaaaatgaaaaaaagaaaaagaaaaaaaaaagttagagtctacaatttattttttaaaaaaatggatagagggaaaatgttttgtttttaaatttgatttatccatattttaaaattataataaaattatgtttttttattggaaatatttataatagtgttttaagaatatagttgattgtacaaaaatatttttacttcttcaataattgaaatgtaggagttaaaataacaaaggctaagtttaatacaaaaaaattttgaaataaatttatagattaagctaatttttagaaaacatttctaatctaaaaatgattaaaatagtccatttggtgatgattataagaagcgtttttaagttaaaatgtgtttttgaaaaaaaaaaaatgagtgtttgataaaattaaggaaacagaaaaatgttgaaaagtcaattgtaatgttttatagaaaaacacgttatatatgattttctaaaaaaaaaatcattaaaaacactttgagtataaatactatcaaatgcaaaatgttggatacaattttaaaaagttaaaaaatcacttatattttttaagaaatatttgataggtgattattcaaaaaacatttataatttttactaaaagtgcttaaaataaattactatcaatacttgtagaaaatccttatagtttagaaaatatttttgaataaaaaagagatattaaataagatttagaaattaattttaaaaaaattaaaaaattcgcttatagtagtttataaaaaacacttagaaatgtgactttccaaaaatgtactcttagaaaataaattttttactaaaaacacttcaaatgaaaataatgtttaaaacgagttcaaattaaaataatatttaaaatgcgtttgataatgattttaataatatttttaacctttttgatgttgaaaaataaaaattttccaagtgtaaaaattgctaaaaacactttttaaaagcaccttcaaatgcaataaacactctaaaagtgatttcaattttaaatttcttttaaagtattttgtttatgattatgacgttagtgactcacaaataaagaatctatgaatttgaatcatgattgatacttgtgaggcagagtcttaaccagttatcatttaatgaatttaaatccatgattgatggttgtgaggcaaagtgttagccaattctacttaacatttaatgaatttgaatccctcaacaaagtcttagccaatttgtcatctttaagagaaatcgtgtgaattaattcaatacatttcttttcaaaaatagaaatctcacaacccaaaaatatactcctagaaaatatatttttactaaaaatacttcaaattaaaataatgtttaaaatatgtttgactttaattttaagaaatatttttaatctttataatattaaaagataaaaaatttcaagtattaaaaagagtaaaaatacttcttaaaatcattttcaaatagacactctaaagtcatttcaattttattttttttgtaatattttgttcatgattacacatcagtgacccacaatataaagaatctacttatcatttaatgaatttgaatccataatcgatggtgttaatgcaaagtcttagtcaatttgtcatttttgagaaaaccgtgtgaattaattcaatacatctttttcaaaaatagaaatctcacaaccaaaatattctcttagaaaatacatttttactaaaaacacttcaaattaaaataatttttaaaatatgcttgacaataattttaagaaatatttatagtttttctaataataaaagataaaaaatttcaaatattaaaaaaaatattaaaaacatttcttaaaatcactttcaaacacactaaacactttagagtcatttcaatttaaaaaattttcttttaaagtattttgttcatgattatgacatcagtgacccacaatataaagaatctacttatcatttaatgaatttgaatccataatctatggttgcgaggcaaagtcttagtcaatttgtgatttttgagagaattgtgtgaattaaatcaatacatctttttcaaaaaaattaaaattaaaaaaaaactaaaaacatttcttaaaatcactttcaaatgcactaaacactttagagtcatttcaatttaaaaaattttcttttaaagtattttgttcatgattataacatcaatgacccacaatataaagaatctacttatcatttaatgaatttgaatccataatctatggttgtgaggcaaagtcttaggtggtgtttgtttttttacttaattctaaatataaccttaatacttaatagtgttaaatattaagttgtttatttttataatattttatttttattaagtattaaaaagtaaagaaaaaccaatatgttattttttctatttagaaaaagttacatattttggatttttttatttagtaaaaattttataataagttatgaaaaagtagataaacaaacaacctaaattttgaaaacaatttgttttcagcaaaaagcaaaaaaaaaaacaaacaccaccttagtcaatttgtcatttttgagaaaattgtgtgaattaattagtacatttttttcaaaaaaaaaaaagactaaaaatatttttaaaaatcactttcaagcacaaaacactttagagtcatttcaattttaaattttttcttttaaagtattttgttcatgattatgacatcactgactcacaatataaagaatctacttatcatttaatgaatttgaatttatgattgatggttgtgaggcaaagtcttagccaatttgtgatttttgagggatccatgtgaattaatttagtacatctttttcaaaaattataaaaatttcataataagttatgaaaaaatagataaacaaattactttaagcaaaaagccaaaaaaacaaacaccatcttagtcaatttgtcatttttgagaaaatcgtgtgaattaattagtacatttttttcaaaaaaaaaaaaagactaaaaatattttttaaaatcactttcaaatgcacaaaacactttagagtcatttcaattttaaattttttcttttaaagtattttgttcatgattatgacatcaatgacccacaatataaagaatgtacttatcatttaatgaatttgaattgatgattgacggttgtgaggtaaagtcttagccaatttgtcatttttaagagaaccgtatgaattaattcagtacatcttttttaaaaattataaaaattttataataagttatgaaaaagtagaaaaacaaacaacttaaattctgaaaacaaaccgcttttaacaaaaagccaaaaaaacaaacactatcttagtcaatttgtcatttttgagagaatcgtgtgaattaattcagtacatccttttcaaaaaaaaaaaaaaagaataaaaatattttttaaaatcactttcaaacgcacaaaacactttagagtcatttcaattttaaattttttcttttaaagcattttgttcatgattatgacatgagtgacccacaatataaagaatatacttatcatttaatgaatttgaattgatgattgatggttgtgaggcaaagtcttagtcaatttgtcattttttagaaaactgtgtgaattaattcagtacatctttttcaaaaattataaaaattttataataagttatgaaaaagtagaaaaacaaataatctaaattctgaaaataaattgcttttagcaaaaagccaaaaaaaacaaacaccaccttagtcaatttgtcatttttaagagaatcgtgtgaattaattcagtacatcttttttttaaaaaaagactaaaaatattttttaaaatcactttcaaatgcacaaaacactgtagagtcatttcaattttaaattttttcttttaaagtattttgttcatgattatgacattagtaacccacaatataaataatttacttatcatttaatgaaattgaattcatgattgatggttgtgaggtagagtcttagccaatttgtcatttttgagacaaccctataaattaattcaatacatctttttcaaaaatagaaatcttctcgccaaaaatatactcctagaaaatatatttttactagaaacactttaaattaaaataatatttaaaatgtatttaacaataattttaagaaatattttttctctttttaataccgaaagataaaaaatttcaaaaataactgtcaaatacactagatactctaaagtcatttcaattttaaagtttttctttttagagtgttattttcataattactacgtcaaaaatctacttatcatttaattaatttgaatccatgatgtatggttgtgacacaaattcctagtcaaccgtgtgatattagatacatcttcttcaaaaataagaatctcgccgccagacccggctatgggccgtggaacttgcaagctagtcaagagtcatgctctccgcccaacaagtcctttcataaaaagttaaaaaaaaaaaaaaaaaaacatatttttgaggatggtgctttaaaagggtaagaataatttattaaaaaattattttttattttgtgtcatgtacaaaattttaaattattttatatatttttgtttttttttttactaaaaattttgtttttttagaacaaatttatatattttctcatgtgttttttttttgtaaagttcttggaaacacaaataaaaatatggactttaatatttttcatatatatatatatatatataatgcgaagaataatttgaaaaaatagattttacttttgatatgaatgaggagtatttttcaaaatatttatccataactatttttttaaatcattgtcaacaattaatttttaacaattattttcaaaaatcttgtttctttttttattctttattttcaaaaatagttacttagagcatgtttggcagtgtaatttaaaaataattttcgattaagtgtcatgcccaattaacccaaaggttgtcaggcccaacaattggatgggcttggcccattaaatttggagcccatctcgagccccaattccaagtcggtttggggtcaaattgagaaatattaagagtgaaaggacttttatatatacaaaaataaaagaaattttaa

SEQ ID NO: 12341 - DNA, 1409 bp, Vitis vinifera
  Intron number 17 from transcript GSVIVT01010441001 (locus GSVIVG01010441001) derived from phytozome v7.0 (chr-ID chr 1; pos 20650387 to 20651795)
gagcttattttgattttggaaatcatacagagaaggtatgcttctgatacatttttgttcctttcaggatattgtagtacatttattttgtggcgtaccaatataaactaagcatacactgtggtccaccatgttctgtgcaataactcctctgagctgatgtgcctatggtgtatcaattccaaaatgtttcatctttctacctgcttattgattcattgtatattaaagaatttttaattccatttttcctttaatgtaggcatattaggttcaattgttgaccaagttacttccaagagttaacttttgatttgacctgaatttctattaactgatgaggattgaaacaaagcttatggatttcaatgctctagatattgctgataagcataatgaattggctctaggactgcaaatcggtagtctttttggtacattaaggagagtgtaagctgcagggttcacacactacatgtcttaatgttttaatattagatttaaatggattctttgtgattaaatagcttattgcattttgcatgactttatgtaatcttcaattatcacacctacaacaatttatgcacactactgtgtatcattagtccagaaataatatgaactgataccaataaacttggtcatattgttgaacataagaacaatcagagacttcttattcgtcttattttcaaatttctaatcccccttttttataagtaaaagaattgtactagcgcaaagaggggtgcaatgaatgcaaagaacaggagaggtgaagactagcagtggataagtatgggttgaagaacctaaaagtggggaccggctataaaggaggcattgtattgatggagaagattccacaggctgagatatagaatattttgttaacgcaaagccataatgctctaatgatgatgttttttctgatatacttttaataggattagttgttattatatagtagtgctattaatgagaagttcatgtctgccaatttgctgagggggaatatacacatgtggtcgagtagcaggaaggttatgttgtccttttctgtaaattagaactatgaccgttatcagtctatgcaagaaactaaatcaatttttatatttccagtagttgtactaaggtgctaactgatattttttttttttttgtaatatattttctccgttaaattgttaattgtagattaatatcaacaactattatcaaatgagtgtggatttgagtgatgttttcttcatatattttcgtatttccacactagcttagattttattaagtgaacatgctgagatttgctttttgcttatggagtattctgctattaatacttgataatgttttcaatcatttcaggttcgattaagttggaaagaagtgagggcagggaa

SEQ ID NO: 12342 - DNA, 3243 bp, Vitis vinifera
  Intron number 6 from transcript GSVIVT01029042001 (locus G SVIVG01029042001) derived from phytozome v7.0 (chr-ID chr5 ; pos 11257667 to 11260909 reverse strand)
caagaagcggcttatttagattgcttcttgattatgtttgacttagatgctaatatgatggatttccttgagcaagggctaaggatcctcggttagtatttctaagagaaatgccaaaattgtttattttctgcttcaaacaaagatgttaaacttatgttcaagaagctaattctgcagccaaatatgcctttcctattgtctgctttggagaaagtggattcatgcatattagtatagtcttttaagattttgttttacaaatgacactacttatgaaaactcaaaatctatgatttatgtgaaaagattcaaaactaaacatttcttgttaatacctaaatatgcatgaagcaaaagaaatgaaaatatgactatggattatacaaaagaagtcaaaatagattgtgaaaagactcaaaatctatgatttgttttaatccattgtctatggattatacaaaagaaatcaaaatatgactaaattattttaaagcttatatatttttaaattctccattcactctttaatagaggaatacaattggacaaccatggtttgaacttgaacttatttattttttcttttcttctttattatttcctttccttcatactgtctcttaaaattttcgcaatccttatggagtcttaggggatttggtcattaattttacttttcattggacattatctttattgatggaaagtaaagggggtcaaatctgtttgtctttgtcttcttctttttttcccttcctgaatggtcaatcatgcaatatatagatgcaacgtggcatttttgtacatacctatatttcatgttattttttgttattaaaattggacctttttggaacatttggcttgagtatttgtccaagttttttgaataactgtaatattatgcactttgtagcttgacaatgtgggtttcaacatttcaaaattgttaacacattgatataaatgggcatgaccacaatcaaacaagtttcatgatgttgttatatcacaagacaaatctatatgtggtaccaacttgtgtcagtttcattagtacttatgtataatgatggaaaatatcggtgttgatggagatattgatggttcaattttatggaaatatcaatatcaatggaaatttccataaaatttaaagaagttagtaaaaatgactaaaatatatgaaatttttttatgaaactttaacaaatgataaaacaattaataatacatgttttagaacattttttttaaggaagcaatataagtatggtatagtaaccttggacaacaaaagaataggtgcaaacgtcgacgccatgaaatagtctctatggccaaacatactttttttgatttcttcccaaagcttatcatgaatggaagttatttgaatttcccatagtttaagcgcgcctaagctcaaggcgccaccactccctagttatagcgccttggttgccaagatatgcacctcattgaaaaggcgcaccttgttagctttactcttccttttaaacacttttattcttgaaaattttaattatatgctgaaatttatataatttcattacttttttattgaatgcttcttttaaatgttttgaatcttaaattttttattgatcagattagattttgaatcatattttacaaaattgatgtgtatcataggtcgcatttgacttcactcaggcgctcgcattgtgttgcgcattgcgcttaagctataggagacttttgcgaacgaggatagttaaatatcagtgaaatatctatatctctgatgggggaaagccttttaaagtttattcaaggaagaaagggaagacctaagtaaacttttaagtaggattaatattacttagaattgaatagggattggtatttattggagtctaattaggattagctagttgagttataatataattagaatttgagtcatgataggttattagagtcctagtagactttggatttcttagagaagcctataaataggctaatcaatgtaaatcaaagggatgaatttgatgaataatattacattttctttcattgcaaggttgcaaccctcaatggtgagactccattgattttcttctaggtgagactcctagaaggccttagtgagactctaaggttttccatcttttcttcattgtttcttctttctctctatttcttatcttataattttctctaccataaaatttattccttgttcctctccttacaccctaaaaataaaatcctagcccacctacccttgagtgtaggcaaccatcctagggttgtcctacatcaatctcctctttcaatattgatacctttaaattacaaatacttcttgggaaatattggagatattgtagatgttttcatcctttatgtatctaattgtgtcaattttctcactacttatgtttagttgcttagctttaaactgtgtatatatttatcgttattccaaaatatctactattaatgtttgtcaaaccaagttttcaagtgaggggttattaatcttgtactaaaaggcaaggcaagaaagtcatttaaagtgcaaaatcagtggaaaaaactgaattcctatgtcaaattttattaaagaatctcagatcccccaatattattcatttgcagtgattgtttttttgggatgctttgtgtattgaaagtttaccttcgactcttcttcattttgtttggatttacttgccttgatgtatctcttcctttctcaatgaaacacaataggacttctgttattcattgatttttattttatttgatttttgtttgcgcatagaaatgttcacgttgtatttattttattttatttatttttaattcttgaaattttatcaaacctaacttcaatttgattttctttgccttacagtgtaccatgtgtcttagatagcttttgcatttgcttttattcttgtttagcttctctgttgctagtttttcagctttgggaggagatcctgtttccatcaacaatatttccttgattttcttttgtcattttgttggtgcacagaaatgtggaccaattttgtttagttcctgaaactttatctagatctagcctcaatgtaatttttctgcaccacataatgtggcacatgtcctttaaagccatcacttatgttttattatatctgttgcagttgcttttggacttctttagtttctccgctgctagtttctcagctttggcaagat

SEQ ID NO: 12343 - DNA, 13373 bp, Vitis vinifera
  Intron number 4 from transcript GSVIVT01020329001 (locus G SVIVG01020329001) derived from phytozome v7.0 (chr-ID chr1 9; pos 21267535 to 21280907)
aaaatattgaagttgtaattctctcaaggtgtgtagtttgggatttgaattatatgtaaagaagaaatgctcttggaaactgcagcacgatgaatcttgaatggttttccatcatatggctttgttgtttggagatgactaagtaatattagttttaccaatcctccggccttaagctagcatgtgaaagttgtagcattagcggagagttgataacagtttctcggtagttggaagcttgaaccctgacatattagtgcaaggacatgaagatattaaatcattcatacaatttattgtctgagaggatagaaaaaatatataaaaccacttaagatcttaaaaacatcctatatttctccattttttgtatttacactctgatccatggactttcaccccacaaaatgtctcacattctttttcaaatttctacctacatttaaacttctcatgtctattttcatctcataacttttttctcctcatgacctaattaaaatatatatagagataatcctaccaacttttattttatacgcaaacctatttatataaggaattaattgtaaaatatcctatataagctaccttagcatagttgaattaggttataaattttattttgatacaataaataacaaaaatccatttataaaaatatataaaaatccaataattgtataggagaaaccacacttattttaaataaataataaagtacatgctccaagtattaaaaggttatctttggtgtgtatgatttggagagtcccagataatgtgcaagtagatgagaccttgagtgagatgttttctctttcaaatcaatttcaaagttgcgaaatccaaaatttcaagctctttttagaagtgttttagaaaatagttcaaaaaaaacacttcttgaaaatagcttttgaaaattattctctaatattttataccacatatgtttgtttgagaacctacaatattcttaacttattttgtatatttttaaatacattttaaaaataattttcatatgcattgctttatttttagtcgttctccatatttgtataattatttttaaaacaaccctagaaaaaagtaaaatgaaatgaaaataactaaaagatgttcttttgaaacattgtattttctatttaaaatctttttttttctagttgttaaacatactttcttgttttttttttttttatatattctagataattaaaaactattttcaaagcaagacctgaatttttactatgaaaaatcgaaacggtgctcaaacttagacttcaaattgattttaaccaaaatatgttttttctcttttttttcctatcaaatcaaaactccaatttctatcgttggactaagaactttaaatcattttctattggcaatagagtctttgatttaaggacacaaaatacacatgaaaaatctcatagctatgtctgtgcgtgtacataactctgtgtgtgtgtgtgatatatataaaaaatgatggatgaggaaattgtggatatggccaaatctgaatcacttgtatttaacaatagcatgtgatttacatggaaacctgttggtggaaagagcctataaataaaggccttctctcctcattctatttatcctagaattgaaagaaaaagagtggtctaactttgagtgaaaaagtgaggttctcttgagaattaaagaattattattctctcgggtgtaatagggatttggattgtgagaagtgagtgcttataaacacttgtagggagaaaaataactacgtaaatttcgtgttttgttttgtctactctattttattatcatttccatgttttttttttattaacgacatgtcctatggtgttctaggagcttagtggtactataaggaggttttgtctaaggaggttggaatttaagaggaacaattgtgacccctccaatttttcttaggaacttttatttatgtctaaggagactaggtcttaaatgggatcattgtgatccttccaatctttcttgggaactttcttactagtttaaagctctaggtagaagtttttctataatttttaataggtataaaggtactgtaaaaagtacactttttgttgaattcctaaggaaccagatttgagtgggagtgatggcaacagatgaagaaagaacatcataattgagaagttcgatggtgaacattttaccttctggaaaatgcaaattaaagattatctatatatgaaagacatgcatttccctttttttttttttatgagaaaagccaaccgatatgaaagataaagagtgggctttactcgacaaacaggcacttggagttatccaattaacgttatcttggaatgtcgctttcaacataatgaagaagaagaccatgacgggtcttatggcagttctctctgacacgtataagaagtcatatacttcaaataaagtgcactttatgaggttgttattcaatttgtgaatgacataaggtgcatctgtagtagctcatatcaatgaatttagtacaatcacaacacaactaagtttagtggaaatcaagttcaatgatgaagtttgagctttgatcctcctatcctctatctaaaagttgaatcgcaatggtaacaatagtgatcaattcttttgcgaggaagaagatggtatttaaggatgttcaaggtctaattctaagcgaaaaaaatacaccaaagagaactaggggaaacattaagttccaccttaaacatcaaatctagaggtagacacaatgatagaaacttaaatcggagcaaattaaattcaagatgaagcaagtatagatctaagaagaaagagaatagctgctagaactgtggtaaaatggtcacttgaagagagattgcagagcaccaaaaaagaacaatggcagtgcaaaggaatccgtgaacgtggccgaagatactggcgatgctctaatcctaagtgtcaatagtctagttgaatcttggattttggattatagggcatcatatcactacacctcacattacgaaatcatggagaactacatcaatggtgattttgggaaggtttatctggttgatgatgggaccatgaagattatgaggaaagacgatattcaagtgaagcgaccaaatgggactgtctggaagttgaaagacatgagattaattcctagtctaaaaagaaatttaatctcagtggatcgacctgatcaagaaggtcatcatacaaccttcttagggagtgaatggaagatcaccaaggaaactatagtcataacttatgaaaagaagaatggtactctctatgttacttctagcatggagaatattgttgcaattgtagaatcatatgagaaatagaaaatctagcagtagagactcaatcatatgagcgagacaaggatgaaggttcttgtttcaaagaggaagctgccaaatctaaaatcagtagacatcggtctatgcaaggattgtattttcggcaaacagaaaatggtcaatttctcaaagataggcaagccacccaaagtagagaagttagacctagttcacacagatgtgtgggggtcatcaccaatttcatctattggaggctcatattactacgtcaccttcattgatgactttacttggaaagtatgggtttattttctgaaaaagaaatcaaaagtttgtgatgttttcaagaaatggaaagccatggtaagagcaagacgggcttgaaagtgaagcatttgaagttcaacaatggaggaaggtacgaagacgagaatcttaatgagttttgtgtagccaatggaattaaattggaaaaaactattccaaagacaccttagcataatggtatagtacaacgcatgaacaaaactctcaatgaacatgttaaaagcatgagaatacatgcaggcttacctaagatgttttgggctaaagttgttagcatagcgacctaccttatcaaccatgagcctttagtgccttttggagaaaagttacctaaggaagtatagagcgataaagaggtgaaattttcactttagagattatttggttgtatttcttttgtgcatattgacttatctaaaaggagcaagctcgacacaaagtctaagaaatgtgcttttattcgatatggcattaatgaatttggctactgattttgggattttgaaaataaaaaaatcatcagaagcagggatatcatcttcaatgagaaagcaatgtacaaggacaagtcatttgtagaatctatcaacacaaaagtcaaaactgaaaaaaaaaaaaagagtacattaagtttgaggaaaaatctaagaaggaaatacaatcaggggatcaaaagaatcctataaatgaagtatctcaagaaaaaccacacactcctgtagcagaagtgagacacttcttgagaactcctaaattgatataatgttattcaccttctttgcattatttattgttgactaacaatatagaactagagtgttatgatgaagtaatttaggttaaggattcggtcaagtgggattatgccataaaatatgagatggactccctgatgtcaaataagacataggatttgattgaactaccaaaaggaaagaaagctttacgtaacaaatgagttttcaagatcaaagaagagcatgatggaagcaagcgttacaaaactaggatggtagttaaaggatttcaatagaaagcaagaatcgattatgctgagattttctctccaataatgaagttgatgacaatcagattggtgctaaagatggtagctgtagaaaatttgcatattgagcagttagatgtgaagacaatgttccttcatggtgatttagaggaagagatttatataatgcaaccaaaaggcttcatgatcgtaagcaaaaaaagctttaagtgcaagctgaagaagattctatacggtctgaaacaggctccaagatagtggtacaaaaagttcaatagcttcatgagtagcaacggttttacaagatgtcaagtagatcattgttgtcatataaaaaagtttgacgacaactttattattttacttttgtatgtagatgatatgctcattgcaggttctgatatgcaagagataaataacttaaaaagaaaattattgaggcggtttgcaatgaaagatgtaggtgctacaaactagattcttggaattaatgaggattagcagggacaaagtagcaaagactttgatgttgtaacaagtagagtacatcaacaaagtactctctaggttcaacatgtagaatgctaaatcagtgagcctgtctttaggtgcctatttcaaaatttccaaagagcaatcaccaaaaatagaggaagaacgtgatcacatcaaaaaagttccttatgcttcaaccattggaagtttgatatatgttatggtttgtatgagactagatattgtgcaagtagtaggagtggtgagcaggtacatgaacaattatggtaagatgcactaggaagcggttaaatggatccttagatattttcaaaatacctaaaaaatgtcactctatttaagaagtggggatatgaaattggaaggctttgttgatagtgacctaggtgccggagatgtcgaaaacagaaagagcactaaaagatatgtgtatactcttaaatgaactataatgagttgggtttctcaagaaagttgcaactctctccactaccgaagcagaatatattgttactacgaaagccaataaggagatgattttctcttcaaggtttcttggaagagctaggagaaaaataggagaacaatgtcttttattcaaataatcagagtgtgtttcacttgtgaagaaccatccttccatgccagaatgaagcatattcaaacaaagtatcatttcatttgatctcttttggaggaaaaagttcttagacttgagaagattgatggaaatgaaatcccagatatatgctaacaaagacggtgacaattcacaaactaaagttatgttcgatttcaattggcctacaaacatagaagaagaaagatgagttgttgcattgatcttgtgtgaagacataaagtaagtactcttcaagtgagagaaccacgtaaagtttgagtgaaccatgtaaattttcatatgttattttttctactctattttgttattatttccacatttttttattcgcttcattaatttggtcttttggaaggtttatttcctaacatttttcaactcaatttcttatctaaaattgaaatgggaattggtttcatcctcaattcaaatagatttttggaacacttcaccattccccttccacactttccaccatccaaacaataaatataattacttaactcaattacatatttttgcttattttcatttacattcaaaacttgttagaaaggaaccttgagtttaggaagttcccaattattaggatttgattttgttttataaaagtaaattagaatatttacaaatttgagtggttgatttaattatatgtttatacataagtcctgcaagttattttttatactttttgttattaagagtctatttgttagataaaggtgtccataaaaaaaaaaaaaaaaaaaaaaggagttagtatgatagttgaacaagaatggtggaaagtaatgtcattttcttgatttttctccattacttatttctctctatggatttgtttatgtgttctcaactttattccttgaacaaattaggtcgtgagaaaaaaatgacaagtaggatatatttgttataagtcttttagctcaataaaaataattacaataattggagtatgaagataaagactttacttgattcacaagatgtatgaaaggttgtagatgaaggctataaacaaagagccttgacataaaaccactattctaaaatcaaagtaattttttgaaaggtatatggaaaacaaaaaaaaaaaaaaatgccaaaagggagggaagaagaaagctcttacccttatctatcaagcaatagataaaggcatgtttggaaattttccaaatgcaaccatgcactaccaagaaagcatggacgatattagaaaatgcacataaagaaattgattaattaagaaaagtatgtctttgtacccttagaggagaatttaaaagtttgaccataaaagaagtagaatcaatctcccattaatttttcaagagttatagtgatcagccatgaatcaactaaaatgaaacaattaaaattttaaatcatacttgtgtgactgaacaaataattcagtctattagattcaaagtttggttgttgtgctcattagatagtaaaatgattttcattgtagcatgaagacagattaaaaaagaaccaagaaaaagttcttcaaacaaaacttaaatgacaagaaactgaagaaaatcttaataataaaagaagtcaaaacgatcgtggagtggttatgaccaagtaaacatagaaagatgtggttttatttcatcaaataatcaagaacactaatgtcaaaacccatattttttaagaagatgtgaaagagagcacaactaaagacaaaatgaaaggagaagttatgagaaatctcaagttcaaccttataactataaaaaatttggtcattatgtgtatgaaataaaaagtactactagcaatatggaaagaaaagccaatcatgttaaaacaaataggtaaagaaaaacctagccactttatttttggcatataaaacacaaagtaataaggagaaaaatacatggtattcactcgatggtgaaaacagccatatatgtagcttcaaaagtattttctttgaaattgatcaatattcaaacactaataatgttacttttgaatctattcaaaattctcaaaaaaggcaaaggtaaaatcttaatttgttcaaaaaatggaagatattaatttatttcaaatatctattatgtgcagattatgaaaaacaattaattaagtttggattaacttttaaaaaagatataatattcataagaaaaatcaagttctctcaataagatatcaatatgttgacttccttgcaaatgtagtcatgacaagaaatataatgtttctgtaattaaaattgctaaaattttgtgtcaatgttcccatctagattttccacttaagatatcaacatcttaatttaggaggattgaaattgttgatcaagaaaaaaatggtataaggattgccctctacaaatcatttggatcaattatatatgtgaaggatgcttacttggaaaatattcctatgaaagttttccaaaagttggaattcaaggtttggtaactccttgaggttgtaatgatttgcagatccagagttatagaagaaattaagaaaatttgggagaaaaatgcaaaatgtatgaagaataaattatatcttctctctctctaatacaattggaacttatcacattatatggtacaatgcaggttttaaatggcatgtatgcctagacattgtttttacttggaaccattaaaatatagtattactaatagcattgtaataaaatggcagaagatagatatcaatacaagtctaattaagaaagtttctcaaaggccaccttcacaattacttgtaagcagctaataagatttcctctataattaggaaaaatcttcatatcaactattctttgcactttaatctttttacttagtcattgagaggttgtgatcagccttaaaaaaactcgtcaaaaaaggatttagagcataaaatttgagacagttaaggccactaataagagggaagttgacccaaacatcacaacctatttgaaactataaaacttaattagatagtaattgtttaaatgttttattggtgttgagattctccaattacactataaaatggtttgagaagaatgaggtttcactattgttaattgcttacaagttttaccaaacaaaggagaagagagagacaaggaaaagatggacctaaaattgaatatcacagcaacctctcttctgctattgctagcatctgctgcaaaagtgtctggtgatatcatttttgatgttacctgttggaaatcaagccagcatcctctgtttacttccctaattagtgtaatgtacaacctttattataattgatttaggagtaattctagcaaggtagtttattcactttccatgtaagagtagtttattcacttcccatgtaagagtagtttattcacttcccatgtaagagtttattcactttccatgtaagggaaattccattccggaattgtctcatatccgtaggctatttatttatgctttcattcattgtaaagtgaggtatcacagaatgaattgaggtgttcctccatattttgtcttcaaattcttcatatttttcttcaaattcttcatggtatcagagcaggtttaatcctgtctcatcgtcttcatctttaatggagatgcttcagaaactactgtctcctcttttgtcagtacagtcacaaactggctcatcttccaaccaggtcattggttccggaaccttggctcacaaaggtaattttttgagtgccttcactgctggtaagaaacgtaaaaaaccttggatagtggactcaggagcatctgatcatatgacgggagatgcgacaatttttgatacatatagctcatgtccaaataatttaacagtccgaatagcagatggttcactatcaaaggttgtcggaacaggttcagttgtgctatcaagggatcttactctcaactctgttctccttgttcctaacttggactgtaatctattgtcaattagtaaactcactaaggaaaagaggtgtattactaatttttcctccactcactgtgaatttcaggatttggattcagggaagacgattggcaatgctgaggaatgctctggactctacatccttaaggagcgccacgatccacaagaacaacctcaaatgacagttggtagtaattctttttcggtttcatgtcaaaataacgatagtgcaattaggttgtggcactatcgcttaggtcatccaaatgttatgtatctcaagcatttatttccttcattatttaataaaaatccaaaatcctttgagtgtgaaatctgtcaattatcaaagcaagtccggtctcattttcccattcaaccctataaagagtctagtccattctcaatgattcatagcgatatctagggtccgtcaagaataaaaaatgtaactggtactaggtggtttgtctcattcatagatgatcacactagattaacttgggtattcctcatgaaagaaaaatctgaaacgagtcaaattttcaaaaattttaaaaatatgattcagacccaattccagtcaaaaatacaaattctaaagtctgataatgctagggattatttcaactccattctaggagaatttctagcacaagaagggatagttcacttaagttcatgtgttgatacccacaacaaaacggaatcgctgaaaggaaaaataggcatttgttagaggtggctagatcactaatgttctccatgaatgttccaaaattattctgggggcaagctgtccttacggcagcctacctcatcaataggatgccgtctagggtactaaaattccaaacaccttgtcaaacactcctaaaatcctttccgactactcgtctcatctccaccgtcccacccaaaattttcgggtgctctgtctttgttcatatcaatcaacaacatagaagtaaacttgatcctaggtcactcaagtgcatctttcttggatattcttcaaatcaaaaagggtataagtgttactctccggtcacaagaaaattctacaattcaatggatgtcaccttttttgaaacccagccttactatcccaaaaacgatattcagggggagaattcaacccaggaatatcaattttgggatcttgagtcattcagtgagtcacccatcaccactgaaaatcacattcctccagagtcatttaatcaacccgagtccattgttgacttgtgggataaggagcacatccaagaggaaacggaggaaagagcactttctcaacaaacccatgaggcagaaccgggtcctaatccaagcaaacttccaggtaacaacgctcctgatggtactgttgattccgagttagaaaatgatattcttaatatgcccatagcttggaggaaaggagttagatcatgcactcagcatcccattggaaattttatttcttatgataagttatcacctacgtttcgtgcattcacttctagcatcacagagatacaagttcctcagaatattcaggaagctttcaagtatcctaagtggaaggcggcagtcgatgaggaagtttgggcgctagaaaagaatggtacgtgggaaattactgacctcccaagaggtaagaaaccagttgggtgtaagtggattttcacagtaaagtacaaggcagatggtaatgtggacaggtataaggctcggttggttgccaaaggattcacccaatcttatggcattgactatcaagaaacttttgctccagttgccaagctcaatactgttcgtgtacttttatccttggcagctaatctcgattggtctcttcaccaacttgatgtgaagaatgccttcctcaatggtgacttagaggaagaagtttacatggacattcctgctggacttgagacgacatcaaatttcaacaaggtttgcagactccgaaaatccttgtatggtctcaaacaatctcccagggcctggtttgaacggttcactaaggtagtgaaagggtacggattcgttcaatgtcaatccgatcacacattatttgtgaaacacttcccaaaagggaaactggcaattatcattgtatatgtggacgacataattttgacaggtgatcatgaagagaaaattgacttacttaaaaaattactgacaaaggaatttgagatcaaggatcttggaaacctcaagtactttctcggaatggagattgctaggtcaaagaaaggtatagcagtctcacaacgcaaatacgttctggacttattgaatgaaacaggaatgctaggatgcaagccggcagaaacacctatggatacaactgtcaaactggaagaaagtgatggaagtgcgccagttgataaaggaagatatcaacgtcttgtggggaaactcatctatctttctcatacaaggccagacatcggcttctccgttagtgtggtaagtcaattcatgaataatccaaccgaaaaacacatgactgctgtgatcagaatattgagatacctcaagatgacaccgggaaagggtctcttctttcaaagaacaacaaataaagagattgagattttttcagatgcagattgggcaggttcagtgactgatcggagatcaacttcaggctattgttcatttgtctgggggaacttggttacatggcgaagcaagaaacagtcagtggtagcccgtagcagtgctgaggcagaatttcgtgctatggcacaaggtatctgcgaaggaatctggttgaacaggctgttagaagaattacgggttccattgaagcatcccgtggtgttatactgcgacaatcaagttgccatcagtatcgctaagaatccggttcatcatgatcgaactaagcacgtggagatagatcgacactttatcaaggaaaagattgaagaaggagttttcaaagtcagctacactccgacaaactgtcaaacggctgacattctcacaaaagctcttgctcgagttaacttcgaagatctgacagaaaaacttggaatgatcaacatctacaacgcggcttgagggggagtgttggaaatcaagccagcatcctctgtttacttccctaattagtgtaatgtacagcctttattataattgatttaggagtaattctagcaaggtagtttattcactttccatgtaagagtagtttattcacttcccatgtaagagtagtttattcacttcccatgtaagagtttattcactttccatgtaagggaaattccattccggaattgtctcatatccgtaggctatttatttatgctttcattcattgtaaagtgaggtatcacagaatgaattgaggtgttcctccatattttgtcttcaaattcttcatatttttcttcaaattcttcattaccaaatatggtgcccgggctgacggaaactccgatatcagccaggcgaggacaattcaattataatattgtaagatatatcttaaacttaaatttctgctaaatgggtcctctattgaatgtttcttaggccttacttaaagcttgcggaa

SEQ ID NO: 12344 - DNA, 3897 bp, Vitis vinifera
  Intron number 3 from transcript GSVIVT01012496001 (locus G SVIVG01012496001) derived from phytozome v7.0 (chr-ID chr1 ; pos 13922202 to 13926098)
cttgttgaggatatcagggaaggagtgcttgtaagttgtttattatgtattatttgttgaattttttagttctttttttccagtatgaggcaaagaattgggacctaatgattaatctgtagcatttaaatgaaaataataataattataacaattatctatgctcattaacatctgtgaacaatcaaagaattgttttcttgcataaatagaggaatttataatgaatatttataagatttacagggaaaagaataaaggaaaataatcctagaatacattgaatgtagccaccattagtgaactatacaaacaaggaaggaacctctaatttataactcaatttatcactgatttacaaccctaatttacagcttatgtgagctgtaaatttcaatcaatcataattagtcaagctgtcaatcaatcacatacaatcaacactccccctcaagtgggagagtataaattttctattctcagcttgcttgaagagaataactaactttagttggtatgtcaactacctattcctctgtttaagcatctgggtatagatcaagtcgctatatggtttttccttgatacagtgacagtccacctccacatgtttagtatgatcatgttgaacaggattatgggcgatgtttagtatggtcatgttgaacaggattatgggcgataatgcaacttcatacttccttcccatttgtttctaagatcactgagaataatctataatcacaacaactcacataagccatgagtcattaatctaaacttggcctttacacttatcttgcaagaattgattgctttttgcttcttcatattactaaagtccctccaagaaaagtataatgacctaaagttaacctcctatctaccactgatcttgtgcaatctatattagtatatgctcccaaggtcaattctttatttcttctaaaaaggttaaacacaatttaagtcttaaaaaatgcatacaatgggatggggaaaaggttacacaacaattttaagtctttcgtgatttgatgaatagacaatagattgaccaaaagcttagaaacatgacagctaatgtaccatctactactttgatttttttatttcttttacatggaatataagaagcaaatggtgaaaataattggtcatgtgattagtagcacttaagtgaattacctaagcattggacaaatagtattttgaagcactaagggcataagagttttgagtacttacctgagtgagccaatgaacatgagactctagacttttctagagagatcaaaaagcttcaaagtgtttctatttcttctttgttcagtcctccaccataagatcctttggaattcaaggtatcttggctggaactatcttctgattaggccatatgcattgttctccccacttccctacttgcccattttgcttattattacctttctcaaaggattatggcttcccatgaagtctccaacagttcttctttgtgtgtcttggcttcttgtagttggcacaccatactccatctttgttattctgtggtctagggtctcattcttcccatttgtctctctagtagccaatccttcatttgatagggcttctaacataactattctcctactcgcttctgcccttacaattaagaacactttgctgagggatgaaagtgtttcttttccaagagtttgcactccaactgaatcatattcaacatttaatccagcaagaaattaaaaaattgtatcccttccaacaaacttttgtcacatggttgcatcttcactgcatttcatcttcaaaatttgataataactcaaatcaagctacaaagttttcaaggtattatagtactcaattacaggcaaagtaccttgtttaatggatacaatctttgttttaatttcataaatttgagtagcatcttatattttgtaatatgattgcttaaaggcctcccaaatctccttcactgttgtgagaaacatagaagtcccacaattatctggttacaacaagcttcaaagccaagacattatccttgaatcttcttcatcccatgcaacaaagttcgggtcttctgggcttggtactggtccaatcaaatcgaccagcttcccctttcctttagggaatgtcttcacaagttgagaccataacaaataattccagcattaagtctgaatgacgcccagagattttaatattccagtggaagagtaggttacaatttaatcaaaattttgggtggagggagggatttgggtattggtagatatttcagacatattgagaaagcaaataaaagtagaaaaagtgaatagaagtagagagaatgtaggagaaccggcgatgagagttgtatgtctctatgtggatttgagcaatgaaggctaataatcgttaaagctgcagcaaagaagattattctcagttacgacaattaagaccagagaataccaaaggaattttaagagaaactctgataccatgtgaacaattgtggaattgtatttcttggatatgtataggttctacaggaaaaacaataatggaaaataatcctagaatacactgaatgtagacatcattagtcaactatacaaataaggaatcaatccctaatttatagccctaatttcatcagtgatttacagccctaatttacagcttgtataagtagtaaactgtcaatcaatcacaatcaaccaagctgctaatcaatcacaattaaactgtcagtcaatcacaaccattcaacaacaccatattgaatattattgctaattcagaggcacaatgatcaatatgttggtgaagtatccatgtacaacatcgcacacggaccacaggcacactgctacaatttgctggttttaacttaaccaagtaatcgcagccactggattggtaatactgaactattaggtgattcatttattcttttttttcctatatgtctgaaattatggtggtgggtcagaaagttaatcatttcctcaaaagatttctttccatttgagatcatcaaatgggatctttatccatttacagatcaggaaagagatgtttacggttttattaacaaggtatgagagttcttttgtggtttgcatcaaactcaggcaagcacactggattttgattctaagaaatggctaacctctttattttggttatagcttccagtcagattctaagaataacatttctgatgttttactcagtttaattattggaattctgaccatcctttgtatgatagcacatgttacttatgcctagatcctaaagttagcaaatagatatgacttgtccgacgaagattgttttatgccacttccttcaggttttcctggaagctatattttttcattttgattctttagcagtaagacttctgactgatatgctgacccagttctaggaattcttctccagtttttctccttctctagtttctgtgctaccttgtacttctggtaagaagataccaacatgactaagatataacttaatagttatttctttcatatattctcgttaaatgactttcctcacctgtcactgacacaggtacctggggaactttgccgtcacaaccccaagtactcaacctctaaatctttggttaccctccctcttcttagaccctacagaaaacataagtttcaagaatgtacagcccaatgtagaatacgaatttggttggtatatgactaggaaaactggaaaacagcctgatgatgtctacttaattatttgaaaccataatcagtttctgatatgatgtgaatggtttggagcatgtattttcttttgttgtttctgttttgtgcttctggttgcctaatgaggaactactgttgttataggtatttgaag

SEQ ID NO: 12345 - DNA, 6800 bp, Vitis vinifera
  Intron number 1 from transcript GSVIVT01032437001 (locus G SVIVG01032437001) derived from phytozome v7.0 (chr-ID chr1 4; pos 27398339 to 27405138)
cttgaacttctcaaattgttctatatcatttttctttataggtcaaaatgtgataaaaaaaaatacaattaaaaactcctcaaatttgttttaaaaaacaacttattttagaaaaaaattatgagcaaattgttttttgttataagtttgttaaaggaggtttttgacctaaacaaaaacacattttcaataacaattcataaaaaacgatttttgaaacggaattattttcaaaaacaatgagaactaaatatgaaaattagttttatcaccttagtaggcatttattaaatcaattcaatgatttagtttaagttattaaattaattgagtatgtttatcgaaataattagatcacaacttaatgtaaaaaaaatcactttaagatgatgtttgtttttttaaataatcactaaatccaatttgctttttgactttttaagatttgtttattattattattaaatatttttaaaataataataaatagaaaaggtaaaatattttgatttttagctggttgttaaaaataactttttaaaacaattaaaactcaatctcaatatgacatttacatgttaatatttaatacttaattaaaataaaataataaaaaacaagcaactcactgtttaatactaataagttgaatttataattaaattaaaataaattatatttagattaagtaaatatatatatatatatatatatatatatatatatatatatatatatatcaccaaatgttcaatcaaaatagttaacttattattaatatcaaatcatttttgctttattcattcatatttaatgaaaatgtattttacaactataactctatatttataacttgatttttataataaatatttttttagttatagtatatatttagaatattttaaatatgaatatttaaaaaataaattcattacacaatattagtgaaaatatacatatcaacaaaggtaaatatgtggatacaatcaacaaaggtaaatatgtggatacaatgattaataataaaatttaaaataattttacaaaacaatcttaatacttaaaatatacgataaataataagttttaaatcaataatttaaaaataatcccacttaaaatcaatttaatttattaaataacaaataaagacaaaaatgcccaagaattctgattgttttactgactaatttcgctttaagttacgagaatcattattttcacagtagaagagcattgacacgtaaggacaaaaatgaaaaaagcaccggcacaagtaacatttaccacctccggtaacttacaacaaccgcagatgacatcatcataaaaaatatttcttaaatataaataacttatcctatgaatcaaaatgacttccgatataataaatacgttttttttttaaaaaaaaaaaagattttaaattgtaaaaaatataatagtttcaaaacatcccaaaatctatattttatttgattaaagacccaattttacccattccataagctgttgggtgactttaataaaaatgatattttattttaaaatacctatcacataaataataaataaaatcatttagagttgatttgataatagttataaaaagtatttttaatttaaaatatgttttttttttaaattaaaaatttgataaaattaaaagaaaaatacttttaaaacaaaaaaaaacagtagaagtaattaatagatgattcttctaaaaatgcatttaaaaaaatatttttaataaaaacattttcaatagaaatattttgaaacactcttaatatatcgaatagtttttaggttgtgttgaataaaattcctaaccaccaccgatttttaagttaaacctaacttttaggaaaatagatgctagttagtttgattagaaatttgaaatatttttaatttattttttaaataatttaaaaataaattttatatttaactttttaaagttaaaataattaaaaaaatattctttaaaactactttattttttgtttctagtttttattctaaagaacatgaaactactttcaaaagcggttttcaaactgacccatcaattgaaagttgattcttcaaataatttttaattaaattccttaaaagttatgttaatttggaaatgattttcaaaagtgtcgaatatgaactgcagtactccaatgggtcgcttttcatatttcacaaacacaagattctctgattctctggaccattgacagtaaccaaacacatacccacgaattcaaacaaaaaatcaaaagcccattttgctgctgccatctcttgtcttactccacacttcttctccctgctgccctccatcacgggttttcatcatcatctcaatgatattttcctttccttttcctgggtctttgcaatgggaaattcctcagctttggatcttcttgtctcttttgatgactactcgaccgtactgctcttgaaatggtggatagaactggtccaagttgcctcacaactcattagatgtgtacgtgtgtgagacggtgtgttgcagtagggtcgttttctgtatatcttctttgttgacggttgcagataagctatccatctatacaaatgggaaagaggaggagatgggtacccttctacaaaatcgcagaactgaacgaaagggaagaaagcttttactggtttgactgaaaatcgcatccttctctgcaatttctcaactctatttgcttggcttctcgatcatacccacgaatcacctcgccttttccctttctttttggcagcagtttttggtacattcgccatgcagagtttcaaagaagctgccaaaaccctttctaggaacagcgaatgaccttggaaacatcattaatggccccgtttgatttttgtccattgaggataatttatacatggaaaaccggtttgttaaagcatagtgagaaattgatggattaaaattctgtatcactgagttttgaaacttggtctgaagagctggaaagaaatgaaaccaatggcacccaatatttccaatggattggactgtggctggatgcaatcttccgaatcagggggtttctgtgaacttccagacatattggatgatcaataaagaagccgtaaattgcataacatggaactctcaaaagaagaagaatgaaattgagtacagagaagcaagcttttgtaatataacaaaggcaggctctgaaagatgagtacaagcaatacaacaagaactgaagctcagctccatcactgaaaaaaaaagaaagaaacagcatcttctacaaggagattagttggttttgaagctgctccataactcatcgattgtgaagtctattagcgccaccgggtgtcatcctcttctgttctttggaggcattgttgccctctaatctaaagccatggctgctgaaccttccccggctgaagcttctgctgctgctgcttttgtttctccgtatcttgaatggaatgccttctgagcctgaagaatcctgcaacttgcccccatcaccaccatgcaccaaattcacttccaacagcagagagaccagagagacaacaattaatattctcctgaatctcatgttttccttctctgtctggactctggactactgttaattgccttgaattaacagagatgaggaaaaaaagcttgccaacatctgatctctgtgtatgcatgtagaatatatatatgacctgagtcagtagattggtaggccagtactccgtgcgattgaggatggggtctagcacaggtactgaacattgaagtaggggactttttagttttcccctttgggttaatttttatttacttcgttcagtaacatccccctttttgtgcacatggatgctgctcctcatattgcgggcctccatgtgtccatgtagcaatacagtagcttgtgacattctctagttgattttaagcctctaatgttataggcttatagcacaattcacttaagaaattagttgggtgggagtgaatataatattggagaagtactagcactagatatatagaagcttcaccttagtatgattgtccatttgttattattttatcctaaaactctctatcaaaatcttctagaatcaagaacaaacttttaaatttttatttttatttttatttgtattttcaacaccatgcttcatttttacatgcagtcaaataaaatattaaaaattatattactatattttaaaataaactattagggtttgtttgaaaaatatttttaaaatatgtatgaaaaaaaaaattaaaaacaaattttgaaaaaaaattatttttaatattttgtaaaacaaaaatttgtttgaaaatcgaaatatttttaacatattttttgtatttttacaaatcttttaaaattaacttttaaatgcagtgtttaatttttaattattcttcatatttatataggttttttttaaataattattagaaaataagtaaaaataatttaaaaaatgttttgtgtttttttagaataacaaaaaaccgtttttaaaaatacatactaaacaaacgcttaatacccctgtttttcttttttcatttttttgcttttttcttatttcttctctctcgctgtgaaaaataatcaaaacatctaataccctgttctttatgttcgtttttttttactctactaaaatgaaatttaatatttcatcttaccattattttagttaatgatggttttgatattgttgatatttaccttatgtataaataaattattattttgataagattttttagttaggtcaattgaaaatttaatcttaattaattaagttctttatgaatacgacccaacccaattatagttaagtttaaatttaattttaattatttttgttaattaaaactcaatcataattaagttcggatgaatatttgaattggaactgaatctcaatcttcttctaaaatttccatttctttttttttttcgctcattctctttaatttttctttcttattttctttccctaactatttaaatgacgaatttactttttatattaaacttgtattttgaaaagagaagttcactttttataaatatattggtctttttaaatgatgagttccatttttatcttaaaaacttttatactaatctcatcttttcacttttatatatatatcacttttcaccaaatgtacctttcaactaattatctagtgtttgaaattagattattaatcacttttaatatttttctctcataattaaaaatgtaaaatatatcacaaccaaaatttaaaatatttgaatatatcaccgataccaatatttcaccatttttttttctcgcatttcaatagatatttcactcattttttttttcaaatattaaataaaattaattctaattattttattttttatatttgatttaatttattaccaaacatattaatccatatatttatcaaataaaaaaatttaaatttttaaaaattatacatatattattatttatttgatatcattgaatatattttaaaatttgacatgttatcacaatattattgtaaaataatatataatgcaacttaataataaatgtatacttataaaatttatatttttttatcaatgtagtgttattattatcaaatatgataaattatataaattaattctttaaaaaaattctttaaaatgtctatttttacttcttatacaaatttttaaagttttttttttttaatattttcataatttttattaatttttgtcactaatattttgtgacaaaatatatttatgtcgataaatatatatccataaactcgaagtactcatatatttataactacctatcttttaatccttatcacaacaaccaatttccactaataaaaagataatattttggtaattatttttctaaaataaataatatatatatatatatattaccttgctcatttcatttctcccttcatcacatgctatttgtttcatccctttttaaaaaaatccataatttaggggtatgacgttgtacgaagatatgaatattttatcactagcttatcatacaaatgtcatgtaaaattgtagatataacacaaagataaattaaaataaatttatatttatgagaaattatcagaatgaataaaaatacttatgtctactagtgcacattttgttattatctaatattacaataatcacttatattattttccttaaaaaactaatttaagatacatattattaatttttttaatgaattttcatagtttttttttattctttctctcaatatttccttaaaatcaaagtataatagaaatgattattggatttttgattttttttttcaaattaaattgatattttcatcgatacctatacttttaatatagtttatcttctattttcctattttaatcattcgtgtttgatttatttttcatatttatttcgccaatttaccattattattgttattagggctatttgattaaaaggatcactaaaaatttaatttaaaaaatctatttttttttcacattttgataaaaatattcttattttttttaaataactcttttagaaaaaaaactaaatataaatacttaaaatgattaagggtatttatgtaaaaaaaattatttattaaataataatatgaaagagattaaattcataaatacaaatattattcaatccttttaagttttaaccaatttattattattattattattattattacatgggaaagaaatataaaaa

SEQ ID NO: 12346 - DNA, 2411 bp, Vitis vinifera
  Intron number 7 from transcript GSVIVT01009244001 (locus G SVIVG01009244001) derived from phytozome v7.0 (chr-ID chr1 8; pos 6599327 to 6601737)
gcattacttgctcgattggttgctcaggtaggaagaaaccatctttaattgactgaccattttttaagttaaacttatccttctctttggggttgttgccattcatttccatataaattcagtaataaaagtttactactactactagaacccattgatgatgcaaagctgttgcatatttttcgttcaaatgaagaatgaagatttaaatattttgttttttgtgatgagatttaattagacagaatatgtacattcagaaacatgctatttgtattgtagtctaagtctgcagcagttgttgatgcagacatggggcagttaatctgtctcaattgtttctggttctctatcgtcaaagggagcttttgaggatgatctctatcaatgtgtatttttattttattttatcagaaacggaattgtattaaaaatgaatgaaagtacataagaaagatggaatggaaagtgaaggcaaggttatctggagagtaagatgatggttctaatttgggctttgtagaaattggtaataagagattggagtctctttggatcaatacctacaaaagaagggagggttggggggtgggggtctgttgttggtggttctgttgagtgatatttctggagcagtatcgatgtaggacaaccttgaggcagctacctttgctcaactaatgatggggatagagcttctcctcttagaatttaaggtggggaatttgaataacagtgtatgggggcagcaaagaaagtaaagtgcaagaaaaagaaacagaagaaagaaatagaaaaaccttatctcactaaagatttctaagaatcttagctgggggaaaaaaataaggtaatttcaccattagaagtaaccttagattacaataaggcttctggaaatttcatgtagaaaagaaaataaggaagttccctttaggaactgcaaagtgtgcaaaagttaatatttccattttataacaatcaaccatatttataagcattggaagataaatataacctatgtgatagtctaatggactgattttttttccctagatctcataattcaaaacttttctaataatgaagctaaaacataaataacacttctaaaggaattagattacaaattaaaataaaataaaaacttttagaaaatagaaatttttaggagtaaaaaaatttcttataatgagaaatttccatcagtccccgattgattttttgcacttttctctattctatttttcatgtataaaccacccagtcaaataataaatgcagctaacttttctgaaattcagcattccattgcttcagctggatctcaataggaagtcatggaaaatggaaaattctatgaaattgaaagtctaaaaatatggatttctcatagtaagtaaattccagtaaaaaagacttctaaaaatctcaataggactgggtttccccaaggagcatatatgacatgatgtccatcaaatttaaaggcttcggtaattctaagagagggatagttttgtggcaagctgcgagcatagctctaattcgggttgtgtggtgggaaagaaacgcaaggatttttgaggataaagcaaggaattcagagtacctttgggactctatagttttccttgcttccctttgggccttttgttccaaggcatttaaggggattccccttaatgtgattcaactggattggatagcggtgtgtactccatagggattggtccttagtgggtgttcgtttgttttttgtgttttttcatgtaatttagttgtctttggttggaggatttctcatccttcttcttgtactccttttctatattaatatatatttgtatcgtttccaatcaaaaaaaaaaaatctcaataggactcaagtaaagacttgctactaacatgaatccaagcaaccccacttgatgtggcacgggtgctgttgatgtttcaagtgttattctctattcaatggactccacatcaaactttgtattttttaaaattttttttttttctctgttgaattataatgtcttaaattcttttgcctcctcttctcttagttaccttacacatacttcggctgcagcctttttctcttttgcaacaaaactttacttaacagattaccttgtctggattatattttgactactgaatgaggagctgtccctctataagtagctagatgaacgagttgggtctgtacggccttctatcacttaactgcaactgaagtattttgcagaacatggcattaagctagtagtatagattatattaatttccccagtggttaatcaaggcttggatggtaggattatcatttagttcttctttatatgctctctaaaaagcattgcactggcatactgatatccttaatgctttcttgaagattg

SEQ ID NO: 12347 - DNA, 7923 bp, Vitis vinifera
  Intron number 3 from transcript GSVIVT01015102001 (locus G SVIVG01015102001) derived from phytozome v7.0 (chr-ID chr1 1; pos 1057782 to 1065704 reverse strand)
gggtgagcgacctctttcctccttgttccgattttctcgccccggagattgagaatcaagaaggagtgagtggtcttcttcaacccagtgaagctttggagctcaagacactggcatcttttctgaattctgaagatgaatggattactgaaaataatcaagttccatagcttcttcatgcatgtatgcacgcatgaacacttattttatgtgtctttgtagggcacagaattggaatatgacaccattgtggctgattggatccttcaattatataatccatcttgtttgtatttaaggttttttttctttttatctttcttcctcagttagattttcctgtgtgttagtacctttcatttgcaccttttttaagcccaatctaccaagtttttttgtagtgggttttgttcctaatttagcaagtccatcaaattaaaaggcatataagaacaaatacacatttattccaaagcttcaaaaggtaagacaagtaatcttctaccatatgctaagtagctaaagttgatcaaattgtggttaaaagaaaataaagaagaaaagtataagaaaaaaaatttaaattgataaattatttatatatatatttttaaatttatttcacttatttttttttcattatataaaaattaaattatttaaatatatataaatttttaattaacttttgtcagcaacatcagcatttctagaatatgctattttatgcctttgtaagcataaggcatataaattactaaaatgtttcaaaccttataaaatcatacatctaaattatcaaaaaatatttttccattaaacatatcaaaccttttaaaagccctttcaataaattttttataaaggacttttaagaatctagtcataattaaggataaaaatatcagtaattatggatatatcgatattttctattttacggatatatcgaatattttgatacaaaatattggtgaatctaaaattgatcagaaattataaaaatataagaaaaaaactcttaaaaataaaattagaagtataatagatattttaaaattgttttgttcaagaaattgatatatgtataatataatttattatacttgataataatattatatgtattgattaaaaaaaatgaatttcataagtatatatttattattaaattatatcaaatattattcgataataatattatgatatttgattataatatgtttaatttaaaaatatatttaatattaaaattataattaatttaatttagttgtattaaatgatataaaataaactatgatatatgtataatttttaatacttaattaatatattaattatattaaaaacactatagaaaattatcacgataatatttatatttttggtatttaaatagatgaaattttttcatttaattataattaatttgttctttaaaacatttttaaaaaaattatatttatatgatcaattggagtttatttatttttgataagttcaattggagtttatttatatttgatgcaacttatataacaaggggcaaatttgccttaggtggattcaatgcatagtaaaccttttggctaggtttgagcccccgcaatgaccgaaaattcaagtcatttttaaagttaaaaaattggtaaaatgccaaaaaataaagatatcgatatttctcttctatctatcgatattttaatcattgaccatgactataattttttataagaagaaatttctccgaacattttcatgagcaaaatgtgttaactcaactacacaagagtagaagtaaagattgataaagtggtttaaatataattttcaattcctaattcacttctcacaaaaccctaaatcacaagttaattgaacagcttgatcccatgagcgcaacacatagctcgatatttaatattttttgcataacataataaaattaatttaaactttattatgcaaataaatgaaaaatcgcaaaaagacaaaattaaggagagaatattacaagttgatattaagatgctgctggaaagttgtccgcggtgaagagattttgtattgagagttaaagggcagtcacccaatcaaaagcacttcacatgaaaccagagagacagggatcatggatccacaccgagctcctttaaatgtgacaaatgcatatgggtttggggaccatagccccggatttcatcaaccaaatttcaaaatcgtggtagaaattggtagttggggtgaagtctctcaaaggtattccatctataattaattcatgatgttgatgccgacgcttgggcctcttcctctctgtcgtgtatagatgttttgttggggcatgcacaacactccctacttttcatggaaatagaggcatgcatacactgatacactatcttgtctccattgaagggttccaattattagcctgaatcaattttaagtaggatttgaatgtatctcctcggtctttagagtaatttcatctcatttatttatacctattaacattctctcttaaaaaagaaaataagacaaatgggaaaatcacccttatcccaattttatcccgttaatttatatttatttatttttaaaaatgtatactagtgaatgtgagatttcatattctattcaataattatacaggatcgtatgttgaatcacatgaagaaattataccgtaattactattaaaaattgtaccaacctgaattcatgtgtgaatttaaagacggtatagatcttctaagactaatggagggcaccacctttctctggattctctcaggcaatgggagcgggagagagagcggttcagttcttttaaaagatgtgatagatctaaaaaacacaagcctaagccttttatacccttctgccttagggaccatacccattggttattgggcctcacgggccttaagctcatcatttaaagtccgtgatgacattgggctctacacattaggtgacccatacttaagattaaatcagaaattgcatgttaaaagatagcttaatcctggacaatgtttaatatattgtcggtccacatttattctatcagtgaatattttttattttttgctatatgatataatatattttggatgattggaatacaaaaggaaatttaaaaaaatgtatatatatatatatatatatatgtattaaatttttttttatctttttgattcccacgtataaaacgcattgaataaaacgtactctcttcttcgtgatgaatttcaaagaaaaggaaagtaggaattattttccatgcttttgacctttaaataaaaacaatgactcgatggaaaaacgttgatggaactccttatgcatggcctcctcgatgaaaagaatattttatttagatgatgatggaattttcctttttcagcggaaccatgatctcttttgtggatttcgggggtgattataatctttgcatgttgaaagccaagctcccaatgctttgcacgttgggttcgacttggtccaatatgtgtcagcgactcaacatggatctgccttaatcccaccatccctcatttatcctacaaggaaaattttaaacatagttttaaaaattttaattacgataaaaatagatataataataattttatcatttattttttatgaaaattatttttttcatttcatatgtgtcaaaaaatatatatatatatatttaaacccctatctaaaattttgcttaaaacatatttttttagcaaacttacgtaatacttttcattatttgaattaaatttaggtcggaatgcatcaaaatttgaatcaattattaatgatatcaactaaataataatcataaataattaaattttatataatattatttaagtggtgagatctaaattttaattaactttaaagttttaattaatactccaatatattgtctcttacaaaaataaataaatgacaaattttttatttattttacttagaaagggtttattctcaaaagaagagaggaataaattcttggaatgatacctgtgcggactttcaggctcctcttttccactactatcgcttgtcagcttttactctcatggtctcatcccctgccatcatttgtcattttcatacatttttctttctttacatattaaaacgcttcctacgatcacaataaactgaattctaagtttaacttgatttcaattcaaacttgataacaaaagtttgaattagactattacatatgatattgaattttataaatgtgatttagggtgatagtgattttgaaaaatatttttaatttttataataattaaaatataaaaattttaaagtattaaaaatattataaatattttttaaaatcacagtcaaacacacttaaattatgattatgaatgattctataaaagatttttaacatttgaataataaaaattttcaagtattaaaaatattaaaaatatttgttataatcactattaaacagacttttaaagttcatttaatagtatttgttcttaaagtgtttttaataaaaaaacgttttctttataagtgttttaaaaaaaatcatatatcaaatatttatccaaaaattattataagtgatcttttttttaaaatattttcaaaattttactaaacatttaatttttttcaaaaaatactttattaggtcaaaagtgttttttggaattgctaccaaatggattattattctttgattgtgcttggattattaattccacacaatccctttgaattacacccttgattttacttgatattctattaaattttttgaatcgctaaaattatagaaaaacatgtatatctaaataaataattcttttagacatagggatttctcaattaagagattatcttgtcacatttctcgaatattttaatttaaatatttaaagattctttgaaattgggatgagatttgtagatggatcatggaccaaccgacacaccacatgttacacctctagatggaccaccaagtctacctctacttctacgagcattaagtccaactcaaagttgaaaaattaatccattcaaaatctacttatcacgtgacacctctatttataggtgcaaaagtcgaaacctaagttgaagaattaatccctattttatcttttctcacgtatttctcctacatttctgttcaatggctttaaagagaagacttacttgaaattattaaaattattctctagaacaggaaataatttttgacaacttttatcttgagaacagtcttttaataatttattcttgcacaaatgcaattttttaaaattaacctaaaatattttcaagtttttttttttaatgttctgagaaataattgaaatttctgcattatatatcaagtatagagtaccttcacaaaaaaaatgaactaagaaaattatctttgatatttaaattctcaaataaaattttattcatgaaaatattttagaattacctaaaaaacaatttttaataacagttttttgaaattgttttctgatactttataaaataaaagtatatttagaaactttaaatatttttaacttatttttaatatttttaaatttatttgaaaaataatttttatatctaatcttttatgtttattcattttatatatttgtataattttttttttttaaatactcttcaaaaaacaaatataaataattgaaaacaattaaaaaaatgttatataaaaacacattactttctactctcaaaaattgaaaattgaaaataaaaaataatttttttattgtcaaatgtattttctctttttttttttaaataaataacaaaaaaaatgttttcaaatacctcgtaagtttttcataaacattgccaagctcttaagagttgcaattggatggatcatttgtttccaatgtttcaaacttagaagatgagttttggagaagcatcatttatatgtgataacatttgaatgttatttcgagttgaaagggtttaaaaaatttgtacatacaagcctctaaaccctaaattgaaaggattttaaattaacccacttgaaactttatcaagccacacaaaactaaatgtttcggtatgattttctcaacattattataaaaaaaaattaaaatttaaaaaaaatcaaataaaaaaaaagttttaaaaatatattgatcaaacccaaaagaaaaaataaataaaaaataaatagaaataacttagaatatgtttgaaagtgattgtaaaaagtatttctaatatttttaatatttaaataataaaaaattttaattattataaatactaaaaatactttataaaatcattaccaaacgcatttttaattaaatccttttatcactactctgacacaaggccaataaaactttaatttagataaattttgttttgatatgtttaacccctgtcaaatacaatctaagatttgattaggaatttctaatatatatcaaatttttggacaaaacacattcttatgggtcatctaacaaaaaacttgaaaagaaataaaataattaaataatataatttaaaaatagtaatctatgttaaccccatcatgttgaaactaataattttttagcttaaagataatattaacctattcaaatattgtgcatggtaatttttcaaataatgcataatttgagatctctgcaaagtagaagtataatttgacccggtgtgacagctatatatcattatatcatatatgaaaagatatgattttattttattttttaattttaaatttctttgggtcgtgggattccatgggatcatattccaagattcccgaaagaaaaagtaggaaaaaacaaaattgaggctgctggaatgattgagtcaagtacattcctgtctccaaagttaattatatttgaaaattttgtggaggaggaattgacaggttgtaattgatgtatttaattcaatgtccctttattattattattattattattttatatgaatattaaatgtttgcaaacttcagcaatatacgacctgaaccaaacccatgtgttgtttttgataactgttttcaaaacaactctacaaaatagtttttaatattttataaaataaatatttattaaaaatataattttttttacttattttctactttttcaattaaatatattttaaaaataattttatacatacgttattttttaaaataataataataaaataagtaaaaataataaaaaataattaaaagactttctttaaaactatcttttgctttaaacatgtttttatgaaaataattatcaaatgtatccttgatttttatttttttttctggattttgattgttatgagttcaaatataaataattaaattaatagaattattctattattttccaaactaatttatttttgtagttaatgagttgatctaatccaggattgaattgggtttttttcctaatagaagtaaaaaaattattattttacactaggtttcattcctttcatttattacaccttcaaatttaaagtttgatgtgacacgtatttaattccgatgcttaaaccctaattttttatataaaagaaaaaatttagggtccattttaatagtttttaaaaacatttctcaaaaaataatttttaaaaattattgtcaaaatcaaatatgaaaaatgattttttttttgtatatttacatttaatataattttttttaaatattctttttattttcaattgttagctaactagaatactaaaaaaacaaacaaaaaaacaaaactaaaatacttaaattttatttaaagaaaatatcctatttttataataaattctaaaaaaaatattttatattgaaagttattgaaaggtggtcgccaactaccaaattaa

SEQ ID NO: 12348 - DNA, 4391 bp, Vitis vinifera
  Intron number 3 from transcript GSVIVT01017789001 (locus G SVIVG01017789001) derived from phytozome v7.0 (chr-ID chr5 ; pos 3487639 to 3492029)
ccattgggatcattggaggatcatttacgttagattgcctgccttttgtgcactagttattaacccataaataacaaaagacagttttgctattttttgcatgtagatcaaccatgctgtcatttgatttagtgtgaaacttgatttgcatgttcaggaggaatgcttatcttgagcttgtttcttagccttttatttgtccaccaagatcttaggcgtttgagataaacagaataggttcttagaattataaaactgttgtttatatgacatcacagattaatttctgactgttggttctggcttgagtttggttttttttccttctttttggaattattgcaagcatttatgcacttatcgtattagtgtgtgtctatatatacctctttcaattgagttaaatccttataaagaaaggtctttagttcaaacatttatataattaaacctgatttatgaatacgatttatttttttgtgctttttttaagtggactcaagctcaatatcataaatccatgcatgagcagcatataactgaactgatatactggcatgtcagaggatttttttggttaccattttaggtgcaaataatgcaacttataagggtgttgtcttcatgttgcttctccaaagtttagaatgatgaaggaatagggacagtttatgaaaaatgcttggccaacaatacttctgaccagaagttttcttttgttccttgggtgctcttggaggttgaataggaataatttatgcgatcatgggagaggatatttgtggtgattccatttgactgtgcacttgtttctttacacacttccactgaatttattcagtgtaaatttttgttacctaaatattgtcaatgatgctgtgtagttattaacacacccaagatcaaagctaattagtgaaattaaaatttaaaacgattaaaaaagtctgacctacaagattgtccattctcattgtatagattgccacaaatgcaatggttgaagaagagctctagtatataaagttccaattgtcacataggtactactttgttctacctatcaaagagaaaaaacattgccccatgttcaattattgaaggtcttttttggagtttcaagtaattgttcaaaaaccttgtgaaaggatttggccttgaagttgcgaagcacacataaatcttgaaccttctggaagaatttagcatagttggttgaagaacccctgtataacatttgcaggttttcgatgggagcattttcaccaacttaaggagatgaggggaatatttcgaattgcaagctattttaaagcttattgaagatctattggatctgataaccaatatgcatgagagaacattttaacattttattatttggcaatggaaggcaatatgctcttcaaatccctctcacaagattgggtaaatgtggactcctccagagtcaagatcaagcttaacttagataattctgttgggaagttgaactgaaaggattttcaggcaatattcttttagcagtagcagtgatggtaacagcatttgaaatttggcatgatagtagtgtaatttggtgtaatgccacaagcagtaacaagagtttagcacaatagcagtggtagcttggtagtactaattatcaaatttggcctactacagatttggtgtggtagtagtagtaggattggtaatacttttagcaattctttgaaggagttctttgtagaagtagtagcagtagtagtagttctttaaagtagtaggtctttgaagcagtggtggtgattctttgaaacatcagttacttctttgaattagtggcagtgttttgaaggagtagtagtgctaatgtgaagtactagtggtagtacttctttgaattagtagttctttgcaatagtagtactttgcaatagtagtacttttttgaagtagcactaatgatactctctgttgaagtggtagtcatgaccctttgtatggtagtagtattaactctttgttgtagttgcaggcatgaccctttgtaatagtagcagcagcagcatcaattctttgaagtagttgtagtagtaactcttgtggtagtttagtcatgacccaaatagtagtaaccatttgtaacctttcatgatactaaaagaataattgacactttgtgtgtgtgtttgtgtgaaggcgttgtaaaatggagtgaactagtagaaacactttgtaaaactgatcaacaagaactggtgtaaggtagtggttatcaaaaaaacctgatgaaagcattaaaagaataaatggtgcaaataaccttttttgaaaaaatcttgatgtggttcatattagtggtgcaagtacttttttgaattcatcttaacatgatgtatactttcaatgcaatctgccaaatattgtgtgaatttattttgataataatattgatactaaaatcattttagtggtgcaagtactttttttaatgcatcttaacatggtgcatactttcaatgtaatctgctatatattgtgtgaatttattttgataatactattgatgcaaaattttagttgatacataaaagtccaaaagcatattaaatgatcattaacatcttagtatggatcctataaaaaaaagttatattaaaaaagaaaaacaagaaaaggctagcatggaagtgaggttgtacgacatcagactacaatttttaagttagactgactagttctgaattctgaccacagattcaatcatttgattgctatggaattttctgttatatttttaagcataatttgtaactttctgttgcctattataagggaaaaaaaaattgtaactttctgctcatgccaacagcttaaaattggttgctgatagtaggatttttctttcatactgttggatactaatattgcgtgtttcctttcatgtctacaagtagtattcttcgtgttcctgcttgggagaaataaaattttcacatacatgacctaactctttgtaagctgacttttcatctttttattattatatttttttattctttttttggcttttataagaaatttctatctttttggctctgttgggcactacactagaatgatatccagtcatggtattttgagaaaggtgagatgacgagaaactgtggttgcaaaatgtttgtcattctagtcatacaataaaaccgaccttttgagaactcttgtccgaatttatgacatgaactttggataatgttttgtatatatattatatgaagcaccatatgaccataatgcagaaaattttctgctttatgaggaagtagatgaatatgatcaatcatctccccaggtctcttgattgactatgcatggtaaaaataattgctgaatctttttttttttctaaccagaaaagagatcaaataaataaagaaaaaaaacctaagcatcaaaataggttgttggtcacaaaaacatcatatgctgatattagtatcctgtaattgttctacccaccaaaagggtaatagcaggttccagacttaattcacattcatagccagtggaaatctaggagttacttgacttgaaaaaatgatggctattggcaaaatgatctctgggagaaaacagaaacaccagagactgttaatgaaggtttctttctttaacaagtgatgggcaggttgaactgggaacaagggtcttttcagagaattaaaaaccttaatcctgttatagagaaaatgccggagactttattccatgattttatttactggtctttggtctataaaccttttaacaacttcatcccaagagagtacgaaagatatgagagaaaccaaggcagagaagcagagcaaatttgtggagccaataatatgtgccatatgtatttgtatataaagcgttctattgtttcagatcacctttatttcatcatgttgcaaggatggcttttagagaagtgaatgtgttcatgaatgcagaaatggaacagtttaacaattaatgaagtttcccaaccgctttgttctttgaagttcaagcctctataagaatagtcaattgaatctaactaaatgacccatgtctccaacaaactgtttctgctttctgaataagacaatttgtcatgctttctgacaactagctgagtatttttcagtttttattctattgcagcagcacttatttaatgttaaaataccctaatgcttagagttacactgaaactgagttttgttggaaaacatatttgcacaatttttcccaaaatcattcataatttcacattgtttgattagataagtccactttctgaaatcgcacttcattactttatttgctgcctgtcttcagatcttccaccagacaaggagcctctggactggaac

SEQ ID NO: 12349 - DNA, 4758 bp, Vitis vinifera
  Intron number 15 from transcript GSVIVT01013406001 (locus GSVIVG01013406001) derived from phytozome v7.0 (chr-ID chr 18; pos 660024 to 664781 reverse strand)
gagggttcttctcgtcatgggcatcatcaatcaaaagaaaatgatcatctcgacagaaatgcagagtcacatagtattgacttttccttctctaaggcttagaaaatgcgttcaagtctagtttgatgatatatatctatgaagtttcagtgagggatcatatgtaacaatcttaattgttgtataattaattaagaagataatgatgaattagaaaataattctcggattttgcaaaccatttcggttgttgattagaatttttttgaatatgttcttgaatttatggattcggttagaagaaaaatatatttggttcttattgtttgaactaatgtttctaatcatttttgtttggaattggcgcggagggttttactttacaaaaccctaatttgatctccaccttgtacgtcctttcgatcattttcttccctttggagtgattttcctttttttttttctttttttttttcatattggggaaaaaaaaattgaaaagaaaatgaagaaatgggagcaccataaaaaccatcatgcactccctttttttggtttctttttgttttctcttttccctgtaaatggaagtggacagccggggtggagatgaaatggggatgagaaatcatgtcgaggaagggaaaagacgggagaaaggaaggggaaagatggagaaaagaaaggaaaagatgagggaagggaaaggggaaatgtgatttcacatggcctttagaaaaataaaggataaaaaagactcgggtttttagacttaccttttcaaatgaaacatgaatcatcattaagatgcaagtaagggggtgtttggtacgtcggaatagggaatgaaaataatattttgtttcctttcctatttcttagtggaatggaatgaatttgatgattccatttatagcatttggatgaacttaggaatgcaagattggaatgattatttgtttccattccaatgtttgataataataggaatggaaatgaaaaagaaataaatttacaataatatccttacatataatttaaaatatttttttatttttacttttatttaaaaaaaataaaatttgagaggttttttgttattaaataataagactaaaaaatatatatatactcaataaataaaaaattaaccataaaaaatcgtataaccctaatgcacaaatattcaattattatttttattaaaaatttgaataatttgtcatgcttaagtagttataaaattatatttttcaaaaaaaaaaaattatttattataatatttaaattctcaaagctagcaaatgtttttcctattttcaaaaaaggaaataaaagaattcaaatttattctaattttcaacaagtatcatatccgataaaatccataaccttaaaaaattttaaatattcgtttttttatcaaaattttaaataatttgtcatgcaaaaaaagctatagaattatattttattaagaaaaaaaaagagaaaaaaaatataagaacatataaattgtcaaagctaccaaatacttatttcttatttgcaaaaaaggaaataaaaaaacacaaacttcattctagttctcaatataagtaccatatctactaaaatctacaactagtatatcctccaaaattaagccatcaaatcaataaaaaagttcataggaaattgatgaaacaaaatccaacctaaaatttctatcaatccaacctaaagacaataaattaacaaggatgcaatatggagatcgaaaaaatcttcaatatttttaagtaccatatctttctaagtaccatatctttttatttttttcctaaccattaaaaattttcaatattgtaaacacgtgaaatcgaaaaatctttttccaaccatttcaatttttctctccagtttccattaatacaagataaagaaacatcaaagattccaaacataaattaataaaaaaaaattaatcgatttatagagaagaagaaacacatataaaaaagtgaagaagaaagagaaaataaggtaaacctgatcgaagatgtacaagggagttttcagaacctagttgcagcaaacaatgacgaatcctagatccaacaatcaaaatgaacatccaaaaccctataaattagaaattgatttttttttttttaaatatcgtggaaggtttaattgattcaatttggaagaatcacttgttgcagagaattggatgatgagtgggtctctaactttccaaagaagataagaagtggatgatgaatggatctctacctttacaaagaagataaacatcgggtttgaagaacaagataaaagggtaaaatagtaatttaggttattttatattatcaaataggtttaatgaatcagaataccacctacttttaatgaatgcaaatccgactcataagttggatttgatttctgccggaataattttttatttcatttccgccttcttaacatttatccaaacataggaataagggagaaaaggaatgagatgtctattcctactccctattcccgtgtaccaaacaccccctaagtgtaattggattactgtttttaaaaaaaacacttttaaaacctttttcatgttataaatttttattttttaagtgttaacaaaaataaaaaatattttttaaaatcattattaaatgcaattaaaaaaaattgattttcaaaatttttaaaccacatcaatctttataattattataaatttttaaacaacatcaacccttataattattgtaagtataattaatttgatcgattttgatcaaattacattgattttttaattgtcatttccatatagaaatttttttatttattcatattttaacttgagattgtgtttgagattaggaatgtatttaatagtgattataaaaaatatttttaaagtgcatttaaacatttgaaaatttttatttttcaaatattaagaatgcgaaaaatacttcttaatattattgtcaaacaaacttttaatatttctaatacttgaaattttttatcatttaagtgttataaatattaaaaatattttataaaatcacttttaaaagcattttgattttatttgaaatgtttttagtgaaaacatttttgataaaaatgtttttaagataatgactaatcgaatattttttcaaaaaatattaaaaataatttttcaaaattttaaaagtgtttttaaaattttatcaaatatcacatttttctttgtgtattttctaaaaacgccactaaatatattctaggaatattgtttcacaatgactttagaaatctcgtcatagcatacaaatcctatttatctccactgaaataccttatatttctttagacctcattttcctcttttgttttatcttatcttcagtggctcggatttgagtcatttgactacgcatatcccgacaatgttccatatttgggacacatgtcatcactaagcacaaatttccaattactaacaaaaagaaggctaaaaaaggctagaaaaaaagttaaaaaaaaaaaaaaaagggaagcccactcaatcttgtctttacatgcatgcaaaggatgattttgattttttaaatttaaggagaagtgttgtgcactttcttaggaagaaagattaaaagattccaagtgggataatggaccactatttaaagtcagaaatcaaaggggtccatgtttcctctccattataaaaagattatacaaaaatgattagggaagcacttgcaataaaacaacacacccctttggacaaaaatcaaaattctaagtacttgttgaacaaatcagtagggccttctcaattgtttaatgctttgggcagctcacttcaccaaaccatcccacaactcaaaacccttattatataattaggttttgattttgattttattttattttattttttaagagtataataggagcttgtggatatatttagatttctatattaaaagaatccatacaaaaaaaaaaagttacttcttattgaagttatgaagcatattttaatttatttagaaagctattttatttaaaaaaaatatttataatgatacacggaggttatgattttgcttcaactattaatcaaaactaaaaacaatattatccatgacaaattttatttaaagtgtgtttgataatgtttttattggaaacatttttaatagaaatatttttttcaggaaaatattttgaaaaaaactatttattaaatattttttcttaaaacactacaagtatattttttatattataatttatttattaagttttttgaaaaacatttcttaaattttattatacatatgaggttttttcaaaaacactttttaatttaaaaacgttttttaaaattattatcaacgaactcttatatttaatttgaatacttttattaaaaaaaaattatagcttaaaatgaaagtacttaacatgagaatcaagaaaacatagaaataattttcaattattttttaaattaaataaaaaaatagtttttaagacttatataatattatatacttaggtaaatatgataaaaaaatctaaaaaaccttaaatttattatcaagataatatattttcaaaataaaattttcaaaaacattaacaaaattttctaaaatattttaatttattttcaaaaaatctctaaaatttttactgtatcaaaaaaataaaaaagagaaacctatttcccacacgaatcatttgccacaa

SEQ ID NO: 12350 - DNA, 7128 bp, Vitis vinifera
  Intron number 4 from transcript GSVIVT01012830001 (locus G SVIVG01012830001) derived from phytozome v7.0 (chr-ID chr1 1; pos 5879698 to 5886825 reverse strand)
ccttatgtaagtgttggcatattattgctctttttttgataggtactttatttcactgtttgacgcttcatgcatttatttttaatttttttttcttttgttcaattaacttgattcattgcatttcttttagggaaaagtgtcttttacttccatcacttaaaaaaagaaaaaaagaaaagaaaagtagaaactcactttcttaaaattaaatttatatttacaaatttgaaaaatatttaggaatttatgcattttgatattacatcccaatatatttcttgaaacaccctttttagttgggtagtaataagtggactccatgtgaactttccctctttctagctcattctccaaacaagctctatcttcaaagtttctttttcaacattgattctaaagagaaactagaatttttacgaaaactgtaggtgggagaatgagatagagaaaggagagtaagagaggttgagatcctcttggaagatcaaagatcttctattttccttgtaagactatgatgtaagtgaaaaattcctcaatttattatataaaaaaatattatttatttatttgtaataatattaatattttcttttactattcaccagtcaattaacaaataaaaacataaatgttagtatattaatagagattattttatataaattatataaagattaattttttattttaattttgaatcttatcttgaaaattaattcatactaatgatttttaaaataaaaaattaattaattttctatttttcttctttattaagaaactttttcaaattactatacaaatttcaaaatttattttagaaaagaattaaaacatgcaaagaaagaataagcatttttttctttttttactttcaaatttatttaataaataatttttatatttttaaaattttatacatttaatttttatattttttaatttttagaaaaatttgaagaaatcagcactttgatatttattttttatttcatcatatttattgtaaatacaagtgtaaaaaaatttaagtgaaataaaatccttaatgattttttattttttatttttagtttaattttccaaaaagggttaaatacaatataattaatttagaaaaaattgatttaacattgtgaaagtttagagaaaaaattgctcctctatttttttgaagtttaggattacaacatatgataggactactcttgagtaaatgcaaaaggaaaagaataaaatgatatagttgtacaaataatcattagtttgaaaatagaaaaaaaataaaaactaaattatgagataatcctaaatttgaaaacattgaagcaattgttcaatcccctaatttaatccattaaatcatatcacaacatcctattcatagccctaaatcaaatcacccaaatattttcagcttatgattttccacacttcccatcaagttggattgaagatatttaacattccctgcttgcttactagaactttagttagttgcttttgaaggtctttagtcaggatatttgctagttgtttttctataggaacatatggcatacaaactaaaccctctcaagtttttccttaatgaaatgacaatccacttcaacatgcttagttctatcatattgaattagattgtgggctatgtcaatcattgttttattgtcacagtataattttataggtttctcataaggaatcctcaattcttctaatagccttttcaaccaaatgacttcacaaattccatgagcaatgaccagaaactcaacttttgctttacttctagcaacaacattttgtttcttgcttctccaagttaccgggttacctctaacaaataacctggagttgatcttccatccttattatttcttgctcaattagcatcagtatacaccctgatctgcatgtgcctctttttcttgaatagtaatcttttccctaggctttcttttagatacccaagaacttgatacacgatttcaaaacattcttcaataggtgagtgcatgcattggctaaccatactaactgcaaactctatatcaggacatgtttatgtatttgttgtggaccatttagaaggaaaggaatagaaggactttcaatgatgttgagcaactcgaccaagctattaaatctacttttatgtgtatttttgtgaattgggttggggtatatatagaggatcacccattgtctttgttagattttgtagattgattgaatgttaggtaagaagatttttttttttttttttgggactccttacttcttagccttttttgggctttgtttgtatactttgtgtgtacttgttacaccatcttttagatgctttttaatacttgtcctctttttgcctatcaaaaaagaaagaaaacattttttacccaccaaatgttgatagcatcctttatccacatgtaaacttagctttggttgccctaatttcctattaggatcaattgttgtatcagttggtttacaaaccaacattcttgtttctctaatcaagtctatagtatatttttgttgagaaacaaatataccaccttgagactttgcaacttccataccgaggaaacatctcaactaaccaagatcttcaatgtcaaattctttagctagtactagtattccctttaatttctctaattccataaggttatcacctatcaagatggatatcatttgcatatgctattaagatgacaatcttattgtcaccaatgtttgtagaacatagtgtgatcggcctgactttgcatatacccaagattccaaatggactttgtgaagtgatcaaatcatgctcttaaggattgcttcagcccatagagaaatctcttcaatttacacacacttttagttctaaataattgctcaaaactagagggcaaattcatataccctttcttcaattctccatttagaaaagcattctttacatctagttgttgtaacttgtaatgactaatttagattgattgcaagtgacaataagactaggattgtggtcatcttggcaactagctaaatgtctgttgataatcaatgtcataagtttgtgtaaagcccttggctactaacctagttttatacctctccatcaaaccattagtcttatacttgacagtaaatacccacttgcattctactggtgtctttgctcttggcaaacttaccaaatcccaaggtccattcattttaacagccctcatttcttccatgactgcttctcatcacttaggaacaattagagcatcctgtacaaattttggaatctccatagaagatatgttagtggtaaaggctctaaaggaaatagatagacaaatcatggtacaacacgtatttagaaataggtgcatggtacaagatctagttcctttcctaagggcaataggaacatcaaggtcattagaaacattagaatttgtatttgaagagagattaggtaaaatcgcaccttcttgggtccttatgaccggttctaacccttcgatagtgacaagaatatgactttctaggttaccttgatgatttctccttttgtaaacacgaagcttagtttgaggttttgtctgtagtgattctctccctgtcaacaattcttcgttgtttggcacaataaaactcgattgagtagttgaacttgaacctaagttttttgcctaaacaaggcttgaactagaagaatgtgaaaggcttggactcacattatcatcaaatgttggcaagggtaaggacatttcttgaaaacaatgttcctcaatcacacttgccccttgaagagtgttgttggaaagtagggttgattctcaaagaaggttacatccatgctaacaaaaattttcctagagataggattgtaacacttatatcctttttgtgtggttgaatatcccacaaaaacacacttagtgtacaaggatcaaacttagttctatgttctttatgaatatgaacaaacattgtacacctaaaattttttagtggaattgaggaaaatatttttatatgaggttaaaccttagaaaaatgatgaagagggatttcaaaaccaagaattttagtcggcatcctgttaattagataaggcgccgtgagtacaacttctccccaaaaacttttatataccctcaatgtaaacatgatagctctagcaacctccattaagtaatgattttttctctttgcaatcccattttgttgtggggtatcgaaacaactagattgttgtatgatcccattttcaagtagataatctccaagaagagagttacaatattctgatccattatcaattcgaagtatttgaatttgagtttgaaattgcgtttttatcatggcatggaaaattttaaaaaccctttttgccaatgatttttccttaaacaaataaatccaccaaactctagtgtggttgtctatgaaagtgataaaccacctagttttagttagggtcaccatgtgtgaaggtcctcaaatatcaatatgcatcaatgcgaaaggtctaaattcttcataaggccgtgcaggaaagcatatgtgatgatgtttaaataattgacatacatcgtattaaaacattaaaggatttttttcttaaatagagatggagacaactattttaaatatgaaaagctggaatgacctaacctacaattccataccattatttgatgttcagcagaagaagaaaaaacattattccttgcaacttgagcttgtctactcttgatgggatcctcaacaaggtaatatagtccaccaatctctttagtactaccaatcatcctccctgagcataggtcctaaatttcatggtaagatgggaaaaatttaacaacacaagtcatgtcccttgttagtttactaatagaaagaagattgcatgaattattagggacatgaaggacggattctaaagtcagaatttttgaaatagggactgaaccattccttgcagtggatgaaaatgatccatcggaaattttgattttctggttacccggacaaggagaatatgtagaaaataagtttgacaagctcatcatatgattaaaagcatcagaatctgtgattcatggagcaaaatttccagaatgaattcttaaaacacagatttacctgtttgtgctaaagagcaggatggtaaagagttagaagatggagactgatcaaataacctatagaggtgttccagctgctctttactgaatggagatgtttcagttatggttgttggactcttggctgcagcatgcatgctttggtcagctgctctcatgaaatctgccattgtttttccaattttgtggcttcccatgcagcttccaacaggtgtctcttgtgtgccattgtttgttacaatgatcacacaatatcttccctttgctccctgtcttctttgagttcccttgacaagcagcaacattggcagctttagttgcagtagaagcaagtgctgagttctctatgatggtggttgaagaagagcctcccatcatgacagatctacggatttcttcccttcaaaccttaacaaacacttctcggatagagggtaaggtctctttagcaaggatttgtccacaaacttcatttaattctttatttagcccaacaaggaactcaaacactcattccttctccatcatcttcttaaaacagacattatgtgcagcacatgcccattcaaatgcataaaagaggtctaattcttgtcaaaaacctttcaagatgttgtaatacttaatcacaacttgatctccttgctttatatcatggatctttgatttcaactcgaagatttgagctgaattctcaagatcagagtaagttaccataaccaattcccagagctcttttgttgttgttaagaacattcgagtttgacttatctcctgctccacggaattcacgaaccagagcaagatcatggagttttctgagtcccatgtttgaaagcctagattatcctcttttggggtctttgttgcaccagtcaaataccctagtttccctttctcatgaataaacaatttaacgaacttagaccaactaagaaaattcagtctatttagtttatgagtggtgatgtgcaatgaaggattgtcattggtgccatgaggtgaggcttgaaatggaggtattgatacctgctatgaagaatctccaacattctcctccttgttgactccagacatcaaatcctcctaccagtagcctaatggttccagaaaaaaaaatatatatatatagtacttgagaccggaatagaagtatcactttcagtaggaacctagctctgataccctgaaagttcagagaaaaattgttcctctatatttttgaagtttaggattacaacatatatatagaactactctcaagtccatgcaaaaggaaaaagaataaaaggatacaattgcatgaataatcattatcctgaaaacagaaaaaaaataaaaactaaattaggtgataattgtaaatttaaaaacattgattcagccaattctatccccttactccactaaatcaaatcacaacatcccatttatagcaactaaatcaaatcacccaaatattttttcagcttatgtttttccacacactgtcgaaagcataaatttaggaatattcaacttgtcatcaccttgtaagaaatataaaattgtaccatctttatatgaaatgtcaactggagctgagtgaaagtaggggagtgaagttttctttgaaattgttcccacccaacaaaaatgggtatttcgggaagcataactggagagtgcatgcttttgaatatttcaaaatttgtgaagagaaatttaattttaaagaagcgatttccattttcttttctttttttctcaaatcagggtaccaacacatgctttttcctttcttttatagtcctaaatatagctcagtggtgaaaaaggattctaatcctaatcaactccgagtagttgaaaacttgggattaaggctttactgtatgcaatctgttgcttttgattctttgagccttctaattatataggtgtttttttattatcattagggggaagttcttcctttcaaatcatatctctatcg

SEQ ID NO: 12351 - DNA, 6888 bp, Vitis vinifera
  Intron number 1 from transcript GSVIVT01021583001 (locus G SVIVG01021583001) derived from phytozome v7.0 (chr-ID chr1 0; pos 7426524 to 7433411)
aaacagtgtggttagaaggcgataatttgtttcatgtaaataatttattgtattcaattttggagggttaaatcattggtgaaggaggatcccattctgttgacaaatgatataagtatatgataatcaatgaacagtgatagcttattgctagaaagctgcaaaataggatgtttatgcttcataatttatctgttttcgagatttgacaatcctcgacttacaatgttttttctagtggttctttctgatttgcagctacaactacaagatggcaaatatggcgcatttggggagtaagccaaaacaatgcaaagtccaaaaaactagagaagagcaatgataggtaagctaaactagtccataaggcagttaatcccaagttcctctaaaccccagtttttatgggaattcaggggatctattcatatctggctacttggaatgacatagatatattaaggctatgtttggttcccggaaaatgcgagagaaagaaaattggaaggaaaaatgaaaagaaagaaaaaggtaaggaaagtaatataaattttttcgcttgtttggttatccatgaaaaattcaagggaaaaaaaggattattttcttttgtttggttaactatgaaaaaaaagtcaaagaaaaatgaaagaaaaataaattcaataatttgtctttatcaatttatagaataataaaataaattttatatttttattttctaaaaatcaaggctgtgctgagccaagtttgctggtcaaagtctgtgcacttggttgcagggtccagggtttggttgagttgttgaatggtgtcttgatactgcttcaagcaatcagcccatgcagccttctcgcgctcgttgcggcacttggaccccagccacttgttgtggctctgcgcggtgagggctcgctccatggccacctccatagccatctttcggaactcggacttctgcttgggcgcattgtacttgtgcccaccatggctcatgaagtacttgcatggtgccggatatggcgttttgtcgcaccaccagttgacgtcgccggagtcagaagccgatagggtggaagagaaaaatgacaaggaaagcataaaaattgcaaataacccgagctttatcgccattacaggggttgtatttctctaggttgcagtgactgtggctctggtgacgggcttgtttatatggatagtgaagtgatgggatacaggttggcttgttttgaatatgactatgaggaatatgcaaataaataaatcatgtttgtgaattcagttttgcagtgagagagacgggggcgggggcgggggggggggcgctgtgtgaagaacccgataaatttttcccaactttctctcttattttcctcattattttttaaggaaaatagtagggaaaatattatgatatttttcatcatattttcctttatattttttttccatcatattttccatgtaatccaaactaaggaaaataattttccatatgattttttttcctttccttaacattttccgggaaccaaacatagcctaaagcacaagatctttggttttgctggatatatcacctttgttttccaattataatcataatccagcttttttcttctttacatgatatgacctagttgacaatctcataagtcaggagactcaagtcttaatacttaattctgtttcgttattttcaaataacgacggataaaaacataattttgtgtcattaaaactctaatggagttgtcttatttaaataaaaaataaaaattgtatcataaatatgattggttacaattggataggcatcttggtcgcctataggctctcaagtaagagcctgtaagatctaattaaaaaccatacagcatgacaataatttcgaattctaatcaaggatctaattaatggcggtgggtgaacctcagcatgaaaatgatttagatttctgatcaaggatctaattagtggcactgcctcacccagttccatccccgcaaactcgtctagctcctcaactgaagaaaaaaaaattaaatgaatgaatttcaatccaagttaaagacaatttaaaacatatcataaatccatacataatttaagggataagaacaaaaaaaaaaatcagaaatgtttagaacaccaatcatataaatatcatatataatttttttttaatgattaaggaaagaaaaaaatattaaaaaaaatgattcccatatttgatttatgaaaaatagtgaaagaaaatcaaatagaaatttatacatttttaaattatttaatttttatataataaggaaaataaatgaaatgaatttaaagaaacatataaaataatttattggctttgaactttttattttttctttttccttcaaaattttcaacaaccaaacatatccttaaatgaacatccctcgtgaaaagatcatgtaaaaaatatttagcatgagtaactttagaaagattgtagaacctcgtaccatgcttctattttttttaaaccatctaccaaagcaagaaaaaaaaattagaattagaaatcacataatatatattaaaataagatgactgaggctttttgtttttattttaaaaaattttcaaataaaaaatatttaccattagtgattttacaaagaccatagaagttcatagcataatttcctcacccttgtatgaaaagatttcttagaactttctaaaaaggaaaaaagaaaaaggtacaataataaaatccatccaaaattacataataatggtgtcatagctaaccctaaatttgtttcatatttatttactaatcttaacacctccaccaattctaccccgctacaagactttaattttttccgtcttaaacaaaacaagaacttctaattttataatagaaaaagtaaggccatgtttggccatgttttttaaaacttgtttttaagttaaaaaaataaaaaaactatttttaaaaataacttttagaaaatatggtcaaacaagccttctatttttctttagtttttaaaaattaataaaaaaaaaacttcacttattttctaaaaattgttttctatttcactttattttttaaaattattttcagaaaacaatgataaaatagtattatgaattttttaaactaattttctatttttaaaaatagaaaaattgtttttaaatcatacacctaaataaactctaagtttactttgttaataagagaaaaaaatcctaacatgagaagatttaaagttttaattatttatctatagtaattaaaaaaaaaacacctcacccccatcacgagaagatttctttgaagttagtatatctatacatctttatcaataattattaaaaagaaaaaaaatacaataatattatccatccaaagttacatagcaactaaggatcattagatcctaccaagaaaaaaaaaggcaaaattcatacttaatttaaggataggaaaaaaaattcaacgatttaaaaatgttattattattattattattatttaaaaaaaaaatctatgaaagggagaaaaagaaaaaatcattggaatataaaatcataactataaaaatatgcaaaaaccatagcaataatatttagtatgagctatcttcaaaaatcatataaagttttttcattcaagattttccatcgctacaaaatatgttaatggctttgaaataaaaaaaaaaattgcatcattaaaaccctaaaaaataaatatattaataattttgaaaaaaaataaatgaataatattaaaaataaaagaataatattttcatacttactccaagggccatcctcataattaaaatcctcatcaaaacctgcattcgttatacgattccaccttggaagactcatttttctctctcaaagaagacaaggatctccaacttcacaatggaaaaaaattcacccatgtttcctccatttataagaaaaagaatcctaacattataaaagaaagaatgataagatttgaaattcatgtagttatctaaaagaaatttttttgtcattgtatatcctaaaagtttagtttaatatatctatatattctagttatttatatatagaaattcaaatttaaataaaaatgaattaaaaatagataatttaaaaaaaaaatcaattaaaacagattttaattcaatataatttttataaatcaattaaaataaggtctaatagtagtttttagttcttcatcaaccctttaatagaaaaaaatagttttttttttaaaataaatgaatgaagtagagcttattttgaattctaattttattatattagataactaaaaataaagaattttattctaaaagaaattcaatttcattaaaactaattataaatcacaatttcaacaaaaatcaattaacatagattttgatttaataaaatttctataaataaattaaaataacaattttaattttttttatatgagggaagtgataaaatttttgatttaaaagaagaaaaaatttacaataaaattatttaataataaaattttatatcatttaactattatatatatatataggaattaaataaaatattttataaaatatcttaaatactcttactttattattccttttttaattcgtttataaattttcttgatttggaatagtgaattctagtccattttgagatttctaaaaatttagggtggtgtttgttttatttacttaggtagtgtttattttttttgactttttgctgaaagtaagttattttcagaatttaggtagtttatttttttactttttcgtgacttattataaactttttactaaataaaaaaagccaaaatatgtagatttttctaaatagaaaaaataatatattggtttttttttttactttttaatacttaatagaaataaaatactacaaaaacaaacaacctaatatttaacactattaagcattaaagttctatttagaattaagtaaaaaaacaatcatcattttaattctaaataaaactttaatgtttaatagtgttaaatattatattatttatttttttaatattttatttatattaaaccttaaaaagtaaaacaaaaccaacacaatactttttctatttagaacttttaaaatgtttgactttttttattcagtaaaaagcttataataaattatgaaaaattataaaaataaataatttaaagtttgaaagcaaattactttcggtaaaaagctaaaaaaacaaacgctctcttaatattttggaaatttaattcaacaatggtgaaaaatcctcccaaagtgcaagaaagtgatttcatacctaattccccttacattagaatgcaaccaagagtccaagaccattatataaaaataaaaatactttcaaaattaaagataaaaaataatctcaaattaaagataaaaatataatttttctgtaaaatcgttattttaatcttagctatgattgaaatcctcaattacatcaattgaaaatttctattaaatatatatataaaagttatgaacacataatgtaacgaatttgtatattaaagtagaaaattaattaaaaagtaaaatgtccaaattataataattattaaataaagttcgtatttaaaattctaattttattttatatacaaagactttatttttaaaaagtttaatttttaatttaaaatttatttaatgtacttcatgactactataatttttcgaattaatgtgatttaattataaataataaataaaattatatttatatttattattaaacataatttaactttatattaaaacatcttatcaatagttaataataaaaaagatgaattattaaattttcttggtcataggattattttttttattattgagaactatttagagtatgttggcatcttaaaaaaaatgatggaaaaaggaaatataaaaaaatatatatattgatattaaagagatctttcatagtataagtaagattaccataattaaagatatcaaaatattagtaatggaatttagacttaggatatgtgaattaaattgaatttttcataagatatgcaaattataaatgtaagataattaaaactatttaatgtcattcattattttcgtggtcaaaatttattaaaaaaatttcaaagttgaaactaatgtggccaaaggcatgaacttgtgttcctaagttgtatttggatatgatatataagaaaaatttaaggtatcgggatcttattaattttaaatttatattatttaaagtgtacgatgaaatttaaattatcgaagtaaagtatgattaaaatataaaaaaatgagttccgaatatagaacaataggattaaagtaataagatttgagacaaagttcctcggtggtactttttttcacccatatgtaacatataagtaattgaacccaaaatagttccaatggggaaacctccttatgaggcatgttggtcccaatgatataatgcaatagtcttaggactatgggtaagaaattaaaaaaaaaatgaaaatatcacgagaaattgctttatggggtggcttctactggtcctccaaccctcgttaaatgcactggccacttccctctctgcactgtcaaagtacttagcttccttggagcatccatcactcttcacagggacagccaaaagggccaaggaaaggaaaaaattaataaggaaaagagagagacaaaaaaaagaggacatgatttcttagcgaagaaacgcttgattcttcaaatgctcctgcattaatatagcaggcctttatttttcttcttgtgtttctcactctagctcacagcttacagagagcggttgtgttacaagaa

SEQ ID NO: 12352 - DNA, 16436 bp, Vitis vinifera
  Intron number 3 from transcript GSVIVT01021111001 (locus G SVIVG01021111001) derived from phytozome v7.0 (chr-ID chr1 0; pos 1537068 to 1553503 reverse strand)
aagttttggcagagcaggtagctggatatttgattatttcttttatttgatgggtaggtgtgagtataggcatgtatctacctatagaggtacacatgttacattttattttagtattctcagcttctttcttatttttcattgtgaggtgaaattgttctttaatttagtgaatttacctatgaggatgtgaagacagatatagtaatgtaatagaaaactaatttctacaacaaaatgttgggatgctctttaatgtagattctgcaggtagttatttttccaaatgttgctatatgttttttcttcatttatataggtgaagatcattatataaaacatgtgccaaaaaaatggggtgccgaacctaagtacattggaagtatatggcaggtgccaataggttaatgaggaataaaaaagaaaagtggaagccaactcgctaacataattccaaacagtccaggctggaaggcggatatagggggccttcttttgaaccagatcagtccctcagaagcggaaggtattgaggttccgttctctgagactgaaatcttcacagccttgatggggatgaatggggataaagccccgggcctggacggtttcacaatagccttttggcaaaatagttgggagactgtcaaggaggacttgctggggttattcaaggagttccatgatcaaaactctttcatcaagagtctgaatcatacattcttggtgctgatcccaaagaaagggggggtggaggatttaggagattacaggccaatcagtttgcttgggggcctttataaactattggctaaggtgctggccaataggctcaaaaaagttataggcaaagtcatatctcctgatcagaacgcgttcgtcaaagggagacagatccttgatggttccctaatcgcaaacgaggtgatagattcttggcaaaagaggggagagaaaggtatagtttgtaaatggatattgagaaggcgtatgatagcatcaattggcaattcttgctaaaggtcatgcaaaagatgggctttgggtcaaaatggataggatggatgtggaattgtatctccactgtcaaatactcagtgctggtgaacggggtcccagctggttttttctcaagcacaaaaggattaaggcaaggggaccccctttccccctacttatttatcatgggcatggaagttctaagtgcgcttatcactagggctgctgaagggggtttcatcaagggctgcagaatttggagagggagagagcaggctgttaaagttactcacctcctttttgcggacgacacaattgttttttgcgaagccaagaaagaggctctcttgtatttgggctgggtccttttttggtttgaagccgcctctgggctgaagattaacttggacaaaagcatggtaattccggtaggggaggtggatggggtgatggatatggcggctgaaattgggtgcagggtggggcagctccctactgtttatttgggactgccccttggggctccaaatagggctgcttccgtttgggatggggtggaggagagaatgaggagaaggctcgccctttggaaacgtcaatacctatccaaaggtggtagactcactcttataaagagtacgctgtccagcattcccttgtaccaaatgtcggttttccgtatgcgtaaatcaatggcaagaaggatcgaaaaacttcaaagagacttcttgtggggcggagccaatggggggagtaagaatcatttggttaaatgggaggcggtgtgcgcggataaagagaagggaggattggggctacggaaaattactcttttgaacaaagctctcctaggcaaatggatttggagattcacgtgtgctaaggaggagttctggaaaaaagtgcttgaggctaagtatgggaaagaggagtttgggtggaggacaaggaaggcaaatggggcggtcggtgttggagtatggaaggagatcttgaaggaatccacttggtgttgggaaaatatggggtttaaggtgggaaaaggtaacagaataaggttttggactgacctttggtgtgggaacaatgtgctgtcccaagactttccgaaccttttctccatggctgcccataggaatgtcacagtggaggaatgctgggatcagaatacgggtcaaggagggtggatattagggttgttaagggacttgaatgattgggaggtgggcttggtgggcaatattctagctgtgttgagggattatagtgttacggtggaagatgattcggtttgctggaagaagggtgaggacgggctgtttaaagtcaagtacgcatataacgtgttggcaaattctcaagggctggatttccctcatagcaatgtttgggtgggcaaagtcccaaccaaaattgccttttttgcttgggaagctacttgggggaaagtcctcactttggatagactgcaaagaagagggtgacatttacctaatcagtgttttttgtgtgggtgtgaagaggaaacgatcaaccatatattaattcattgtacagtggcaaaagggttatggaacatcattcttgcgttgtgtggtgtacagtgggtctttccaaattctgtaaaggaggtccttagtagttggaaaggttcttttgtggggaggaaaagaaaagaagtgtggaaggtcatcccgttattcattttttggactatatggaaggagagaaataggctagcttttaaagggggggtgttggcttatcagaaattaaaaacgtcacttgtttacattatttggggttgggctaaagtgtacattgaaatggagtcgaattccctaataggtttcttggagtggttagcctccaattagggtttggttcgttttgttttttgttttgagggttggtagctttgtatacttcctgtatgccttgaggctattggccgctcttatatatcatttgcttatcaaaaaataattccaaacagtcaataaaatccagcaaggacttggagctaactccaagagactatctagaccaaaggaaaagggcataaataaaaagtttctaagtgacttatctgaggttctaaatcctgggaagatctattattatgatcttcagaaatggtccataagagacataaaggggctgccttctacgctttcctacacttttgctgacaaaactctcgtcccacctaatacaatctacatcatcgatttgggaaggccataggagataatgaaaagagagaaaatgagatgccacacaaccttatctttaccacaatgaatgagaacatgattagctaattctttcttattcatgcacaaacaacacaacttgtcaccattcatcctttccttttaaattggttcatagttagaatcttttctcaatcagcttaccaagcaaagaatctcactttcattggaactcgtaaactccaaactaccttgataagaaaagaaactctcttcattttcttaggagcaatagaaaaaaaaatttaaccaagcacttcttatccttggtacaacttttagtatcctatcctcaccatctttttttttttttttgataaataaacaccaaattcattaaacaataaaaaaacgccccaaggatgccacaaagcacacagggagtgtacaaatagcgcctaaaagcacaaaaactagaaaagaaccctaacaacaacttcctcccttaaccagaacctaaccactcaataaaatcaaagaaagacaaagaatctatctctaagtactactttatccgatggtttaaattcctaagaaagaaaatcttcaaaaaaagagtagaatgctcctcattattaaatgtcttgagatttctttcattccagactatccaaaaatacataaaggagctgctctctaaaccttttttctttgttttcttgcaaacgagctatgccaccctaataaagcctccttaactgtaggagattgcactcaatggataccaaaaagaccaaacaacaacttccagagaatcctaactaatgaacaatgaaggagaatgtgatctatgaattgttcatcttctttgcaaagaaaacacctattgaccaaagaccatctgtgtttctgaagttgatctaatgtcaaaacttttccccacaaagcctcccaagcaaaaaagttaactttagaaagaacccaagacttcaaaaccacccgtgttggaaaagaaacaacaactctcagttccaagacaacataaaattgctttatagagaacttattaatatccgaattcatccacaccatcttatcttccctttatctatcaactaccaatccatgcaaccgtaaaaataaatccacaacttcatccacctcccaatcatttaaaggtcgagaaaaataagggttccaatgccctctttgccctaactgaacccaaacatccgttacacaaacattttttgatacaattaaggcaaataaagagggaaaagaatcacataatgattcatcaccatactacctatctgttcaaaacttcacctttctctcattacccactccaaaagaaaaatgacccaataaagtgttttgttctttcataatggacttccaaagcccaactccatacccatctctaacttcaccaaaccaccacccaccctcctcctctccatattttctcataatcactcatgtccaaaatgcgcctctttctatggcaaacttccaaatccatttgcacaaaggtgcctcttgaatccctcttaaggaatgaccctacattatctaactccgaatcatgaaactatctcaaaaagcaagtgttccaatgcctaccacaattggaatcatcccaaatattagtgaagaaatatgagaaggaaaaattattctattttccatttctcgaatagagaaggaaatacactactataaataattaagtggcgaaaataccatcccattattcacgggaaatgactactaacttacctagaaagactcactaattttaggaagcaatttgcctatgagattagataacatgctaccagaatctccttattataaaaaatagcaaaccaaataaagccaactaattttatagttgtaaaactcttagaaatcagaataataacttaaagatttccacactcctcctcaagttgggttatagatgttgattgagcccatcttggtattcaaatacttgaagttgatcctcgatagagttttagtaaggatattttctatttgaaggcatgttggtgtgtacaccaggtgaattatcccctcctctattttttcctttatgaagtgacgatctatctccacatgtttcgttctgttatgatgaattagggtcttagcaatgcttttggaaaattggttgttgcaaaacatcctcgtaggtttcccaactaagattctcaattctcttagtactcttttcagtcatattccttcacacatgccatgtgtcatggctctaaactcagattttgtactacgctttgacagaacaaattatttcttactttgccatgtaaccaaatttccccgtacataggtacaatatccagatgttgatctacgatatttgacccaatcaacatcagtgaagatttcaatatctttgcttgatggcttcttaaagtataaaccttttcttgatgtcatctttaggcatcttaggattcgatgtacaacctttatgtgttctttggttggattattcatgaattgacttaccacactaatagaaaaactgatattaggtctaatttgagaaagatatatgagttttcccactagtctttggtatttacctttctctactagtgcaccattttctttagcttctagtttagtttttgagtccatcggagtatcaacagacttgcacctaagcatccatgtttcctttagtaagtctaggatgtactttcgttgagaaacaaaaataccctttcttgatcaagcaacttccatatcaaggaagtatttgagattgcccaagtctttgatttcaaaatctttggctagaaagcccttaagcttgcttatttcctcctcatagtctcatgttagaatgatgtcatctacatacatgatgagaatagctatttttcctttcaagtgggtgtttgacaaataaggtgtggtctgcctaacactaagaatatccatatctctttactacctttgtaaacctgtcaaaccaagctcttggggattgcttgagatcatataacgattttctaagctcacacactttgttaatagtagcttgtgtctcaatgccaggaggaatttccatgtagacatcttcttctatatctccattgaaggaaaacattcttgacatctagttgatgaagaggtcaatctaagtttgctggcaatgataagatacccaaattgtattaagtttggctatggggccaaaagtctcctggtagtcaattccataagaccgagtgagcccttagcaacaagtggagccttgaacttgttcgcacttacatttgccttgtgtttagctatgaagatccatttacatcccattggatgttttttgattgttaaatttgagatttcccaagttccattttcctctaaggcacgaatcttttcccaaatggcagctatccattctagtaatgttagagatttttggataggtgttaggaatttgtattttgttgaggttggtgacaaaggcatgaaaactaggtgataacccttcataagagacaaaattatagattgggtgacttgtacatgatctctcacctttcctcaaggcaataggatgattaagatcatcattagaaagctcaaatattgacaaatttagaactagtgttagctggtgaaatttaaattgatcttgaactcaaatcagactcttggatttgcttaggaaatgttcattgctctatatcctcttgagttttttttctttgaatagacaataagctcactgttttctgcaggttgagtgaattttggacgttatgaaggacttgaggttaagggaactagcaagggatttgaggttcgacttaagggatttctagttgaggacttggagtaggaacaaaagactttggtgattttctttgagggatttgagaattaggataagtatatgaatttgaaggactgtgagacaagtttggaatattggcttcaatatcccaaagctggtgttctcatgtgtaattctcctcctgaatattagatttgggatagtaaggttgttgttcaaaacatgtgacatccatagagttatagtatctttttatgattggtgaataatacttgtacctctttttacttggagagtacccaatgaatatgcacttgattgctttaggatcaagtttgctccagttttgttgatgttagagaacaaacgcagatcacccgaacacgctaatgggaatggtggaaataattcgagttctaggatatgaattgagaagaacttggcaaggtgtttggaagtttagaacttgagaggtcattctatttataggataagctgctgtaagacctactttgccctaaaaatgctttggaacatgtgtagggaacattagtggtctagtaacctttgcaaaatgtttttttttttccttaacaaccccattttgttgaggagtatcaatacaagaactttgatgtactatgccctgacttaagaaataatcaccaaggattgatttgaagtactcttttggattgttaatttttaacacctgtattttggtttgaaattgattttgaatcatattgttgaaatttttagaaatttgactagcttctaatttttctttcatgagaaattgccatgtaatcctagtgtgatcatcaataaaagatataaaccatcaagttctagtgatatttttaatccgagaatcctctcctgcatcacgatggatctttgagaaaggacaagacattttgtatggctgattaggatagaaattataggcatgtttggaaaattgacaatttttttaaaaaatttggacttttattattgaataatgaaggaaaaagtttcttaaggtataagaaatttagatgacctaacctatagtgcgacaacatgactatgatatcattatcagaattatcaactgaaaaagagcttttatgaaactgaatttttgatgcaacataatttgccttaggagtttgtctttcaagcaaatcatcgactttaaggagatagagccctaaacacatcttagcactgctaatcgtcttccccaaatctaagtcccgaaattcacaagagtatgggaacaatttagtaacatgattgagttctcgagtgagtttgctaatagacaataaattacagtccaaatttggaactaagagaacaaaatccaagatcaaattctttgaaataataataaagcttgtatcaaccacctttgagagagatccatctactatcttgatagtgaaaatttcatggcttggactatatttatggaaaatattaacatttctagtcatatggtctgatgctcctaagttcacaatccatggactcatcttttctcttttaacatctaaggcatttaaaaaattacctttctatgccaaagactcagttccaattatagaggcgacaaaaggttgttgtgaccgaccgaacatctttttgcagaagtttcaattgttttttgctgaggtgtggcgttctcataatttgagactagatttccatgactttctttgtcattagaagaactacaattcacttgatttttgtttgtaagaagtttttcccaaactatcccagtggtactactctttttctgctactctcttagtgttgcaagaaatttacagcccacaaatttgtttcttgtgtggtgctaagtccccacttagtcaaccctaaaacatttgaacaaaggttttgaaatctttaagaacaacacaaagattaaattggagaagccattgaaagcgtcattcaaccaccaattcttaactaaatcatggaagcttttcactttaaatcctacatttttctcacataacctctatcaagcaaagtatgacaataatcccacattggtcttgccaccaagctttgcaccctgtggcagagctaagaatttttcttagggtggcaaacatcataataaccatgaatgaattttaaaataattagtgataaccttgttattgtttagtaaattatgtaattttggactttaatcatgaataaatacaatgtctcaaaataccaatatgtatatatatatatatatatatatatatatatatatatatattattaaaaacattcaaaggaatttttcaaaagaattaaaaactagtaagaaaattaaaaaatctctctagtcaattttcaattattttaataattttttttagtaaaaggaattttaaaataattcaattttttttccaaaataactaaatataagttagttgaaaagtgatgacatttttttttattaaattatgcataatttaaagtattttattaaatcatgttatcttctgtaatttaaactaaacacaaattctcttaatgtaaataattaattttttttttataaaaaattaaatgacatgtaatttaatataattatgttgtttagttgttaattagtttttatttaattaaatttcaaaaataacaaattttcaaaattaaaatcaaatacggtacattaagaaatgaatttaatagatatcaaataaaaattaataaaaaataaattaggataatggttgcatgagaagaaaaaatatgaaattaaaataaaagaaattatgaatattaaatagagtttgtgaaaatttctatttacttttttaattctattgaaatcctaatatatcattagcactttaaagataagtgttatttatttagttaattaacatttaatttgttagttttttttgtgtgtgtaaggggggagaaggaaatatgcctcctctcccctaggcctgccttagatccaccagtgtttgcaccacattagagaagtggttctcctaatcccctaaaataaggagctactttaaccttaacatacaactcctttctaacctaccactcaaagtgaggggcgaggggaggaaatatgcccccccttgagcctaccttagatctgtcaatgtttacactacattagagaagtggttctcctaatcccttaaaacaatgagctacataagcttggatatacaactcttctctaatccacaactcaaagcgaaagtacctctcgtcaaaagaaaatctagaagattaagacctcgtttggtaactatttttgaaaatagttttgaaaaacaatttttgagaatagtttttgaaaatttttatttgatgttttgtagaacaaaagtctatttgagaaggtgaaatgtttttaacttaagttttaatgtttttaaatatgttttaaaaataatttttatatctgatgctttatttttaatcattctacatgtttgtatatatatatatttttaaagcaacccttagaatacaagtgaaaataacttaaaataattaaaaagcttctctcttatatcccccaagtgcaccaagggtcattcctatgccccattaacctcttatatcccccaattcttcctaaaaggcttctctctccctcttggcatcgggccatacaccctagagagcatctaggcaaagttacacatgatgacattaggctatacacctcggaaagcatcttttaggtaaaacttcagaagtggaaaactcctcacttgttcatcatccttattatgtgtttatgtgtggttttttccctttatttttgcattgattgagagaagtttaatcccaaaacatatattcttgatgatctaaaaaggcaacactattatgattttagattgtaatttaagtcttctaaaacgcatgcttattaatttctttattgagtagaataaattaaacttggattgaggtttagaaccttatgaatgtgtacttgacattttggtttttctcttccactctacaatttcacttctacaacaggtgcagctaagctagcacatacttgtttgtttgacaaatgaaacatctattgttaacttccttctttccacaaattgatcatttgtggtattttttatgagaatctattaactttgttggttggatgttttctggacttttgaagaagtattttaatgtagtcttactcataacaagagatgattcctattagatagtgtatagttatttaggttatttacttttccttttccttttctttccttattgtattgtgggtcccactaacatgtatatatatacccaagtccaatgtgcaatctttacagtttttcaataacaataattagggattctcccttttctctctcttcacatggtatcagagccaagggagaaaaaaaccttaattatttcctgtttatccgtgaatccattctgggaaatctttcagtgaccgtgtttcattccggtcacccttcctatctcctaaagctttccgatcaaccgtatcaccgttagaaaaccctcaccaccggcgacttttccgacgacgtccttttccgacaccgaccataccatcaggtgcgcaaggaggagatcttcaagttttctcaaagcactggagggagaatcttagccacgcgtcggccatgcgcgttctttctccgacggcctgaatctcacgcgctggcgcgtgaagcactttccggccacgcgcttccacctccagccttgcctgatgccgtctagccaccctctatctgtgcttgtgtcatccgagtcctgaaagtgcattttttggggtttttttgtcttcgccggccctctaaatagcctttctggcgacctctggtgactttctctccacctcgagccctgcacgtgtcttaggaagtccgcgataagccgtattagggctctcttcgatccaaacgtatttcattcaccagataagtagatatggctactaaaagttccactttttcctctgtcatatctggatctcctatgattacttcggataaattggttggcagtgaaaattatttgtcctggtttgcttctgtggagctttggtttatgggtcaaggttatgaggatcaccttgttacacaggaggcagatatccctgaggttgacagagtacaatggaggaagatagatgcttagttatgtagtgtgttatggcaatcagttgatcctaagattctgcttcatcttcgggcctacaaaacatgctttaaattttggaatcaggcgaaagggttatacacgaatgatattcgacgtctttataaagtggcttcttctattgtcaatgtcagacaacaagacatggatttatctacttatattggccagattgccgcctctcttaaggaggaattcttgaccgtgatgcctcttactactgatgttggggatcaacgaacacagattgacaagttcttcatgactcttacgcttattggcctctgtccagatctcgagaccgtccgcgattagattcttggcagttcctctgttccatccttggatgatgtgtttgctcacctcctccgtatctcctccactcagactttgccatctgataacacttcagattcttctgtgttagtttctcaaactagctttcgaggacgcagtggtaaccgaggtagaggccaacgtcctcattgcacctattgcaataagcttggccacactcgtgatcggtgttatcagttacatgggcggcttccccgcactacccacgtggcccaatcatctgatcctcagtcgcctcaacctcccagttcctccacatctcagggtatttccctcactgacagtgagtatgatgactatctccgctatcaggccaccaagtcagcttttgttgattctgttgcccagactggtaatgtttctacttgtcttacccacacatcttctcttggaccttggattctagattctgacacttttgatcacatatctggtaataaggattttttctcttctattactactacctctgccttacctactgttactttagctaatggttcccaaactatgggctaaaggttttggtttcgctcatcctctcccttccctacctctctattctgtcctttatgcccctgagtgtccttttaatcttatttccatcagcaaaataactcgcactcttaactcttctatcactttctctgataaacttgtgaccttgtaggaccagagtacggggaagacgattggcataggacgtgagtctcaaggcctctatcacctcaccgcgccttcaactcctgcagtttgcatttccactgatgctcccctcctcatccacagtcgcctaggccaccctagtctatccaagttccagaaaatggtccatagtttttcatctttgtcgtcgcttgtgtgtgagtcctgtcagcttgggaaacatactcgtgtctcgttcccaaagcgtttgaataatcaggcaaagtctccttttgaacttgtccacactgatgtttggggtccttgtcggaccgcgtctactttaggatttcagtattttgtcactttcattgataactattctcgatgtacttgattatttttaatgaaaaatcgagctgagttattctctatttttcagaaattttatgttgaaatccaaacttagttcaatatttctattcatgtgttgcgtagtgacaatgccagagaatatttttctacaccatttactttatttatgtcccaacatgggatcattcatcagtcttcttgtgctcatactcctcaacaaaatggggtagctgaacgtaagaatcgacatcttgtactctctttctccatagtcatgttcctttttgtttttagggggacgctgttcttacagcatgttatttgattaatcgtatgccctcatctgtattacacgatcagattcctcattccctttttttccctgaccaaccactttatttccttcctcctcgtgtttttggttgtacttgctttgttcatattctcactcctggataggacaaactttctgccaaagtcacaaaatgcatcttcttgggatattccagacttcaaaagggtaatcattgttattcctctgagactcatcgctactttctctcccctaatgtcactttctttgaggactcatcgttcttctccacctctgagtctcttcctgtttctgaagtcttaccccttcccattatctccccacctgatgcagtgccttctcgcccacttcaggtttatcatcgccgtcatcgtgtcgctgttcctccttctttggccgagatacttgctgactcacttcctatcccttcagcttctcctaccccgactctacctatttttgctgacttacccattgctcttcggaaaggtaatcgatctactcgtaatcctcattccatttacaattttttgagttaccatcgattatcttcatcctattctgcatttgtttctgctatatcttctgtttctcttcctaagagcacccctggggctctttcccatccaggctagcgacaaacaatggtagatgaaatgactgctttacactctaatgacacttgggatcttgttgttttaccctctggtaaatctacagttggttttcgttgggtctacacagttaaggttggccctgatggtcaggttgatcgccttaaggcccgcttagttgctaaaggctatactcaggtttatggttctgattatggtgacactttctctcctgttgccaagatagcttttgttcgtctattgctctccatggctactatgcgttcttggtctctttattagttagatattaaaaatgctttccttcatggggatcttgctgaggaagtttatatggagcaaccacttggttttgttgctcagggggagtctggtttagtgtgtaggttactccattctctatatggcttgaaataatctcctcgagcatggtttaaccgttttagttctgttgttcaggagtttggcatgttccgcagtacagcagaccattccgttttctatcatcataactcttcggggcaatgtatttatttggtagtttatgtggacgacatcgtcattacaggcagtgatcagaatggtattcagaaactaaagcaacaccttttcacccacttttagactaaagacttggggaaactcaagtatttcttagagattgagatagctcaatccagttccggtgtggttctttcccaaaggaagtatgctttagacatcttggaagaaaccggtatgttagactgtaaaccggtagacactcctatggatccaaatgtcaaacttataccaggataaggggagcctttaggagatcctgggagatatcggcgacttgtaggtaaattgaactacctcaccattactcgtccagacattttttttcctgtaagtgttgttagtcaattcctacaattaccatgtgatatccattgggatgctgtaatccgcattattcgatatatcaaaagcacaccaggccaaggtgtgttgtacgagaacaacggtcatacccaagttgttggttacacagatgcagattgggctgactcacccacagatagacgttccactttcgggtattgtgttttttattggaggtaacctaatattttggaagagtaagaaacaagatgtagtggccagatctagtgttgaagccgagtatcgagttatagctctgacaacatgtgaactcatatggctgaaacatcttcttcgggagttgagatttggaaaggatgaacagatgaagctcatctgtgacaaccaagccgctttgcatattgcatccaatccagtcttccatgaaaggaccaaacacattgaagttgactgtcacttcattagagagaagatcgcatcaggatgtgtggtgactagttttgtcaattcaaatgatcaactagcagatatttttactaaatctctcagaggtcttagaattaaatacagttgtaacaagcttggtgcatataacatatatgctccagcttgagggggagtgttagatagtgtatagttatttaggttatttactttttttttttcttttctttccttattgtattgtgggtcccactaacatgtatatatatacccaagtccaatgtgtattctttacagtttttcaataacagtaattaaggattctccttttctctctcttcacaaataagcttttacaagaaacctaaagtttgagtagttctttgatgatggaaattaaatgctttcattttcttatttacactcaaatggccattacttgttttctttacccttttatttgttgttttgtttgaaggaagggg

SEQ ID NO: 12353 - DNA, 13051 bp, Vitis vinifera
  Intron number 5 from transcript GSVIVT01009085001 (locus G SVIVG01009085001) derived from phytozome v7.0 (chr-ID chr1 8; pos 4863792 to 4876842)
cagatctaaggtagtggacaagtgcacttatatgcttctagacattgataatatcttttttttgataggcaaaagagcaaaagatatattaaagatccaattaaagagacaactaaataatatcttatttagttcatatgcttgtatatatggcatattattagcccttgagactcagttcaagttggaaggggttgggatagtgatctgggaggttccaagtttgagtcccagtagggataaaagagagaaaaaagtttacctataaaaaaaggatagtgtttatgttaatacacgtctaacataaattgtaataaccaaccacttactatgactaaactttcctgaaaaaattgagtaattttaataaaaaaaactttccaaattctgaaggagacttaaataaccaaccacttactatgactaaactaacgatttacaaaattctccttttcttcctttcaagaacaaactttttttttttgataggtaaagaaatgattgtattaataacgcctatcaaaaggtgcacaaaagtatacatggtatatacaagttgccaaaggccaaaaggggcagagagggcacaaaaaaaccactcttgccttacttagagttcaaacaatcactaaaatccatcagagacaaggagtactcttctatgcataccctaatctaggctctcttgtttctctacttccatatggtccaaaataaacacaaaggagttgctctccacgttttctttctcttcttctctataaaggatacatgccaactttgaaggatgcccttgaccgaggataacatcactcattgaacaccaaatagatcataaattaactgttgcatgacgactttggaacaatgaaggaggatattatctaccgttttttcctctccaacccctcctttcttgaatagatcgtagaggttcatgctcatcacgttgcctccatgtcggagacagcagggcagtcgttacaccattcccgtccattgtctttgaaccaagactaggcaatttttacccgcagacagttgaaatcatggctttttcaaattttacctttaggaattgaactcatagaacgatagttttagtggttgctgttttgcagatcaccaaatggtccctgctaaaagattttaccaagatttcaaaaggtcaagttgaagaaactaactggcaatatctgaaagctttacatcatctcttgaattttattttacagtatgattcaatgatttctggcagcggaccaagcagccatctggtcaatcctgtagcagtccagtccaactagctttattattcctttttccttggtacccacaagtaacttgttctggaattaacctaaaatttacgtagaagaatccatggagatcatgacaagttaaaaaagttatggtgatttgcatgacttggtgactttctgtatatggaggcatgaactgtcatgtgtttctttcctttctttatatgccatagctgtttcaaaagaggcgtgggtggtgatctttgggatcagacaggggagaaagtcattggaacccttgtttttcatgacctttgaatgattgggaagtggacaacacgatggtgtggataaatttgtacaataatttctctgttaagtatttatatgccactttggaattggggagtctagtttcatttccaaagtgggtggtttggaattcgtgggttccttctaaggttgactttttttgcgtggggccttcttggagcaaagttttttctttagatcaaattcaaaaaagaggttggtttttggtgaggtgttttctttgcaaagaagaggaggaatccatagatcatatcctcctccattattcactggttaggatcttttggtagttgctgtttgatctttttggtgtccattgggtgcaagctgctactgttaaggaggcttttttaggttggcatggttgtttgtgggcaaaaaacgtaaaaaggtttggagagtagctccattatgtatcttttggacggtttagaaggaaaggattctccggtcgataacgagaagcattcaactatttttttgaagatgttcttccttagaaatttgtttacttgggtaacgcaaaacatagaaataaattctacgtctttacttgattttgttgagtggttgggttcttgtaaagtgagggtgttatttctttctcggtttttgtgctattaggcactattcatatacatcttgtgtactttggtacgtcatattggcgctttttattttttaatgaaattggttttatctatagaaaatatatatatagagtttatttggttatcaaaactattgtttaattactcaatggcagccttttctaaggttgagtccacgagccacactctccaacctcatcatctgccacaacttttgtttgaccatctcccatggtcgatggcaatcgttctggtatttcatattttattaccaaattgttgaagaactcaagccatactcttcaaaacatgaactttgattttatcattatcaaaggcgacatttgccatacaatattaatgaaaggggaatcctttaggcacactgtacttcttctgtggtcctttaatgttaggtttgaaattgggtctagaattttacaacaatattggagaagcatgcgatgataggtgaaaggtgatgcgatctaccattttcataggcatttcttgttaaatttttcccaaccactccttagttaatgtttgaacactatgtgcttttgggggggtcaaaaatgaaaagtgttatctcagaatttggttctttccttaaggaacagtgaaaattgcctttccacttgagtttaagaaacccaatacacctcaaatactccatggaagacatgagtagccaggggctgcagctacgttgtactactatgtgattactttggaacaatgaaggaggatataatctacattttttcctctccttcacacaaaaagccccttctcggcaacctcctacccctcctttcttgaacagaccttagagggtcatgctcatcacattgccttcagcttaattaggtttgctctaggcacttcacattgctcaagaacactctttgaagtttaccactatactttgccttcctttgtgattccaagcagaatgaggaaaagattggataagtatcaatgcaactttttgtgcgagggctggccttttgaggggaaaattcacttagtgaactggacttccatatgctccttaagatctcatggtgggctaagtagtggaaatctttctatacttaacaaagcattgttgaaaaaatggtgctggttttttttatagagtaaaataacatttgtagtagagtcattattaatgagtttaaggaggtgaagagggttggtgctctaggatggggagggagatatatgggacaaatccttggaaagccagtagctaagtatcagatcacttatttgttagaattttccttgagataggcaaggggacgaccaagttttgacttgacgtctgatgtgggaagttggcattaaaggattgttatagctttgcacaaagatgcttaggttgtggatcgttatagctttgcacgaagatgcttaggttgtggatcgttatagctttgcacaaaggtgcttaggttgtggatcattatagctttgcctatattcagaaggaagtttcaagattatgaattgatatcaatggaatcccttttgcagcatatctatccatctactattaagcaaaattgttaggatatgatggtgtagtgggcaattgtcacacccttgggaatcacccaaaatttttcactgagtgtacggtgctaagacacctttcttagccaaccttacccctaagcttttataaaagcagtgtaaccaggccaaagcaattatgagaatgcttcccaacttgtgttattccaatcatctactagatacaaaatcgttccaaagtgtctcaacactttgcaagagtcagaggctacaatgcttacaccctaagcattcaatagatacatacaatactttgtctcaggatgtagggggttttttataagagacacccaacctatagttacctttcaaagtttaaaccaggcaagcctattggtggttacataaccacccataaccacccagttggagacacccctccgaactgaggtgtcctttcgcaccagccaacagcttcgtagctatctgccagttccctgttgctaagtttagctactgccatctcatgtgctgcattgatcaatcctgctgccattagcaactgctgttccttcaaaccctttctcattgagccattggtgagtctacttaacaagatgcctcctccgcgtaaggtgcttcctttgaataggtgctcatcaaggtgtctttgaccaagctctccaaatcagcaatgtgctctcatcagctgatcaagtgtgtttggtgcatcaatgtgcattccccacattgatgctcgggctcatgtcatgtcaaggtgccaatggcctagggcatgtgatagtttcctctgttagtcaaggctcactgttgccttgtccatgccatgcactatcaatcttgcccgttgcctcagtttcccaccaagccactgattcacagcattgtgccatggcattgcgcccatggctattgtatccccttgcacggggtattgtgcccctgtgccatgcataggcgtcatgagtttgagttggccgcatgtttagtgccctactgagccatggcattgcgcccatggcttctcgaatcggctcaatgcatgagtcttttaggtgctctcatgttagtgcagggaggaggtagttcgcaccaggtcctgtgtcgttgtggccttgaggtgcacgccgcatatgtcgaggagcccatgtgtgcgtgctagtgtgccttccaagtgtcttaggcacgcccaaagccgtgccatggcgcccttttggtgcggccaaggcttggccttggtgcccccttgagtcacccacctcctccttaaagagcaatacaaaccattctcaagatgtccggaggagacattagacccccttgagggtcttaatagaatattaaaataaataatatttatattccataaaaacctcacccttcatctgcattgtcactaacgtgccttgtgtgcagaatgtgcgccaaatgtgcgtgcgggtgtggcctggtgtgtgtatgggtgcgactttgtgcgcgtgtgggtacgagacagctgtgcgtggggcgcaggactagtgcgggcctgccctgtgcctggtgctcgtctggtgcacaccaaaaccttcaggctttccttgcttctccacttgggatcctcacgggtgcaaggcctaaccatgaggcctttttcttcgtcattgggtcaagaggctaaagggctaacaaacccacccccgcttactgaagttgacgccctcgtcgactgcaagtatgcctgaatcgccttctcaaactgccacaaggtaacatatctcttccaagtagtttatgattttgaagtcctcttccactgaacaagaaaatcagttcgtcgattctttctgctacatcccatggtcctatgatccaagatcttctccacctcttgatcaaattgtttcatgaccaagggaggggctcgctttgtctgtaccctctttgtgtctgggtcttcatagtatggtttcaggaaactaacatgggaggtcgggtaaaacttgatcatttctggtagtttcaacatataagccacccgctccaccctttttatcacctcgaacagtctgtcatatttaggaatcagacccctatgcgttgttttgttgctaatcttcttccatatctaaggagtcaatttcaggaggactttgtctccaacctgaaattccaagggccacctatcatggtttgcatacttcttcatccgtttgactactttttccaaactgtcttgggcctcatcgaacatctcctttcgagaccgagccaacttgtatgctgtagggttatttcctccagtcttttgcttagctacctccaaaagcatccttggctgtaccccaatagccaattcaaagggactcatccctgttgctgaacttctctataaattgtaacataattgggcaatgtcaagtaaatccacccagttcttttgtgttgctgtcacatagtgctggagatactccttcaataagacattaatcctctttgtctacccattagtctgaggatgattggctgtagaaaacttcaactttgaacccaagagtttgaacaactcaatccagaacaggcctgtgaactgtgtatcccgatcactcactatgcctcgaggcaacccaaagtgcttcacaacatggctgaagaacaacctagcctcttcttttgtgggacatgcatcaagagcaagtataaacatagagtatttagaaaatctatccacaacaacaaagatagatttgaagtcacaaacctttgagaatccgatgatgaagtccatggagatgctttcccaaggcttctctggaatgatggtggggggtgctgcagcaaccttacaacctttttcctctcggtcttgtccatttgacagactaggcaggatctcacataagcccgtacatcctcactcgtctttggccagtagtaggatttggcaagcaatggcaaagtcctttcttcactgggatggcctgcccatctagcatcatgagtttcccgcaacagttccttcctcaagccacctgcagggacttaccaccttcctcctttagccataaggaggtctccttcaagccaatacctcctaattgctccctctttgacttgttgtcttagcttgctataggcagcatcaagctctgcagcctgcttgatcctttcattgaagtcaaagatgactttttagagggcaatgatataatcaatcacttcctttctgcacaaggcatcaaccactgtgtagtgtcttcttggttgatgcaaccattcaaacatgaagtcagccaggaactcctgccattgagcctatttgagacttagcttcttctgtgttttgaagaaggtgttggtcacattgtcaatgactactgtgaagatgctcccaagcaggtaatacctccactgctgcagacaatgaaccactacagtcatctccttctcgtgagtggagtatttttgttcaacactattcaatttcatgctttcgaacgccacaaggtgtgcttcctgcaccaagaccccacccaaggccctatttgaggcatttgtttggacttcaaatgacaagtcaagatctggcaaccgtaacacaggcttagtggagatggctttcttcaggcctttaaaggccatctgacaccgcatgctctagtctcacttcttgttattttttagtaggtcaatgaggggagacaccatttttgagtatcctttgatgaaccttctgtaatagttggttggattgaggaaggattgtaactctgtcaacttgctagggactggccactccttaatagcttgcaccttgccttcatccattttgatcagacctgcactgatcttgtgtcctagaaatgagatttgctcctgagcaaattctcatttatctagctttacataaagcctatgctccctcagtcgttggaactccatccccatatgcttttcattttctgttatagtctgactgtacactacaatatcgtttagatagactaccacaaatgcatccaagtaatcaaacaagacatcattcatcaaattataaaaagtagcaaaagcatttgttagcctaaagggcattaccagaaacttgaatgagctataccgagttacgcaaatggttttctcctcatttcgtgctgcaatccacacttgcaaatagctcgatctcagatccaacttagtgcagtatgaagtttttgacaatttgccaaacaactcgggtaccaacaggatcgagtatttgttctttatggtgactttgttgagggccttgtagtccaaacacatgtgcaaagagccatcatgctttttctggaacaacactggtgcaccatatggagccctcgagggttgaatcaggcctacattcaacaactctttcaactatttccatagttccagtaactctataggggacatcctgtaaggggcttgagctgggggttttgttccaggcaacagttctatcttgtggtcaatgggtcgccggggtggcaaccccttggaaagttctgtaggcatcacatctttgaactccttaagaatcttgaccattgaatcaaggaattccatagactgcccctccttgatcttgatcaaagctgcaacataggtctcttgacctctcttcaaacccttctttaattggatagcagataacatctcaagctgacctttatcgccattgtttgcccttaaggcctgcacaaagcagggctgacttcatttaataccatcaagccactaagatgcgggatcaaggccaccttagccttcaagaagaagtctatgcccaagattagattgaaattgtccaagggcacacagagtaagctgcaagtgcccttctagtcaacaacttgcacagttcttggctacaccatggatcttttaggctttgctattgactattttgatttgactggtgtcatcttccagtttcaatccctatttggttgcctttttggtggccacaaaattgtgagtgaccactatttactatagccttgacttgcacaccattcacaactgcatgcacatgcatttgtgacttttggacaggagtctcaccatgaataacatttaagagttgcagtaggttgactctaggaggggtctctgagtcagaatctcccttgtcgtctgtaatcacaagggttgagagtttctctctttttggggcagtccctggctttgtgtgggtcattgcaaatgaagcatcctgccatccgggtggtttgctgcacaaatttggtggtcttctccgctggtttggccactgcatcacccttcctattttgtttcttccaccttgacttcctagaagtcttgccctcaatcttagcctttttgcctccttatgacttagatttttgcatagtggagatggtgccacccatcttataatccactaagcaatctattgcagccatggtagcagggagatcatgaacccctccgaagttcagtctgagcccattcgtgcggtccggacatgaaattgaagagcttgtcttcttctgtcatggttttaatgtccaacatcaaggaactgaattccttgacatatttcatcacggatccggtgtgtcttagtctcttcaatgactttctggccacccaagcaatgttggtagggaggaattggtccttcaactccttcttcagagtttcctaagtggtgatttggggccttccagactttgcatcatccttcatcctcgttcgccaccagagttttgcatcaccagtcagatacatactagtaatgaaaattttctcaccatcagagacgtgagcaaccttaaagaattgctccatgtcttataagaaattcttcaactcctttacattcatgttaccattgaaacccttaagctctaggacccagattttgggaggggcttcagagcttgaggaggatccctgcaacactgccttcttgaggactgtaatgtcttctccataagaccgtggggtgcctttgaagtcatccatcagggactggatatctgtcttcaaaccaacaaccttctcctcaaagaattgatcatgtgtctccaacaaacttctccgcacttggatttcccccacagtgtgctctacccacgaggccacaatgccattctcacttggccattctcctagcacttcttccatccgagcaatccttttccgcaagacttccgttgcactaccattagccatctttggtacttgctttgataccatttgtcgcaccccttggaatcacccaaaaattttcactgagtgtgtggtgttaagacacctttcttagccaatctttcccttaagcctttataaaagtagcgtaactaggccaaagcaattatgagaatgctttccaacttgtgttattctaaagatacaaaatcgttccaaagtttctcaacacattgcaagagtcggagactacaatgcctacaccctaagcattcaatagatgcatacaacactttgtctcaagtatgcagggaggtttttataagagacacccagcctacctgctggaggttatctggagacatgcttccctccgaactaaggtgtcctttcgcaccagccattagtttctcagctatctaccagttccttgttgctgagtttagctactgccatctcatgtgctgcactgatcaatcctgctgccactagccaactgctattccttcaagccctttctcattgagccgttggtgagtcctcctaacaagatgcctccctccatcgtaaggtgcctcctatgaacgggtgctcatcaaggtgtctctgactaggctctctgaatcagcaacgtgctctcataagctgatcaagtgtgtttggtgcatcaacgtgccttccccacactgatgctcaagcccatgccatgtcaaggtgcccatggcttaaggcatgtgatagctccctttgtcagtcaaggctcactgttgccttgtccatgccatgcactaacaatcttacttgttgcctcagtttcccaccaagtcactgatccacgtcattgggccatggcattgcgcccatgactattctatccccttgcatagggcagtgtgcccttgtgccatgcataggcatcatgagtctgagttggctgcatgtctagtgccccaccaagctatggcattgcacccatggcttctcgaaccggcttagtgcaggagtcttttaggcgtcctcgtgccagctcggggaagaggtagttcacaccaagccccgtgttgttgtggccatggggtgcacaccacatatgtcgtggagcccatgtgtgtgtgctagtgtgccttccaagtgtcttaggcacgcctaatgccgtgccatggtgccccttggtgtggccaagtcttggccttggtgctcccttgagtcacctacacttcccaccttaaagagcaatacgggccattctcaagatgtctggaggagacatcagacccccttgaggagacgtaatggaatattaaaataaataatagttatattccataaaaacctcaccctttgtttgcactatcaccaacgtgcctcatgtgcaggatgtgcgtcaagtgtgcgtgtgagtgcggactggttcacgcgcggatgtgggactagtgtgcgcacggcttgcgcctggtgctcgtttggtgcacatgtggcctgcgtctggtacgcccgcgacttgcatcagtcttctcatttggcttcttggggcgtgaaccaccaaagcttcaggttttccctgcttctccacctgggatcctcatggttgcaaggcctacccatgaggcccttttctccgtcatcgggtcaagaggctaaggagctgacaacaaccaagaaggccattccctttgtgaagtcctttttatcttttgctatgatttggggacttgattttactttcttctaaagaaatttgggcttaagctgctcattctaaagtgtgacttgggggtggttctagtgaatagatatagtatgtgcaaacaaataataacatcctcatttatgtaagaagtttatgatttttattgtcctccctttttgggtatgatggtggactctctttaaatggtttaaggaacaattgcttggatggcatggtagttttgtgggaaagaatgaaggagttttggaggatgactcttctatgcttattttggtgtgtatggaaagagaagagtaggacctttaaaggtgttgagctattggaaggagcattgacatatcaattcctttctttgaggtgagtggagatggtaacggtggtctatgatgcttagatccttgaatttcacctaacgtacatgtgtcgacatgacatgacctggttgtgggtattcaaatactcctattttgctttgggtgtggctgtttgattttttcattgatattctcttattctttgaattttcttagtaataattacatttgataaaaagaagagttaattgaaaagtgaatttttgtaagaatatttaggaatgtgaggaaaaaaggggattagaggataaagatgagagcttttaaaaaggatatcttcccttccgatttttcttctttatctatcaaaaaaatcttcacttccaatttatttttaattaacttttcttttattatgctgtatcccaatacttgtgtcctttttttggatcccttttagctaagtccctgtatcctaaaatttgagttgtgaaggatcaaacacctagacacatacgcatatccaatgggtctcattcttcttttctggatttgattgtttgggtaatggggtaggtggcattttggcctattgtaccttttctctctctaaagttgtcgggtgatgtgctttgtagagtccccatgtacaagggtgcagccccttttctgttaggtgcttttcattagtattctatttgcttataaaaaaaaaggaacgaaaaaagaaaaaagaaaaaaggatagaaggcgaaagcaccttgtaggaagagaatcaaagcacagaaggtacaagaaaaggaaaagcacaaggttgatcattaacttggatgaactcctttcatcttgctaaattattctgtttcttgtgtggctgtgcctatcataaaagaagggggaaaatccagtttctggagttttgctgtaacagtacttgctgtcatcattgattctatagcgtgaggattaatttagagaactcatatgtttaagatttatttgcaagttataatatagaggtggactatatttattatttcttacctatcatttactatttttggagctgtccagaaaatt

SEQ ID NO: 12354 - DNA, 2245 bp, Vitis vinifera
  Intron number 1 from transcript GSVIVT01007912001 (locus G SVIVG01007912001) derived from phytozome v7.0 (chr-ID chr1 7; pos 7629973 to 7632217 reverse strand)
caggcattgttgctctgcgcgactctaaattgaaggcaaatctctatgtttattagttttcattgatttgatgcgaaattggattgtggtgtatagtctgtttggttcccgagaaagcgtgggaaaagaagggaaataacaaatttgaagttcggttttttgtttgtagtggcttggttgccaagaacgaacaaggttaaatgcgaggttcaattcttttattttattttgtttttttttttccatgctttctcagaaaccaaacagaggggtagggttttattggagttttgttgaatgtgttttagaaggaaataagaaatttgattgatataaattacatgtttcttagttcgaacattggtatagagtctgagataatgtattgcatgatcaaacaattcattgattacgttgctgcaccgccttcaccatcatcatattcatcctggccttttcaatccgtgcttgaatttgccatcttttacaaatacccagtttctctcttaatgttagtgtgttgatattgataccaatatgtgtatgccgccaaataatttgacatttcatttttaattccaattcttggtgaacttgatcctgaactatgtgactgtttcgttttgacacatagtttaggttcaagagcgggtctactgggattaggttacctaatttggactattgagttggatgacaagtatgttgcataacaaatgagatcaagttaattgattaataaatcttcattttttttctggtggctaagttctttctcatgaatatttgtgtgcaatatggagtcaaactaggatttgatttgtaaggacttgctcccaatcatgtagatattgtccactttgggcctaaaggaccctcatagatttaaaacgtgtcttcaaggttaagaggagtcgatacatatatagccccaaaaactttcaacctatccgatatgggatattacaaatttgtatacccaacctgaatcaacatatttttttgttttatgccctataactctttcttagccagacttggacagaatagcagagaagtataagtattagtagcatagcaaaaatgcgttattttctctcatgcctttctttgttcatggtttgatactttgatgtcctaggcatggaggaactacaccaatttgtaatatcccacatcgtataggggaaaaagttattgagattatatatgtatggactccttttaaccttaaagatgcgttttaaagccacaagggccccttgagcccaaaacgaataatatttacacaattgggagtgtgttgttacatgaagtgtagataatgtctttgttggagggttaagggttggcttttggttattttagattttgttgcttgacttgttgacatttcttgaaaaattaagggagctgaaatggaaaatgtttaacatagtgtgatgacgtggtctaccagtcaatggggcctctgttgacagcagctttgggttgcttctgtggcttcccacatgcatagtcaaatgagctgtttgatttttctgtgaagtgtcatatactttttgatcagattatcatatactttccatttaaaccaagatcatcatctgccaactcatgccactgaaagataccactcctcttacaacttattaaaatagggcaaaaatgtaatctgctttaccttgcctcccccatcttctacttttcatgagactgtgggtctcaacatgtatttaatttaggttctaggacatgtatagggcagcacattgttggaagttttccgctagactttcaaacaggtacttcctgagatttactttgttacaatagttccatttatccctcttccgtacactttttatgttgccaatttggataagatatgttagaaatggttctgaactcatggtggatagtattgttacatatcctattatactgcaccaccgtataccgagtagacacactttctgtagcaaataaatgaggaatactacaagctgcttagcataatgaattggaaattttcaatatgataaagactctgattctcgaaattggatgctataagatggtctgagaattacaaagattcaaatgtattaatagagtgaatttgcatgacagctactcctgggctgtctgatggaagcttttcatgggaacagcaaatacacacacaaacgcataagctttaatatactgaggacctgcttttttgttgaacaggcatttccag

SEQ ID NO: 12355 - DNA, 12316 bp, Vitis vinifera
  Intron number 6 from transcript GSVIVT01021825001 (locus G SVIVG01021825001) derived from phytozome v7.0 (chr-ID chr1 4; pos 6829893 to 6842208 reverse strand)
ctgcagctgcttttctggttcaaacaatctttcaggttttctttctttctttttttcataactttgctattttttaccatgggtctgcccaaaattttggtagaatactgctgtagttacagttgcctgggtttcactacagaaacagtgagtgacaacgttagttccttaaaaatagtcattctacctccagtgatatcatagtatgctattttgtataagacaaggaacaagaaagggaagcaatatttacactggtgtacctcacaatgcagactgcttttagtaactttcccaaacaaggattatgcacaccagtattttggcatatccaagcttcagctcaagtttaggtctgatgttgagtgtaggtggagatgagatgtctttggcttatgataatactcacccaatcagtgcagaaatgctgtgtgtcttttcaacaaatatttgatgcatctattatatttgttgagcttcatttttcgacactcaggaaattgttagtatcaaaagtaaataaatttgtctatactatgtatttatctcatatactataactgtataaatatctccttctagatagttgtcttttcaaaaatgtccatggtagtgtatcctgtcattttgtacctgctgcatagagcttgagtctcagaataattatttttcttaagatcgaccaaagctaagtagaattgcatggttatcaaattaaaatggaaatagacatattatatttcctcacaactgatccatagtagaaaaaaatgttgtgccttgacatgtacactgcattttttatgtttaaaaatgtatgcagcatcaaaaagaattattttaaaattctgggcatgtcattatgtgtccatgcatgttagaggactgttgtatctgacacagttttgacgtgtatgtggctccatgtaagaattttccaggctcattgctgaaccctcatgccttgagtttcgcctctcacattataggtattcttgatcctcgcacctaatgaggctatggactctaggaaaaaacatctcaagagggggattagtgtgcaaagtagacattagaaaaaaaactatggttctatgaattggattttttccttgcaatttagggaaaaatggacactgcacaaaattagttgagatggatgccctctgtacttccgccatgagattttgatattggtcatgatacttataggagtttttctcgagttttggaggcctctggtaacctcttttcacctacctttttgtgttggttgtggaagtagagttgttttcacattaaaagcaatagaaaggggttatagaagtggttttaaagcggatgggaggtgggaagaggggatggaaatctctcacctagtatttgcaaatgttgcaggactgttctgtgatgccaatgtggagcatcccaagatctatctatagaaagagtaaaatcattcttgttggcaaggtgttggagatgagagatttgtttgcttgtttggctataaggttagttgtcttccttctacatgctttggtttgcctctacaagcgtctcatagctctagtagtgaggtaagatttaaaagaagattagcctcttgaaagtagtaattcgtcgaaggaagggagagtaacccttattaaagcacccttttgaatttccaatttatttattgtcttgatttgtaattccttggaaaagtaaagattagactagaaaagatctagagagattgtttgtgggggaatcacttggaggggaaaggtacatcctgtgaattggaggacggtttgcaaagattaaaagtatggcgaggataggaattaggaattttgatacttcgaataagatgctacctaacaaatgattgttgaaaaaagcttatgagcatgatagcttgtggtgaaggattgtaagtgtaacatatggtgaagtggatggaggatagtgcactaaacaagagagaagcttttggtgtgggcatgtggaaatacattaggagggggtgggaagagttcagacaaaacatttcctggttgtgaaaaaaaaaaagttcagacataacatttccatttttatttggaataatagaaagattgttttttgtttggataacttggtgggggaatgacctttgaaagagattttcctatgttgttcattctagcctcttcgagaaatgttaagagtggcaattttgtgagagatagaggtggatggaggtcactagtccttgcatgttcaaatgcacttttaggatcagaaatagaagagttcaactagtttttaaagttagctaatgtgtgagcttacaaacagtaggggagagggtagcttgtttgggagggagggtaataaagagagatttaaggtaaatccttaaacctccttgtgcattttttttttgaataggcaataaaagagaatatattagtagtgccttagaaagggcaccccaagatgcacgatgtatacaatatgcgtgaaaaggttgtcaaacgaaagagaaaacaaaagccaaactctctctccttacttggagcttaactaatcaatgaagcctaccatggacattgagtgatgatctatgtatgctctaacccattccaaaaagatactcataaaaaaatatttaattgcatgatctcactgttcaacatcttaaatggcctcctatttctttccttccatagagtttaagatatgtacaggggaataatcctccaagctttcttccatttcttccccacaaaagaaccatgctagcttagaagatttgctttaactgtaaagtgcatcacccatgtcacacgaaatagagaataaatcagctactatgacattcttactttggcacattggagtaaatgatcaattgattcttcatcacatttacagatgtagcatctatttggcataagccatcccctttttttaagttgattaatcatcagaatctttccctagacaacttctcatgcaaaaaaaactactttcaagggatcgaaagatttcaaactatatctgcaggaaaagaatcccctcctaccgtaggctaaggaagcataaagagatttgattgagaagttaacaactgttggtttctttccaacccatcctatcctcctcatcgtttctaattgagatcgtgtgcaaatttcttcaaaaggcttccaatccctcaagtttctattcattgaattgtcttgaaaagtggggactctattggcccccatccccagcctgctcccacacctctgctactcaattatccttggtgatggttatagaaaataacactagaaaagcctcttcctatgtcatatcacaacaccatctattttcccaaaattttacctttttgctattcccgacaataaagcaagacctacttttaacatcatttcacctgtttctaattgccttgcatgcgcctacctcataaccatcccacacatcccttgaacaccatcctccttcctcttctccaaactttcctacgaggacttgtttccacaaggattgtccttacacatgtttgagggatggggaggagtttgttgttcagaaagtttagggtactaatacaagaataagaatctgttttttttatctctgggcatgggagccagcttggggaaaatctcaccataagttttcttatgtgggggtggggtagactctagtgaacagatgcaaactttgtaaagctagtaatgaataagcaaagggtttatagccttgtcccaagtgcccgatttatctccttgttttcctactaagtttgtatggaattctcaagtgcctttcaaagtcaagtcctttgtctggttagtggcacacaagaaggtaaatactaatgacttgctacaattgagaagaccctacaaagctcttagtcctgacatttgtaagttgtgtatgatgcaaggagaatcagcagatcatcttttcctacattgttccttgtccatggggttgtggcacaaattatttcagttagccaagatggattgggttcctttgagaagcatttcagacatgatgtctatcaattataaaggttttgggacttccaaaagagggatagttttgtggcaaaatgcgtgcattgctttaatttgggttgtgtggcaggaaagaaatgttaggatatttgaggacaaagctaggaattcagagaatctatgggattccattcacttcctagcttctctttgggcttattgttgcgtggtttttaagggcattccccttaacgtgttacaaatagattggctagcagtgtgtagttccaatgggatggtctagccaagagagcttgttcgtagttttcatagtgtagttccttgttcttttattgtgttgtttagttttatctttggtgggaggattcctcatccttcttttgtacttcttattctttcaatatatatatttgttgtttcctatcaaaaataaaaaataaaaaaataagcaaagggtttggtcagcaatgagaggagcttaatccgggtttgaggagatgatatctatgtattttcttatatggtctaatccatttttataaatctccttgtatagtggagttcagttatgttttgatcagtttttgtaattgtggggaagatttctcatccttcccgtgtactttttatccataattaatcatcttttgttttttattaaaaaaaaaagacgcaaatcacattctaatttactgtagcataaatggtgtgaagattggctcttctttacttgttttggtacatctggagagagagcgtgaggatcaggtttttcatggagaagagcattgagatcaaaagctaaaggagattttcattaaacccttctgtaaatgatccatagaaatgatctagaatttcaataaacccctgtgtgcatagggtgcatttatttttgtatgcgcctttaatcaaagttttatatatatgcgtgtgtgtatttttcttctcaaccctattgtgaatgatcggccagattattagcatccaccttttaaaaatctttgatcaggatcatacaaaatatcaaactttgttttaaaataattgcttttcttgtatttgtggttgtagcattttgtggcagtttagggtctggacttccattctgctttaaatctttatcacccaatacatagcattagcagaatctcaaggaagtgagaaagatcctagattgatcctcttaacttggatgctggcctagactaattctaaacctggttcctcttccaaacatttttggatgcacttcaaataggatgtcttgtctttaactgagttttaaattagtaatctgttgttcctcaatgcaggccttcttttttaaagtttccatgtttttccttgttgttctatgaaccgtacaccaacagtagaaagagagactcttgaagatttttgtttttcaaaatgaaagtagacctggcaaacttgatccacactgcatctcctgtgttgttaatcttataatttccctttttcttctaatcatttttcttttttctttttttattttttacaattctctctatttctctctctcactcactcaaaaaactatacttgtactatattagataaaggtaaatatatatcaaataaaggagggtgagaaatccttctaaaaagaaaaatgtacatggctataaaaagatggacaaaactccttgcacgcctttggcctcctaaccctatgaaaatgaagtatcaaaattcaaaaggcttaagagatacccaacaaaatgaactagtagagatgtttctcttttagccaatctatcagcttttcagttagtcgatataagctcccacgaggaagagcaaaatagttctgtaaagtaatccattatcctcctcatctactgaatatatctccaagactctctatgctaaccagtaatgcaagtattgccttaatggctaacccaaactttgccctctttttaaactttgaataatcttacatatatgatctcacgtgagttccttgatatgcatttcactaggattgacgaaggtacacccatcaaaattaatcttcatagctagcctaaattctagatgttgtgcgtatagctaatgaggcaagtaactctaagttgaaaggcaatgattatggtgtgttgtgtaagcttgacattgagaagatttatgataatgttaattgggactttttgatttcggtattagataagatggggtttgggcaatggcagatcatttggattaagtggtgcatatcaacaactagattctcggtccttgttaatggcaccttgtctaactttcttcaaagctctaagggcttgaggtagggtgacccactcttgcccatttgtttgtgctcccgacggaggcacttggttaccttcctaagaggtctaggggggtggttatttgttgagctttaaggtaaagggtagaggcggagatggagtgaaagtttcccatctattgtttgttgatgatactttggtttttgtgaggcctctcaagttcaaatatcctatttaagttggtttattatgtagtttgaggctatttcaggcttcagaataaacgaaatcaagagtgagctgattccaattaagagggtagaaaatatggaagatttggcttctgaattaggcgctaaggtgggaaatttttcattcacttacttgggtcttcctttgggtgctccttataaatcaatggcagcttgaaatagggtggaagagatgtttcataaaagattggcaatgtggaaaaagcaatatatttccaagagggggggactcagtatgatccagaggattttatttagctcacccatctactttatgtctttgctttagatgttttggaattgagattggagcatattcaaagggatttctttggggcattggggctttagaaagaaagtcgcatttagtaaagcgagctattgtttgtttagactagagaaaggggagcttgagaattagatgtctttcttcactcaataaggcctttgcaagtagagatggcggtttgtgtcagaaatgggggcttcttggaaacaaatcataattggaaaatatggagaagatgaatgggggtggcattatcaggaagtgagaaacaagtatgggttaggttatggaagctatcaagaaggattgggagattgtcaacaatagtctccttttcaatggacaatgggagaagggtaaagttttgaaaggataggggattcggtgatgagcttttgtgttatcctccctctccttatttgtcatagctgcattgaaagaggcatggatggcggaattgtggaatcggtctcataaatgggggtttttggaatccttgcttctctaagcatttgaacaattagaagatcgagaatgtggagtgattcttttcgaggcttcaacaaaaggtgatcaatagggaaggagaagataagctgatttggttggaaataaagagcaaaactttttccatttaatctctttgctttatcctagagccaggaagatcgatgtctttccttgtgggtgtcgtttgaaattccttggttccacctaaggtgagtttctttgattgggaggccacttgaggaaattttttttaccttggatcaacttcataggagaggttggaaattgactaatagatgtttcattttctatatcttggaggaatcaattgatcacacccttttgtattgtggcaagatgagggtcttgtagtagctattgttttctttttttgtagtgtcttgggtgttatcttcctcggttagagagttcctcttaggttggtgtgactactttgttgggaagaaatggaaaaaggtgtggggagtaactcctttatgcatttttttggacagcgtgtaagaagaggaatacaagatcatttggaaaaaaggagctttctaacagaaaactgaaaagtgtttttctttgtaagttgttgtcttggagaaggttgtatataaataaaggttcaatgtccttaattgacttcattaattggttgggtttttgttgagggagggagtagttttttttttgtccttgctttttgcttacgcattttagctgccatagtatacatcctatatactttgatgcgcttgttttagggttctttttatataatactctctttatttaccaataaaaaaaggtaagggggcactcaactcatctgtccactgctctcttgattaataatcacactaagctctaatcctacaaattgttgctaaaaaaggagactctggagaattccttggttagtgccatccataagatatgaagtagcaaatattttcccataatttaggcacttatctctactattgtcaaagatcctagctttcctttccagctaaataatccacaatgttgctaagaaagagcctctcggccatgggtctacggctcctaccaagacttgaaaagaaataaccatcaaatcagggatatttgagagctcccatgctaccttgcttttgagacagatctttgccataattcaagagcaaggggacaacaaagaaagaggtgatttgaaaactccccattccctaggtttattataacttagaagatggttttcaacttcttttaggtataacttagaagttccaaaccttgtgagtactaattgatgttgaatgccatgtggctatgagaacttgtgttttcgttctttttttaacaaaaacaacttcatttatcttaaaagataaatataagaaggatgagcaatccttcaaggatgtacaaaaaaggttttaaaatgaccgagtttcaagcccccataagaactaacctaactttacaaataaaaaccaaggtacaaagaacagaaacatagcacactcaaggaggaagaaagtctcctacaaaggaggccaaatgcttagctctttgtttaactgactgatctgcgagttggttggttgaacagggaacccaagtgagggtgcaatgtagctcattgacaacatctatgattttcttcatccaattgtcaaacttccatgaacctctttgagtctttctttattaatcacctaagatatgacaatagttgaaacagttagggtaggaaagcctaaagctttagcttgtagcaagccctctaacaatggcaatatctctgcctcaattaccaaccccacccttgcctgtttagagaagactctcaacactgcactagagagatctctaatcattcctcttatacctagttgactaggattaccaaggatcatgcatcaaactttaactataccaatcctgcgggaaaggaagaccaaccaatcaacactatcttcataaacctatttgagaaacaaacactcttctagtccaacattaaaagaagcgaaggaatatttgtaaaaggcttagtgactaaggcttaaagggaatagtaaagtaaatcaagtcctaaatggcatccataaatcttcatctatcctcgaaaatccttgtgttcctctctaaccagataaaccatatcaaggataaaataatcccttccaaagaatcttcccttttggaagacttctaaagcccttaaaagagattcccatcatttctactatgcctcttgaggggaaccattcaagattggttaaacaaaacaatctttactgaagaattgttgcagtggtacatcaagaaagagatgatcgaccaattcactcctcttcgtacacataatacaatgatttagattgagagctttgtaaggcctcctcaattgaagcatgtcattagcattaaccctcttattagccacaagtcaagtgaagaccttaacctttggtgaagcttttgagttttggattaacatagcaagagcaaaagaagtcaagataggagaagggggagcaattgagagagctttgtaaaaaagatgacagtgaaaagtcttgaggatgtcaatgaacaaaccctttcatttgtgaaggaaaaagatatgtacacatgacctagagaagagaggaggttagttagttccttactctccgaatcaaaaagctttcgacgaaaattgaaattccaaggtggattgataaaggattgatctatggtagagaagataagcatatttcttgtccttatgactaggaacagatttggaaattgaagtgtgagaggattctcgcccagccaagtatccttttataggtgagtttttttttttcatctctcaccaagtattgagcaaattttgatcattggaaacataagaaatggctttccaatggcaactatgtgaccacataacaatagtattggtgtcccaatcattggcatgcaaaccacaaattcttaggatgaccctatgccaaaaagcattgctctctctaggaagtctccataaccactttccaagaagagcttttattcctccaagagattctcctgtgagaaaaccttatttcacatgatagtagattgtgtgcaattgtatatattgttaacctagattaggctatttcaatggtgaagtaatccctaatttttagggattcaaattaggatagaatcagtccctgaattatagggatttaatattctagatagggtagaatctgctcttattttctagcctaaaatcgtgcacctataaactactaaatgtattatatattgcctagggttgtaacacttcataaggagaaaaaatactatgatttcttcacatcttcctaaacccaatcctctattcctcttgggtttacacatgagatcgcactcaacaaggcgatgtcttttactttccctaaaccttgactgaaggaagtctctttgtaatttctcaatcctataggccattttagttgggatctaaaagatcgaaagggaataagtgggataagagataaatagggttgcaaaagggttattctacctcccaaagataaaaacactttctttcaaccatccaaatgacaagagatcctatctaacactagatctcaggaagaagcggctccaaaatttccacctacaaggagacctaaaaaggtaggggctaagcaaagacactacaatccaacaatgaagctaattattgaacagagttctcacttccattaatacctgctaaggagttttttcctagattgatctttaagcatgacatgcaaccaaaaaccattaagctgaacttactgttctgccactcctcatggctagcacttgaaaaaaaaaattgtatcatctgcaaattgaaagagggaaacccttatctatccttccctaccaaaaagccttctaaagagcctctatcttcagctcttacaaccatcatactcaaaacatccacaacaataatgaagcgaaagggggagagagggttgccttgtcttaagcctttagacgctttaatccaatctttagcagccctattcactagaattgtgttttcatcattgagtgtttctttactttttttataatttaatattcatgtgtaaattgaagatactaggtgtacccaatcctctattttaatgttttttcttttacatctcactcagtcgccttgttcttatcatgtctacatgcatacttgtacaaatggtgacattcttgaaaaacctttccaaaggtgacagaaatgtttatttattttaagttattggtttttgttcctctagaacaccccccatttatgaagtttttagtggtcatttttgcagatatgcttgtgagcattctacataaattagcttcccaagaaggggttgtgttagggatgtttttagttttaggtgatttctattggaatgatttagtaaaatattgacaaatgaccccttgaaatggttaagttgaaatttaagtttcctttaaactttggtcagttcagaaatggaatcaattcttggaagtttgaacccaaaaatattttgatccatatgacagtgatgttgggtaaagcttcagtcattatagaaataacatgaaaacttagagaggttcagggagtagaaaactaagttttggttgtctagacttgaatgcccactaggaaattgattaagaatttgaatgatacgcttataattgtcttcaagaacaatatagaacatactatgtattatcacattttattccaaataacttttccttgggttgaacttgtatctattgttgcacagagtttcaatgcattttgttgtaaaagaatttgtgctccattttaccattaattgctgatagactgaatatcatgggtatgtctattcatcttgtgatattgtaggtgggtcg

SEQ ID NO: 12356 - DNA, 8432 bp, Vitis vinifera
  Intron number 1 from transcript GSVIVT01013915001 (locus G SVIVG01013915001) derived from phytozome v7.0 (chr-ID chr1 6; pos 6693709 to 6702140 reverse strand)
tgctgatatggtgaaagtatgttatgaagtatacaatggcaaggaatcctctaatagtgaagaggaaatgttaataagatgaacaattgttcaagaaagttcaaatgatcaaaatcaagtatgtacaactaacatactagcctcacaatcaatggaaatttttgtgatataacaggatgttgtgatataaaaatttccatcgatgatattagaaagctatcaatatgattagacttagtttcatgatataatacattgactacaagtgctttattctatgtcattgaagctaaaacatcctctaatatgcttttagggcgaccttggctacatgagtatggagttgttcctttcacccttaattaatgcattaagtactaccaagatgaaggttaaaagaagattattgttgattgcaagcctttcaataaagatggatcatactttgatgatgctaaattgtactctaagtcaaacaccccaaaagaagtgcaacctaaggctattctaacaataatgaagaatacatttattaaaagtaaagcaccacataagggtcagctagtgatacctcaacaacaaaaggatagggaagataataggacattaaattcacctaacaagaaaattgaaaaatctccaagatctacctcgatactttggtatatacctaagtctagaacaaaagaagggaaatccccttttgtagaatgtgacatgaccctaatcaagaatttagacagaccaactcttccactcacaaagttggctgcgttaaagcccttaaaacctccactagaagggtctattaaaccatcacaaagtcgcaaagtaaagcatgaaaattttcctacaaaacatactaatccaaagggatttgatcctaatgcctataaactactagccaaggcatgctttaaccaacaaaacttggtcataataggaaaatatccaatcttagtggctgaggaaaaatcacaaaggattaccaaaacccaaaaaatgctaacgaaaaaagggtacaagataaaaaatttaaaagccatcctaggatttatttctacttcttcacacatattaataaaaagagaaagcacccatcatatcaaagctaaagtaaataataaagaatgcgatctaactttgagtactagacaatctatctttgatcaaattagtgagtcttcaattagggtattagtcttcgacaagcttgggcaacaactccttctaccaaaaactcaccaagctcaattcattctaagtcggggcctaaattgagcaagaaaaaggttgacaaaaaaaatcaacatctcaatcttaaagattttgatgaacataaaatttagttccatctcatatgaagcggcatatataccctcttgagcataacctctggagaaaggtttagagttaaaaggcacaatgtggtcttaactaactaacaaaagccttaagctctaatacacaaggatattgaggaaaatgaaaatgttatctttgtgaatcctatagaaattcaagaaccaagaaatcaagaacctttaattaaagataatacaaaggatgttggtttttcattagaggaaggggcataacgcaccatcaacaaatttaaagacgctaatcgaggaacaattgtgatgttcacctaattttcataagtacccttttgactcttgaagaagaaagatcgtatactgacttcttgatagaatataaagatgtttttgcatggagttataaagagatgctcaaattagatttgaaggtagcaaatcgtcacttagctagaaaatatgatgctcgacttgtaaaataggcacaacgccatttttgtccaaaactaattcctcaaaaggaagctaaagtcaacaaatttattgaaactaacttcatacaagaagtgaaatattcaacttggatcttgaatattgttcttgttaaaaaaaaaaaaaaaaacaaattcgagtatgtgttaattttcatgatctcaacaatgtttgtctaaaagatacttcccattacccttgattgaactcatggttgatgccattattggacatgaagcattatccttcatggatggctcatcaagaataatcaaattcgaatgtctccaagagatgaagaactcacagcctttcgcactccaaaagggattttttactataaagtcatgcattttgggttgaagaatatcaatgttacctaccaaagagctatgcaaaatatttttgatgacatgctccaaaaaatgttgaatcttacatcaatgatctagttgtaaaatcaaagaaaataaataaccattttcaagacctatagaaagtgtctaaatggttatggcaatattaactcaagatgaatccactaaagtgtgcttttggagttacctcaagaaagtttcttggattcgtcgttcgacatcatggcattaagattgatcaatccaaaattgaggcaatcgaaaaaatgttagagcctcaaaacatgtatgaattgaaaagctcacaaggacatttggcttagatctatcgattcatatcctatttagcaggataatgccaaccattcaactaactcatgaagaaatgtgttcttttttagtgggatgaagccaatagaaatgcttttaaaagcattagagaacatctaacaaaacctcttgtgttaagagctcttatgccaagtcaaccactcatccttacattgcaacacaataataatctttaggatcattactcgtccaaaaaaaaatgatgaaggaaaagaaaatgccttgtattatttaagtcaaacattaacaggtgccaaattaaattatacaccaatagtgaaactatggaaagcactattcttctcaataaagaagttaggacattatatccatgcttattcggtggatttgattttagaagcaaatcctatgaagttgtgggttttgatagaaacaaagtgtagaaactctcaagaagcaatagaacgttgaggaatctgaagtgatatattttattaagcttcaaagtacttatttatatagctagtttaaaacaaaaaaaacataaaaaaatagcaacaaacctgctacctatagatacttcctaaagaatagaaacaaaccaacaaatacttcctaaggaataggtaaatcttccacatgactaacttatttgactactttcacttcaatctactcagctccatgtcagcagctcctaggacatgtcattcaacactcctccttgtctttggagctgtagactccaagcctttgcctcaagaactcatatctagctttggaaagtggcttggttaagatatcagcattccgactttctgttttgcagtaaactagttgtatttctccctctttctatacttctcttaggaaatagagtttcagcttgaaatgttttgtttttccatggaacaccgaattattttcagttgaaattgcagcttggttgtctacgagtatttgtgtgctttccttttgctccataaacaagccagccatcaattccctgatccagaaagcctgattcacaacagtagtagcagctacatattctgcttctgctatggattgagctatgacttcttgctttttggaaccatgaaaaaatagcagaaccaaagctaaaacaataacctaaagtacttctcatgtcatcaacacaacctgcccaatcaccatctgaataaccatggagagtaaagtttttaacttgacaaaacctcataccatagtcaattgtacccttgacatatctaacaattctttttgctgcttgaaagtgaatttcactagcacaatgcatgtaccttgagagtaaacttacagcattcataatatttggtctagttgctattaggtacatcaagcacccgataatggtcctgtaaagcctttcatcagcttttgcaactccatcttctttgcaaaacttctcattttgattcattagatttgcacttggattgcactcttccatcttgaactttttcaggatttcattggcatatttatgttgacatatgaagatctcattctgattttgttgtacctccatgccaaggaagaatgtcaccctcccaagatcagtcatctcaaaaacatccttcatttcctttttgaaattgtcaatttgctccatactgcttcttgtcacaagtagatcatcaacgtataaagataccacaagtgtttcatcacaaaccttcctaaagtatagagtaaattcacttaggctttttgtaaagcctaagcctaacaaatatgaatcaatcctgttgtaccaggcccttggttcctgttttaaaccatacaaggcatttttcagcaaatatactttctcctccattcctttaacaataaaaccttcaggctgctccacaaaaatttcttcctccaagtatccattcaagaaggctgatttgacatccatcttatgtatattctagcccttttgagcaacaagagccaacaacattcttgtagtgtccaatctaacaattgggacaaaagtctcatagaaatccatcccaaatatctgagcatatcctttgacaaccaatcttgccttgtgtttgtttatagaaccattagaattgagtttggttctataaatccacttgactccaatttcccttttatgtgtcggtttgtccactagctcccaagtctagtttttttcaatcattttaagctcctctttcattgcatccatccatttttttatcaactgcaacttcttcataccctacaggctctattatagcaacattgcacctccgatagatgtcagaaagtgatttggtttccttgacaagttcatcattaacattgtcattctcttcctaaaactcaaggtccttttggaactcaagattctctttaaactcaagcttcttatcattatctcaactccaactttcttattcgaagaatttgacatctctgttaactattgctttgttgttttctggaaagtagattctataggcctttgatattgagctatagcctataaagatcccagcttctgctttcttatccaatttgtctctcttaacatgtggaatataagagaaacaaagacaaccaaatgttttaaaattttgcagccttggtttatagccataccatgcttcaaatggagtcttttgttgcaaagcttttgttggcaatctattcagcataaagactgatgtatgtgtagcctcaacccagaatttctttggcagtcctttgtcatatagcaaacaccttgtcatttccataagtgttctatttttcctctcaacgactccattctgttgaggggtataaggtgttgtaagctggtgctcaatgcctgcatcctcacaaaatttgttaaatttctccaaggtgtattcagttccattatcagacctgatcacttgcattttacatttactttgatttttagcccaagctttaaacttccagaagatgtcaacaactttagatttaaatttcatgaaataaatccaacacattcttgtgtgatcattaatgaaagcaatatagaacttactgtcattcagtgatggtgttctctaaggtcctcctacatcaatgtgtactaactgcaacttctgagtagctctccaggccttgttttgtgggaaaggaagtcttgtttgtttctcgtactgacaggctacacaggtagaaggcttcacctctaattcaagcaagccttctccaagatcgttcttcttcataaagagaagggcagtatgatgaaagtgccccaaacgcctatgccaaagcattgtattgctttcttctttgtgaattgcaacttgctcttcttgcatcaaatccaaggcaaagcttttgcctttcatttggactataaatacctctctaccttgtgcattagcaatcatgcaatgattgtcctcaaatagcaccttatagcctttttccagtaattgaccaacactcaacagattttaattaatctcaagaacatataagacattagagattaatttcaaacatgtgtggccttcaatttccaccgttcctttgtcttttactgcaagatatgctccatttccaattctaactttggaagtaacagttttgtcaagttccttaaagagcccttgatcataagtcatatggtttgtacaaccactgtctataagccaagtttctagggagctgctaatggtaaagcatgataccacaaatagttgctcatcttaaagttcttccacagcaaccttgacttctccttgttgctgttgagatttgcatatcctttccacatgccctagctgaccacactggtgacatcttacatccgacctccaccaacaccttttttatagatgattggattttttacagtaaggacatggtggaaacttttgagtgttgttgttattgttgctttgcatctctttcttgtaatgagatatgacctaaaatgcaccctccacagatcactattgtctcataagcctcctttgtttttaagcctgtaatgcattcaacagctctaacaaggtgatacttgacacatcttttgagttttctagagatgatattgtagtctcaaacttttcaggaattgttataaaatttttctgaactattctagaataaaaaaagttagtaccaagaagtcttactttgttaacaatattaagaagtctatctgagtaatccttgattgtttctgattctttcatcgtttgcatctcaaattctctaatcaggttcaacacttgcatacctttgacttgttcatttccttcatattccttctttaggaagttccatatttcatttgttatcttcagtgtcatgattctggtgaaaattgtagatgagacaattgcaaatagactagcttttgcctttgatttcctttgcctcatctcattgtgtagttttatttgagccatagttggattgtcggacagaggaggaacttcatattcctcacacttgataatttattccatcaaacattggaggtgccagtgcattcagtgaagcttctaaggtcattctggatattgtttgtaggttttttttaggctcactcacctcacaagttactcaagaacttggctatgataccaatttgtgggttttgatagaaacaaagtgtagaaactctcaggaagcaacagaacgttgaggaatctgaagtgatatattttattaagcttcaaagtacttatttatacagctagcttaaaacagaaaaacataaaaaatagcaacaaacctgctacctatagatatttcctaaagaatagaaacaaatcaacaaatacttcctaaggaataggtaaatcttccacatgactaacttatttgactacttccacttcaatctactcagctccatgtcaacagctcctaggacatgtcattcaatagaagtacatcatgacaagaccaatcctatcaagatgcctagcaaaatgattacttttattacaagagtttgcaattatttacatcactcaaagatccataaaaggccaagcattagctaatcatcctatcctaatagattaggaactaactaaagattttcctgattaggaagtacttttagttgaaactttatctccatggaaaatgttctttgatggagcatctcattgtgaatgggaaaatgctagagtagtattcatttcccccaagggaggatatttccccatactcctttacccttattgaaaattgttcaaacaatatggtagaattccaggccttaattcttgggttggagatggctatggagacaaagagaaggcaagttaaagtgtttggtgattcaaaattaatcataaattagctccttagcctctatgaggtgaagaaactagagataattccatactattgctacacaactggcttgttaggatgattttaggatatcaccattgaacatattccaaggaaagaaaacaagcaagttgatgtttcaaaaaagcttgcatctactcttgctctaccaaacaaagaagccaaaatcctaatatgtcaacgctaggttgtgccaacaatttttaaagatgaagtaaaaaagaagaggttaaccctatgtatatccgtttagttgagtatgtgtttaaagtttcttagacaattggggctcattataatcggtttgcccttttctaatttggtgtgattatggccatcacacaaaattgttgtctgatgagaaagaagggaaagatggacagcttatatgagaaagaaaggaaaatgtgaagagaaggtttgcaacttatggacgaagataaactttgttagattctcattttcttgcttgtaaatttatgagatatattcttgtgagcttccaatatttttctttcataattatggaaagattagtaatttcagttcaacaatttaa

SEQ ID NO: 12357 - DNA, 10552 bp, Vitis vinifera
  Intron number 6 from transcript GSVIVT01027210001 (locus G SVIVG01027210001) derived from phytozome v7.0 (chr-ID chr1 3; pos 18237581 to 18248132 reverse strand)
acattcttttgaaggtatgtatgttactatatttatctttctttttatcatgtcttcatatcgtgcatcaatatgtgagtacaattcaggagtcctaaatggatagaggaaaatcaacctcaggattagattgagaacagactgttttttgtctagagtccactatctcccattgtccaacatacctcttctagtgtgcatccaaaaaccaacactccctgtttccatggccccattcactaatatgttcacctaaccctggaatagatatgatattgtaaatttgaattcagcaaactgttggatttagagtacacaaacacagctgacaaattagttcatgcatgcatcctatagatcatagtatttgtatgcagaatagagaagacaaatggatgttcttcttattaaacaattctgaagttacatggaaataaataggctaaggtttgaatcttaattgtgtaacaaaaaaactacaaatctaggacataacaactttaaccttatctgaaattccaaatctaatcagtacaatcaattcggatttatttgaaaataaaacagaaactttaacaaacaatcctaatatttcttcactccccctcaagttagcgcatagatattaatcatgcccaacgtgctaactagagtttcaaggtctagaaaggctcttagttagaacatctgttatttgttgtcctatggtgatgaatggcatatggataacaccactttcaagtttctctttgataaaatgtctatcaatcttgacatgcttcgtgcggtcatgttgaacaggattgtttgttgtgctaattactgacttgttatcatagaacagtttcataggaggttttgaattttacttaagctcttcaagaattcttttcagccataatatctcacatgatccatttgccatcacattaaactttgcctctgcactacttcatgctagcactttttgctttttgtttctccatgtaacgagattgccccaaagaaaggcataatgaccaaaagttgatcttcaatctgtgactaaacctgcccaatctgcatttgtaaatacttttacacttctttgatcacttttcttgaacaatataccttttcaagtgtactctttaaatatcttaggatcctgtatactgcttcaagatattcctcatatgatgagtgcataaattggctcacaacactaactgcgaatgctatgtcatgccttgtgtggaaaaggtaaattaacttccctacaagtctttggtaccttccgatttcaattggcactccctcgattgtttatccaagcttgaggtttggatccattgtggtgtcgcttggtttgcaaccactcatttttgtttcctcaacaagtctacaacatactttctttatgtgacaacgattcccttttttgatttggccatttccattaccaaaaaataccgtagggaccccaagtctttaatctcaaattcaactacaaggcatttcttcaatctcactatctcggcttaatcactcccaataaagatgatgccatctacatatatgatcaaaatgactatcttaccttctccagtatgcttcatgaatattgtatgatccgtttgtccatgactgtagccttgatttttgatcgaccttataaatcttttgaaccatgcttgtgcaaagtgctttagaccatataaagacttcctcagcttgcatactttggttccaaagctttctttcaaacctggtggagcgttcatgaagacttcttcttctaaatcaccattaggaaacacattcttaacatctaactagtgtagggaccattcaagtttactgctacagaaagtagtactcagattgtattcaacttggaaattagagtgaaggcttcctgatagtctatcttataagtcttatgtaaaacctttagccgccaacttggctttatctcgttccagagatccatttaaattaaactttatcatgaatacccatttacaccccactgaagtctttcctttaggcaaattcactttttcccatgtgttgttcttctctagagccttcatctcctcaaagtcaacctcctttccactttagaacacttagagcctcttgtatattcttaggtacatccacaccaggtaattgtgagataaaaatagaaaatgaaggtgatagatttttgcaagacatatgattagagattgaatgcttagtacaatttctaatgcctttcctatgagcaataggaacatctacaggtttaagaccattaaaatttaaagaacatgacattttagaaggaaaacctagaatggaaaaatttgttgcattctaatctagtctctgattagactattggccttgtaaggttgtcatgtcattcttactttgagtccgcttgtttcttgagtagacaagcctaaataatttatcttctctagttcttgtatcattatctattccactttcaattctataagtaggcattggtataggcagtcccacttctagattcaaaattctcgaatccaacaaaggtagatcatcgaaatttattaaacttggttttttaatggaacttgtgccattattctcaatttcaaactagtcttcacaaacattctccccttgaagaggagtgttaaaaaagccttaagactaaaaaaatttttacattcatagtcataaaaaaaaaaaaaaaattgtttttggatcaaaacatttgtaccctttctgtgttggtgaatagccaagaaaaacacattttaatgctcgtggatccaatttgctacaactatgattatgcacatgcacaaaaacaacacaaccaaagactttaagaggtaaatcagagattaatcttgactttggaaaacattctttaaagatttttaatagtgtttgaaaattcaaaattcttgaaggcattctatttattagataagtggcaataaaaatagctttgtcccataagtatttaggtactttagttgtaaacattaaagacctatctactttaaggaggtgtttatttttcctttttgctactccattatgttgtggagtgtcattccaagagctttgatgaatgattccattttccaaaaaaatatgttctcaatatcttattgaaatttttttttccattgtcactcttaaacacttatattttttttcttgaaactatgtttcaaccttattataaaaattcttgaaaatagcctcttaacttttctttaagtaaacaaacccaacaaattcgtgtatggtcatcaattagtgtcaaaaaccatatttttctagaaattgtatgagttttatatgggccctaaacatcactatgaataagagtaaagggtttggatgacttgtaaggttgcataggaaacaatacacgataatgtttttgcaatttgacaaacatcacattgaaaaacaaatggatttttattcttgaacaaattgggagacaagtacttcaaatattgaaaattaggatggcctaacctataatgtcataacattatttcattatcactagaaacaaagaatgatttgagactaggcatttgagctcgtctacataggtcacctccatcttcaaagtaatagagttcattattttccttagcattgccaatcgtcctcttcgagcccacatcctgaaattcagagtgagttgaaaaaaaaatagcacaacacctttaaatctcaagttagtttgctaatggataatggattgcaagaaagatttggaacatggacattgtaaagaacaaggaattttgaaataactattgagcctattttggcaatggttgaaagagaaccatgaactatcttgattttctaattccttgcacactaactataggaagaaaataatttagaattccctttcatgtgattcgtttcatcggagtcaatgatccatggacactttgaaactaaggacacgttaaatgaaatagcttgaaggtaattaccttttggggctaaagcataacaggaagacacattgcttgagaagtttgtggatttgaaaagcttatacagttgatctaattgttccatactaaaaaatggtgtcttagtagctcctcttacatcatgatgctcctcagtttcaacttggaaggcttttaaattatggttgggttagttggtttggctggagaacctaggcttccagttttgtggcttcccatgtagatcccaacatgtctcttttatatgccaaggtttattgcagtagtcacactagaccttctcattccttcgattttgtcatggttgtccagaatgagtaaatgaatttgcctttgatatcagagctaaaaccttgggtacgggctgactactctctcccatcataaccttccttcaaccttcatctcttctaactttagtagttacttcacgaagagatgggaagggtttcccacctaaaattttgcctcttaactttatctaagtttttattaagactctccgagaatacaaatactccatcattctccactctcttcatatgtctcacactattagttggacaatcccattcctcttcaaaacataaatctaattcttgtcacaaccctttcatggcgttataatactttgttacctctcgctcgccttgttttaaccaccacaactttgttttcaattcaaaattttgggtagaattttccaaatctaagcaggtttctcgaattgcttcccacacatctttagttgttggtaggaagagatacatctttccacttggatccatggaattgatgagcttagcagtaactactgagtttttggacctctatgtcatcattatcggctagttttgttgtctcaccatttaagtgcccaggcttccctttgccattgattgattgtgcccactccagatagtttttaccattcaattttgtgaacaactaattgaatagatggattttcaaatccattaaaacttacagtggatactagtagtgtgcctccttctacaacacctgacataaagcttctatttgctacaatcatggctctgataccatgtactcacaatagaaaagaaaaaaggatattatgcttcttaaacaattttgaaagtacatgggaataaataagccaaggtttgaatcctaactatataacaaaaaaactacagatttaggacctaacaactttgaccttgtctaaaattccaaatctaaattaatataattggtttagatttatttgaaaataaaacagaaactttaacaaacaatcctaatatttctatagaatttaaaaaaaatgtcttgatatatgaaggaaaatgagttgttttggtttggctcttgaatcaccaaggatcgtgcttgtatgcaaggtatgcgggcaaccttcttaagcaaaggtcaatgaagagagaaagtggtggctcttaggtcttttttttttttttttttcaagtgtgtcttccataaaagcactctttgtattgaccttactggtggagccaacataggcccacaaggggcaagtacaccttccaaaaaaaataaaataatgcattactttgacttaggcttgaactaaactactatattaaaaggcaaaaaaagctaaaccactaaaccaaatttgcatcttgataaacattgcttccttcaaaataacttttttctattcccctgctttacatttcttggcttcgtcattgatagaccttaaggtaaggcgtaaagccaaactacccttaatgacctagccttagtcatgactcttgtgatgtacctacaactatatggtgtattccaatttcctaaatgctaagtttatcaattgcataccattaaatagttcgagtgaaaactattatgacccattagataacttgggccttatagaataattttacaaaaatgatataattaatcttcactccgctaaaaaagaatagtcacactctagcattctatgaaaattataatgaagtaattaactaataaatgttttgcaagacttaccataccattgcatgatgttccctatgaactgatattcataattcaaactagaatttgttatacactatttgaattacatacttattccttgagttacaaatccactttatttctattatcaattaatataccatatccattaggataaatattaaatttcaacttaaaaaaattactatgaccatagattagacttaatcattaactttaagattaatcaagaggatataattattttatatatttaaatatcatggtatctatattgaaggtccattttactacttgttgaattaaataatcacttaactcaataaggatatatgttcactttaggatctcacacatatataaacttaaagcaattataaattcaacattagcttaatgatctctaaagattgagaacatatgcaatatagtaggttagagaaaatgcatgtccaagtgataacatttcttatatgtatctccataggcctagttcaatatataacatacatatactaatagatccacctcagaatctaattatagtggctaagacaagtcattccactatatagaaaataatgcactacaacctctaccgagttacccaaattcatgaatagccttcaactacatagttattaggatctcatgttttgtgtcttctatatatcctcatatgcccaaactatgttcaacatacttgatcaaacaaaatacttacagaaacaatgctcaaataaattaaacattcataaaatgtgtaaaataaattatattgaaataatgagtaacattcattagttccaaaaaaacttacttttaaaggctaattccaacacaaactttagactatagagttgtccaattctcaaaagttggtatgttgtactgatcctaattatttgtaacacatggccaagtttcaattagttgcttgccagttgtgagccaatagttattcctctaagcctacatttttcatataaacactattcatcacatcctccaaggacactccaaaataaagtaaatgaattgacatgagtgagaggatcattgaagcaagaccgactattttctacttagtgtcatcaaatgaaaaaggcaatgtcatggcactagaactccttttagcttgaggtgaaagacaaaaaacaaggttgtagcctaactatagtaagacgataaatagtacacatatacttacctattcaatacctaaccaatataaacattgtctttaataatcgacattattaaattttcatctctcatgttgtcttataaaattaacacccttgacacttggctgaagtgtaaaaggtcaagagggtttgttggaggttccaagttcaagtcctaatggggacaaaaatttaccaataaaaaaaagaataatgtcttataaatttaacaaaataataataattatttgaagtactaaatattacaccccatatcataagaaacattatattgtttaaagaaattcatcttatctataaatgcatattctaattttccaaacatcaaaaatcaaaataaaaaataacaaattaagaaaataaacatcctaaaaaggctttaggtatcataatcatagtcattgtggaaattaaatttgtcatcactttcatcaagactagattgatagttctccatctcattatcactataattgacaatatgatatttcatcttatattttgttttaatctaatcttagattgaattaaattactatctaagcatgtttaatcttaacccatggttaaaggcaaccacttctatgccttaactcaagggctctatgtctcacctcttccaagtcgcctgacatcaatcttcaaaaggttactttcatttgccttgcctcacctaggcacctggtggcctaggtaatctatgcattcacctttgataatgttttttctacccatgaataaaaaacaattttctagaaaaccaaatttagaagaatctttattagacttccttaaatggaccatttactaggcttttatctcatgcctaacttactaacacaattttaagacactgctaataatagtaaggtttgatctagcactacgattgtcaaaattgtagaatgaatcctaagatgctcaaagcttccatttgttattagaatatccaataagatgcatccttgaaacctattttatagcatcggtatcaaggcaatagtgactcactgtcatttctgctatcaaattgtttcaaatattcatgacaaatctaactatttcatggagagaaatcgctttttctattttaggatcttccataccttgaattccacacaagccaaggaattcaaaattaaaatagaatcatccaagactagcattaggaaatagggataagatgtatagatattagagtcgttaggtttaatataggccaacaatgcccttgtttaaaattacaatatggaagaaactaattcatgtttgttctcaccgaggccaacacatcctcatttatcatcttttagcatagtttccataaatcaaaatgtttaggaacatcattcttaacaagtccctcatgaagtatctatgaacacatgtttatgagctattgtcacatataatgtaactttcaagtacaatttagactaccaaaccatttataattacaaattggaaagaacagaaaggttccaaagcacatataaaacatcttgatcttatctatgcaattcctttcagtttggattaatagggttgatatatcaagcttagtaccccaaaaaaaatgccataaattcttgctcaatgtatattgatattccttggaatttcaccaacatgggtaaaccaaatgtgtttaacaatcatgtacactgtatcattgcacacatgcaataattgataagtattgtagaggtttcaccctagaatgtatgtctacgcacaaatttatatccaatgggatcattttgaggacaagcccaagtctttcccctttaacagtcaatgcccttctttctagggttctcctagggccatttccaatttggaacaagcatgtaagacacatagttaaacatgtctcttattcagacaagcataatttcatttaactagtgacttagcctgtagtagcaatgctgatttgtttgttttcaataattccttgaaatttcagtatacctcaacacaacactatagaagcaagaatttgtactaaattgtcgtgtcattcccttaaagacaaaagttagttcttaagttattaatgattaagttttacatttttaaactttaaagatatcataacctgctaattcaaaattttatcaagagattgttttttttttttttaaacctaagtcttaaagcaagttgctttaagatttaagataaaagtaaaaaaaaaaattactttttccataaaaacaaaattatcttagaaaaagtgataagcaaaaaaaaaaaacaattttaatacttaacaataataagtgctatatagacttaagttaagttgcacatcttccttatcttgtgggaggtgtacgccctatagaaacggttattccttggtccacagctcctaaaacaaggttagaattatatctcttctagagtgatatctcactgatggctcacaccccccaaccaccatccctcccctgggaaggaggccttcttcaacttctacctaagttgtgcagggaaggcccatagacaattccagagaaaattgaagcctcgtgtggtttttctgtcctggcatagcttgaatcttcattgatgtgtctatttcacctagccactctccaaggttacaatcagcatcttcagtgttgtgtttatttcacctggccactcatcaagtcaccaacttgcttaaactttccactaggcagacatcaaccctcatatatcatattttgactttgtggagacctttgttttcggtaaaaaatcagtatgcctagtcactgcaaccccctcggtgaagagatgccctttttcccaaggttattagtctttttggttgctgaaagagttataactaaagcactttgaattaaaggatatttctaattaagaactaaattaaaaggtgaggtgcttttatacaagaaccttctagaagagtttaaaaaatttaaacttttttttcctaataataagcagaaatttcttctttaaatacttaatatgatcaatagaatgaatttcggctagatatgagtgtatgatagattcccacactaaagaactttctctcacccctttaaagtttctttattgtttcttatttctttcattcttagaatttggacttttaaacatttcatcatcaaagaaactatatgaactcggcttgtggaaattggaagttacaatgatttacacggagaaaacttgtcttggactgcagcattactatgaaatagaaaatacaaaatagaaggggaagaaaagaattatgctagaatctggatgtctcttcgatgggaactgatggaatttactcttgttatgtgcagg

SEQ ID NO: 12358 - DNA, 9008 bp, Vitis vinifera
  Intron number 2 from transcript GSVIVT01008832001 (locus G SVIVG01008832001) derived from phytozome v7.0 (chr-ID chr1 8; pos 2575065 to 2584072)
tgtggcaggtgaacattttaaggatttgccttgctattatcataaaggttcttatggagctatttcatttatcactgatatggtgccttttataaatggtttgctgctattattctaactttggagttccacttgatgatttggttaaatcaggaccttggaccaacccctaggggatgtttggaaaaccatactttgtccaattgtactatatttcgagacctttctttaggtggtccttgtgtacgccctatgtactttgatgtacctttttctattactaatttatacatacccatcttttcctatcaaaagagagaaaaaaaaacactctacccaatccttttctttttttaaacttttttacattggaaacaaaagatgtatcaattaggaataaaaagtgcatgagaagggtgagggttcatccccacaatttacaaaaaaattgatccaagtacgactaaacttctccactatatagggagacttatacaaaaaggtttagtgactttagtctatgcaaggacatacataggtaccatcttctcaatcctagactaagctcctctcattgctttccaaacctttttgatttatgcattgaatgtcaattgtgttgaataacattcaaaggagcgagtagcttgtaagaaggaggctaaggaggtttatgccaagtgggttgaactggaagaaactcactggaggcaggtgtctagggaactctggttgaaggcaggtgataggaatacgaggtatttccacaggatggcatccgcccataggagagttaaccacatggacagaatcaaaattaatgggattacaatgacagaggagagggaaatcagagaggggatagttaatgcttttatgcagcaattttccgaaagtccggagtggaaggcggacattggaagtctctcttttaatcaaatttgtgtgcaagaggctgagatgctggaggctcccttctgtgagggtgaagtccagacggccctgatggaaatgaatggggataaagccccaggtcctgatgggttctcggttttcttttggcaatgttggttggattttgtcaaggaggaaatcctggagtttttcaaggagttccacgaccagaatacgttcctcaagagtatcaacaacacatttctggtgctgattcctaagaaaggaggggtcgaggagtttggtgatttcaggccaatcagccttttggggggtctgtataagatgttggcaaaggtgttggccaacaggcttaagaaggttatagacaaggttgtgtcccatgatcagaatgcgtttgttaagggtaggcagattcttgacgcttccctgatagcaaatgaagtgattgacaattggaaaaaaaagggggacaagggggttatctgcaagcttgatattgagaaggcctatgacagtattaattggcaattcctcttgaaagtcatggaaaaaatgggatttggcgctaagtggctgaggtggatgtggtggtgtatctccacagccagattttcagttatggtgaacggaacgccagctggtttctttccgagttccaaagggctgcatcaaggagatcccctgtccccttatctttttgtcatggggatggaggtgctaagtgtcctaatcagaagggctatggaggggggtttcatctcagggtgcaaaattcagcgcaatagaggccgggctgtccacattgcgcatctgctcttcgccgatgatactatagtcttttgtgaggcaaagaaggagtacttaacgaatttaagctggattttgttttggtttgaagccgcgtccgggttgaaaattaacttggctaaaagcgaggttattccagtaggagaggttcaaaggatagaggagctggctgtggagttaggttgtagggtggggaagcttccgtccgtttatttggggctgccgttgggggtgcctaataaggcggcttatggatgggatggtatagaagagaaaatgagaaggaggcttgctctttggaagagccaatatatctcaaagggtgggaggatcacgcttattaaaagcactatgggaagtatgccagtttaccagatgtcgttattccgtatgcccatgtctgtggctagaagattagaaaaattgcaaagagacttcttatgggggggggggggggtctcatggagaggaaaactcatctggttaagtggggggtggtgtgtggggacaaagaaaatggggggttgggaataagaaagcttgctatcatgaataaagcgcttcttggcaagtggacttggagatttgcttcggataaggaggccctttggaaacatgtgctggaagcaaagtatggtcaggaggatcatggttggaggaccaagaaggctgtgggtgcgtgtggtgtgggggtgtggaaggagatattaaaggaagctggtgggtgctgggataaaatggggttcaaggtggggaaaggtaataaaatcagcttctggactgatgtgtggtgcggggattcagcgctgtctcaaaggttcccgcatctctataccttggcagccaatagaaatgcaaagattgaagatctgtgggaccagattgttggggaaggcggctggaatttgcgtttcataagggatttcaatgattgggaggtggggctggtaggtgagttgctccaagcgttgagaggggttaggatatcttgggaggatgactcggttttttggaagggagggggaagtgggcagtttagagtgaaagatgcgtacaactggttggataggcctatggaggtcaactttccgaaaaacaggatttgggtgggtagagtcccaactaaaatcatgttcttcacgtgggaagcgacttggggaaagattttgactcttgataggctccaaaaaaaaggttggcagctcccgaataggtgctttttgtgtgcgtgcgaagcggaaagtgtggatcacttacttattcattgtacagtggctagagagctttgggatctagtgttgggtttagttggggtcaagtgggtgttccctaaatctgtaaaggaggtgttatatagttggggaggttcttttgtgggaaaaaaaaagaaaaagttttggagttccattccattattcattttttggatggtttggaaggaaaggaataggctagcttttagggggggggagggggtttagcaattcagaggttcaaaaattcttttgtctgttatatctggggttgggctaagttgtatatggaggagaggccgcattcccttttagatttcctggaatggatagcttccagttgaggggtggtttgtttttttggtttgttgcttgttcttggcctttgctgcctggtatacgtcctgtataccttgaggttttttgcctctttaatgaaatgtgtttacttatcaaaaaaaaaaacattcaaaggagcgcctttaaagtcattgatacatgaggttcaacaagaggaataacagtgaagtatatcccacaacgattccatcttcctccacttattctcaaagattcttgacatttcttctttattacacatgccaaatcattaagggataaacaatttgttagagagttttgcttctaatggaacttgccaaccccctatacgaaatgatcatcgcatttactccttggcaaaacccacatcctagcttgtttgcatagattgtgctgtagccctaaagttatcgggcaatgtagaaagagatggtcaaagggatgtaccgatcaagactaagggatttggaaggttttctcaattttagcatgtcattgatgtttaccttcttgtgcaccactagtcaagccaaagctttgaccatagacgagactttaaatttccataaaactttggcttaagagaaaggaattaaatgtgatatgttagacaaagccacaaagaatgattttattgcgaataagtatgaagaggataaagaccaagctttcctacgtgaaatggatggagaaaagtgcagaagaatgagtgaggacatgaatctttcaaggttttcaatgtctaaattagttaggttgcaacgaaattttaggttttaagaaaaaaaataagagttaccaatgatgattgatgtgatgagatttttaattatgacaactctgtaaagacttgaaaattgtgcatataatggttggtttccccaccaccaattttcctaaaagatgaattctcatcccattgcctatcttaaagcgagtgtgtgtagaaaaatcttggaatttttgtgtaatagtctattaaggatactgatttgaccagaccgttggagtcccatcaattaggatgtgttgcataaatgttcaaaataacctgatgccaaagaataaaactttaccgaaggaacctttaaagccactttcctaagggatggaatatttgtttgtttgtaatatttgatcttggtctaagtcttgtttagatataggacctttacctttaattaacatttttgattggttgggttctaggtgagggctggtgagtttttttgtttctttttgttcttgccttttgatgcctcttgtatgcttcctgtatgctttgggttgccttttaggcgcctttgtttcttaatatatttttttcgtgtgtttatctattaaaaaaagagagcacaattcctcaaagaagtcttcctaaacctcaaatcttcagactccttaggcctacacactagatcctaaattacaagataatctttatttgctctcctcaggcccccctaccaaagaaaatctctttgcattttctcaatctttaaggctactaatgttggaatcttgaaaggagataagtagttgggggatgtaagacacgtatgcatgaattagcttataaaaaaaaaagaaaaagaaaaaaaaagcatgcatgaattagagttattctaccccttagtgataaaaaagcttttttttccacccatccaatctttaaaaaaaaatctgttaaatcagtggattccaaaatgcacttacctttggattcgccctaatggaagacactagtaagctaaagggcagtatgagatttcaaattcaagcattgaagacaacttggagatcatgtcctaacttgtattgatatcaatgatagtacttttgcttagattgatcttaagccttgatctttgtccaaaaaccaataagattatcttgaggttttgcaaatctttcatagaagctctagagaaaaaaattgttgttatctccaaattgtaaaagagacactctaatccaatttcttcccactatgaagccctttggaatggtgtcatatgcagtttgagacttgttttatttttcttcttcactatgggtttttaccagtgaagcttttgctggcatctctttaagccttattttgctagattggaacataatttgcagaaccacaagattgactaaggagtcaccttgtgaatagctatcaccatcagtaggttttgtgaagctaaattttgatgaatgttctttgggcaacctagggcagtttgggattggagggttgatcagagatcattttggtaaagtgttaagagcattctctaaacctacatactagggtttagccattgaggtagaaattctagcccttctacaagggttgttattggcttaacctttaggtttttccaatttttagtagaaggtgattttgatgttgtcatatcaagggcgactaataaagaaagaagaccatggaggtttgatgggtggttgcaccaaattattgacatttcttcagagttaggatgttccttcttatgaactccttacttaggcaatgatgcggcatatgtgcttgcaaaacatggagctagacatatggtgccttttttaagaaattttgttatgaatttagttgggtttaaccttttggactagtatatactcattgtcttctttatatagaggatgaggtactttgtggaaagatttcttatccttctttgtacttaatattttatcacaatgaaattattattttttatcaaaaaagaaaaagaaaaaaaagaaaccctttgctaaagcgttgtgttttgctctcaatagcatcctattgaagacattagttgcaatggtgaagaggaatgtggaaagaaaatctatttgtcttaatccttttgttgccttaactcatctcttggcagttccatttactaggacaacaaaactctcagagtacaagaaacccctcattcaagacctccattttgtgctgaacccttttctctcatgatccaaaaatccctaatccacatgaccatagaccttttcaaaatcaattttgagggttaccctttcccctctcaaatgccttctcccattctccatttcattgacaaaatcaaaacaacatccaaaattcgtcacccccccaacaaaagctccttgggagatgtagatgcttttatgaaggactttttgattgcgccttgataaaaccttaactatgatattgtacagactagtgaccagaccaataggtttgaaatatgagattttgttggttttactcttttttggcacaagagtaatataggtagcattagtactttggtttattaccccattattgtgaaactttgaaaactggtaattgcatcccaacgctcctaaaacaggcttgggggccttgtataactaaaaaatggcattgggagcctcctcttttgaaaaggggtgatccaatgatacaacacttgttgttatctatcaaaaaaaaccatacaacacttgttaatataggggacaaattcaatccttttaacctccaagaatcacttgggggcttagagtatagctttaaaaaaaaaaaaaggagcacaatctcttccaaaatgtgttcagtcaaaataattgctctaagttgctggaaagtgtgttcagttggcataaaaataggaaaacaggttcaaatgtttctttaaaaatacttttgaggcatgcaaaatttaactctaatttcatgtgaataagacctagaaagtaaatatcagttcatggaatagtactaaaattgcaaggagtcaatcaagtttgttaattgtaaatgcaaatcacctctcacaaaacccaaaatggttgtactaaaaatagttgattgtttgtctttttggtaagtaataaagcatgtatactaaatcagcacattggggtaaaccttggtaggcaaggtgtatgcaaacaaccgctcgatcaaatgggcaaagaaaaggagagaataacccccccccccaaaccaaaaaaaaaaaaaaaacaaccctgttgcattagaggatttaattcatagcccaaataaaggtaactctaccgaaagctaagtgcacatttcttaatttaggggtaacaatttttgataccacgcaataatacaactcgaaaatgatatgaattttagaagttcgaatttggtataattgtgtttgtgttggaattgtatcaactcaaacaattcgtttaacaaacaggccatgtttgggtttgattgcttaacttgtctaacccatttatttgtttgtggcaaaatgacttatttacttaattgtatccaaatgacccatttatgactcgttcaaaccacataaatttattaattttatatatttaaaaatgataaaaaattaaaagtatttttttaattataaatatcatatagatagaaaaaggaataatgtaagtaaaattttatatatttcattataaggattaaaaatgttttatagtcaaaaaatgaaataaaattataaacaagtgtaaaattaaaattttaatttttttatattacaaacatgttgtaattaaaattaaataattaacttaattaagatttaaaaagaattaaaacttaaaaataaaagcaactaaaaagtattttataataatacatttataaatttaaaattttaaataggttaaagtgtgtagaatcgtcttaacatgttcgatgggttaaaattctatcaagggtttaacgggttagaatcatattgattggttatttgtgtcaattcatatactgttcaatttaacccatttattgaacaggttaaataggtcgtgttgtgttacccttgtgatagataggttttgtttgtgtcagatcattcagacatgattggtaaacagggttgtattcgagttgagtaaattttcaccatttctcacctcagcattatacgaaccctacacgacataacccattgctactttatttcttaacctaagctatgctagagttgacttctggtttgctgcttggttatttgttaatgccaatataatagattttgtatattataaatgatatacaattcttagaatgaggtaagtcagcttagccaattcctaagtcaagcctgatcttgccatggttagtatgttaaattcctgtttgactctgaattattaaaatctccctttcaagtgaggatggttctccttgctttctccatagcttttgtgtggcaatggtgttgggaataggttggtttcctctcctcgtcgagttctttttatgagtacatgtaaaactttgctctattgatataagtttcacctcttttaagtccgtgggagagaaatatttcactgatttagaaggtaggacaacctgcaaaaactggaacatgtttctctttttctttcccccagctggagtgctatgcaagagaatgtccagaaaaagttgatatttttgaataaatatacttaaaaaaaactgatggcatttttggcagttgcaagaaaaataaaatcaagtataggagatactgcaatttagaacacctttaaacatttccatatgcatgttcttgcttggagcaatatgatgcatccttctaacatgtcttttttggtgaatacatagaatgctgatgtgaaaatattctaataattggggatgggcaagattgctaccagatatctcatccctgagcttgcagg

SEQ ID NO: 12359 - DNA, 2173 bp, Vitis vinifera
  Intron number 8 from transcript GSVIVT01022257001 (locus G SVIVG01022257001) derived from phytozome v7.0 (chr-ID chr7 ; pos 17932536 to 17934708 reverse strand)
agatagagcagtaagattctatgtctatttttgcctcacttaattttgttgtttgtcaagctctatgataactgtccaagtaaaacaaaagctaaaagagggggacatggaagtgatcagtttgggaattctcaattttctttttatactgctgcctggagaaaaagcaactttttccccccttctgcattcttgtgaattaaatatttcttttgttatggagtaggagttttccatggttggtttggtatgagataaaatatcattcaatgatgaattaaggatgtgcatgatgcctagtggttctttagggagttctgccttgtaaagagggcatcatttagaaggaactagatggtttaaaatcaccaaatggttcaaattggggccacataaagagggtgcattttattaacacacttttactttggaattaacacttaaaattaaggttcaaatatcattttcatatgcttgttccaaaaacttggttttgtagttgaattgatgaaaaatttatcaatttggttgctagattcaatttttgaaaaaatgggataatttttagtttgttgatttgttggtttgtataacattgttttgatatttctagtatagggtggtttgtgatatctatgtgggatgcagttaactaagcttgaaaatatgtcgggggaatatataaaatgtgagtgttaactctctgtttgaaagaatccaatcaatcaaaaaagggtgtgacactctcgtgaatggtgctgggttatggaaagccattagggaggattgaaaacttttgagtagtagaatttccttcttagtgggtaatgaataagagggtgaggttttggaaggataagttgtgcaaagatgaacggttgtgtgttatcttcccttctttatttgccttagccatttcaaaagaggtgtgagtggcggatgtttggaatttgtcaattgaagagggtggttggacttcttgcttctctaggcctttcaacgattgggaggtggaaagtgtggaatggtttcttttgagacttcaagggaagagggtgtatagggataaggaagataaagtgttttggatagagccaaagggtggaaagttttcagtcaaagccctttattatgctttagagccaggaagttaagtctccttctagatgggcattatttggaactcttgggtgccgcctaaggtgggattctttgtttgggatgctacatggagaaaggtcttaattggattatatgccgtggagagagagttgttccagttcaagaagtttgcatgctagcgctcctttaagaacctggtctttttttttttttttgggcttgagaggctgtgtggagggaaatattgactatgaatatgcttatgaggagagggtaaactatggtgaatagatgcagtgtgtgtaaagatggtgaagaatcaaccaatcatatcctaattcattgcagcataacaaggcagttgttgcagcaaatcatactgcctgtatacgtgggggacaccccctctttttaggcgtttcttaatgcatgatcttgttgtctatagaaaaaaaaagaggcagttgttggaaatgatgttggctatttttggtatgcaatggatcttttcttcctcaatcaaagaccttttgttaggctggaagtttcagaggccagataaacagcataagaaggttttatgtttggttctcttttactcgttttagtgcatctagagagagcgtaacaaccatgttttgaatggagaagggcattcagttcaaaaactaaaggaaattaagttctagcatcctattagacttggtaaaccgtacattgatgggattcagtctaaactatggaatagctagattaggcttagctgtctttcgtttgggactttgtttttcttgttttctggtgcctcttgaaatctgcaagcatacataatttgtgcctcctttttcttaggcacatttaatcagattctgtttgcctggtaaaaatgtgtggttccaattattccagtaatttactgttccaacatcttacacgttacatattttttcttctttggtatgttattgagttgaacaaataatattcctttggttttatttatttatttatttataaccaaaaaaatcaatttatcaacagatctttagaa

SEQ ID NO: 12360 - DNA, 2726 bp, Vitis vinifera
  Intron number 1 from transcript GSVIVT01016029001 (locus G SVIVG01016029001) derived from phytozome v7.0 (chr-ID chr9 ; pos 17619328 to 17622053)
gcctcctctccacttctccgtaagtcctcacaattccttattattattaattttttttttttgtcttaattcgccatacccacttccaattttccctttttctctgagaatcttttgtgaaagtttcaattttataatgcttttcatctcacccttattgcagaattagggtcttttaagagtgtattaagagtcccatattcagaaacctgaaattttcaattggggtggttttttatgggtccaaatcgatgatgagttttgcccagaaatgtgttttagcagaagagagtggtagttacttcaaatttgtaacttttggtttgcgctttgtttgttttgttttgcatcttttggttggcgattgtgaagtgtcaaatttgtcattgtttcctgcaatttagatttggaccaagaataagttgaagcctattaaccttattgttgttaatcatgttggtatgccttgttggtcaattaccctgttgctaaaacttttgagttaaatttgtagtttaaatccatgtgttgaatccttggcttttgagaggtctagtttgaatctcaccacttatttattccctttgtattgaatcgatgtgggagagaaacagagaatccatggaggctagtgttaaggcaattatcacaactattaagctacttcatttaatatacattgttgatccattatctaatagcataagctctaggattaagtggttattaacatttactaaggttggaattcctatcttatcttggtaaggtagatgacttctctcaatttatggggctaggggaagcaccctacaactaaggtaaatggtttctcaactcccaaaattgctaagttaatttattaatgcaagaaacgcttccccttctaccaacaggttaagaggatatttccttcacttactctgcttcttgtttccatgtttgggctataaggtaaatgtggggtgctaatcccttccaattttgtttccatgtattaatattgttggagtctatagttgcaaactagaagaatatagttggaggaatgggacatgcttttgtagatggtgtctcaaactcaattcccatgcttcaactttttgagtttaatttgtagtttaaaatagtgttgaatccttggcttttgaggagtcttaggtttgaacctcaccacttatttattctctttgtattcaatacatatgtgagaggatgtcttaaggcaattatcataagtattaatcggcctaacgtacattgttaatctactaattaatagcataagctgctggactgcaaccaacatttcctaaagttagaattcctatcttattttggtaagatagatgacttcttctctcaatttacaaggccttgatgcactctacaactaaggcaaatggcttcctgagttccaaattgctaagttaattcactgatgcaagaaaaacttctccttataccaacaggttaacatagggtgttaatcccttccaattttatttccatgcattgaaaagaaaaaaaaaatcaactttgttctaccctatgggtttggtgtaactctgtaaggtagttggatgcatagcatgctagtatcatagatacacctagcaatttcttgtatcctttttcttggtcatcaccttgctaatttatgtagaagtggtcaaatggccacaaactaaaattacctttctctctctctctctctcatgcacataaatacacatcattttttgctcagtctttgtgaactatagttccctcattattagaattctgttaattcctcatattagtttgaaattttatttttttgatttatttatttatttatttttatctttgtattggaagatgtaagatatgttggatatttatatttttgtaacttcaatagttctttttttttttctgcagcaagaagaaagcttaagcttaaggttcatgttgtatatatatgctttacatagtttgattgtacaccaagtgtttgtttgcttcggtttgtagtctatgatataggtttcatacttagtcgcctaccatttatttatttttattgcaattgtcataattaccatatattctttttgttttctgctttgtaaattgatttttgagattgacatctcattttaaaatgtacttttataatatgctgtgtttattacatattcagactgaggtcaatggtgtgttccttttttctgcaatgtgctctctttaaagttagtgaatttgttgcagtctgaacataatttaacccataggacatgtattgcagaaaacacctacattccacagtttattgaaatgatagaaaaacattacctgtgcagagcacttcaagaggtcactgtagctacaattttgagctgataacatcaaacgtgcagcccttaaatgcagcttctttgttgcctggtgaattttgctcatatatactgctttgcgtttaccttctatgcgtgccatggttactatcacaatatccaatagcaacatgccatgttctcacttttcaaccttccttcatggttttgatctactacttcactatgattaagtttaccacaaatctgacaagttatgttacctgaagaatttgaattgctactgctcttatgattttaatcagcttgcttcccaaaattaattctatgaatcttgattataacacaggtagttgccatttcgctaatttgaagctacccatt

SEQ ID NO: 12361 - DNA, 11333 bp, Vitis vinifera
  Intron number 12 from transcript GSVIVT01030143001 (locus GSVIVG01030143001) derived from phytozome v7.0 (chr-ID chr 12; pos 10223008 to 10234340)
cctcttaaaattgagtttgcaaaggcggttagttttgtcccatcctttcgtttcatgtgtacgtttatatgtgtgtatatcagttgttcaattcattatttatataaagggcatagcagctttcactggcaaacattgagccaacacaattgcatattttgcctgaaacattttggcccaagtttgagttaaaaatataaagaaagggaaaagaaaaacaggtcatggcataaatttgaactcattcagcaacaggggcacatgggaatatccacatgatctgtgtgtttaagttcacaatctcatcaatagtgcaaattttttaatctcgcatgttctttgggtatttggattgagttggtcttttacattatgaacagaagggttattcagtatcttgctttgcactcggtttctcaagtgcatattttgaagatctacatgtctgatccaatgaagagtaatgccttgaaaagcatgcaatttgtgctttttaatggtgaactactgattattattatgagtaggacaagtcttgtctaaagagtgtcgatgatacaagcaaaatgtaattctttttctggttaggccaacaaaaattcatatggaaggtgcctaacaaaaatggttcgcccctatgtacataaggggtgtacgagaagctccaaagaacaaacccctccaaaaacacagtaaacctaggacttattatacacaatttagactatttataaggtcctggaatggacaagtagccaaccactcctaaagggatttgaaaaagtctccttcagcttttgatctgatttctcttcttcattaacaagttcagtcattatgcactcttcaaatgcaccaaaataagcaaagtggagtcattcgccaaaccttactccactacttatgtaagcctctcatctttcggcacaatgaggaaaatataattgctttgaagctttacttaaaatttaccgggacaaactaaaaaaaaccatgaaatggatgtataactgcaatatttagagagacaaaaaggaaaatttatctcaatgaagtggaactgtggagtgtaacccctttaattattttgacccatgttgctcacattttttattttttggtggcacttcttgtcgtctggaatgggcactttgtgtatgttggtattgcatacataggggttaactattgcttctagaatggcagaagataagatagctagcagctgatagtgaatttttaggaggtttttgagtcctcaccaacaggttattagattgtcacgtgaaatctcattggtgttatttcctgtaaaagggattgttacttagatattttgacttggtctatccatgtatgataagatagataatagcatgaccgtaatgaagaagatacaagtaaatttgcaatataggatctgatggataagtagattagcatactccagaagaggtccaaggatgtttgttgtttgctgaagaggctgatcaggttacagttaaaagtgagagctcgagatttgaagctttagaattgaaagattttaagataaacataaaaaaggaccatgtatagattgtagtggcattagaagtgtagaccatgtgagggctgggagataactttatgatgatcatttctctgatgttgggttgaaactagtagggttgactgaaaaagatgttaaattaaaatgtgatgattttacttgctaaatgctcatgctgagttgtgtgatttatcattgatgatgcctatcaacctagagaacttatttttataaagggacacatgtctgtacggctctcttattcaaagtatatctcatatgaaacattttttttttttgataaataaagagattgtattaaaaagccaccaaagcagtggctaaaattacaagagagaaaaaaaaatgcccctcgcaccctagctgaaaccaaggcccgaggagcatcccaaaccacatgaaacatgattagctttctcaaaacaacttgtaaattatttcactttatttttttggaaatataaatggttgtcttatttgtgaaacttcaagactcatctgcaacatgtgcataacaaaagaaatcataagatgctcaaggaaacctttcccctatgaaaattggtcatagaagtgctttaaattgattcattcagaagcaacaaaaagcaatcatattattgtattcagaattacgtcgtccctcatttctctccccctttctttcttcccacagtattctcatgtgaaattttgctccaatgatgggaatactaatatttctatatagtaaaagtagaaagctaataagaggtgtcttctatatttcaaatttcatttcttatgatattgttattgtttttatcattattgttattatcattgctttttataaaagaatatttttattattctgtatagtatgctattctatctatcttgaagaaactcttctctctctctctctctctctctctgcatgttacagtagtgtaattacaactaaaacaatattcttgtcttgagttctgttgagttgatgatcatgaaatgtgtaaaaatatgcaaaaagagaatataacaagaacagcgaaaaagaatgccccttctttgattgaaataacgaactaagaataagaagaaaaggtgaaaggggagaacaaaaggaagtacttcttgttgaagggccacaaggttcacaacgaattttcaacagtggtagagtccttcctgatgaaattacctgccattgatattttgaacctgagaatccaattgatagtatgggctactacaaaagcatgatgaacaaccctactataactatgaagagaccacattggaatttgtttaattagaaaagcaagtaattccaacaacactatcaccttccaccataacataaattattgcatggttagcactttgtggaaactgttgaaggccaagcaacttaccatgtatattctaatatgcctttgctgaagttgagaagacaaacagaatattgccaacatgatctttgcaaatacatcccaaatttctgataaaaaataccttgattattcatatgacttgggtttccaaatgaacaacacttcacattctatttcaagtagacagattagagagagccccagaggaaatatgattcaagtttctagaaagtttagaagatgttacatgtttccagtctgttaatggtattgtgatatctcgaaatgaggaagacttcagccttccccgaatggcacaccaagggaagaacatacctaataagttgcatttttcctatcctccgaaataacctacaaatggctaagcaggcattatagcataacacccttgtggcccaccaaaattggaaaataagagaatgaaagtaagtctctttgtgtagaagctcaaatatctctagggaaatgaagtcctttggagctaacaataattccttcttgcataatgagtctccttgtaatgtgatttcacagccactgaattgcctcaattatttacttcaaagaatttatgcatgggaacactcttcagtgtatagtgtttgtattaggtttccccctatgtttcatgattggccttgactctttggatgatgtagcttgttttcctttatgcatgcgtcttgtatttttctggtattgttacatttttctttatatgtgcaccaaaaagagaaaaaagaaaggaatgcattgtacgatgcatggtaatgaaaaatgcaacaaactaaggtgctactggattaagtgtctcccaatcatcttcctccattaaatttttaaaattgagtaaatgcaagtcccatacttgttctgaaaccattcattatgtggcatcctttggaagtccaactaaattgaccttcgacatggtgaaaatgaaaggatgcatctcattaagcacaggatgataactggagctggttcctctatttgaacctctttcagcactcttaaaaaaacacgtcgtaggcagtctttgaggaccactccagaaagaaatttgtgcaccaagactcacaggtttagccatgcaaaacccttgtactggaagccttattgacttctccattgactatttcaaaacccctgtactggaagtcttattgcttactaatcaaaaaaatttctccattgaatatttcaccattgaatgcaaagcaagaattgccagaaacaagcaagtcctgtcacaatactgatgccttccacaatgcaggaatttgtttgggaacttccactcggataatttggggacatctagtccaagaccatcaaaatccatctggcaaatgatctaaaatctcaaatagtcttggtcagtatttaggaactctattatggtatgttacatccggaaaatgatctaaaatctcaaacggtcttggtcagtgttcaggactcaattatggtatgttacagcattttggaacatttgtattcacttgttacaggattccaaatttgaatcacatcttcatggatgttcatcaagtgaatgatctatttgttaatccactcttatttcaaattaatccttcctttctttctctttcttgatttcctccagtttttccaagtgtggggtggttgtgaaggaatgccatctaaataaatatacaagtaatttttattgcattcaaaaatgtagatgctggttcagcaactctaaatatctccacatccactgcctactgattgttatcactccatttactcttaactatgtgaagaaggatgaaaacatagatatgctttcagttgtttcttctgggttggcagttgacaatcaaccaccaagtcaagtttagtaagacctgtcacaactagtgagcacaatatttttctacggtttcttaagctttggaaaaccaagtgtgcaatttttatttatttatttgatagataaatgagtaaatatattaaaagcacttaaaaggaggtgcaccaacataagcagaaccaagtattcaattttcaacttaaacaggatatattcgtacttaacaggatatatccagagtctcttttgattcaggaaagatgttcagaaatttcatattagtcaatagaactgtggtgctctgtgcaaaactgatgcccatgcaattgaacttttaacaatttgtaagagactacactattatatagattttctggttttattaagttagacaataggctgatttgatataatgataggttgatcatctccttttcaattaaattttagtggtacaacaatttttagaaatacaggatggggcaatactactcttatctgtattttcctggttatgctgcagttgcaacttgaggatacatacttatacagtgatccatttgtggggcctgtgctagataatatcaagtttgtgaacaatgattgggaagcaaagtacttagatacaagctagttgatgtataattcacaaacttgtcaatttgtagcttgagtgatgattagtctgtaatgggtttctttgatgtgtataactcttaagacacaaaattgcaacaaccttactctagtgttgaagataattgctgtcaatgatattctaggttgcaaaattaggtctaatactaagcaacatccccattattttttttaatatgcagaatagatataaatataaaaatattaataaaagcacgtaataacatgcaatccatgtacatacaatgtatacagtttgcacaaaggcaaaaggaaaaagaattgaaacaaccaacttccatcactaagctaaccaactcccaagtgatctaaaaaatcaggagtgattagcattttccatctctccatttgaatgcaagaacaaagtatagaaacaagttcttcacaatcaaaattgatgggtgcactcatcagaggttctattattgtgttcttctaaatagactgcgaaaaccatgatttgacctccaaaccatctttttctcttggtgcctgtgaatgctccaagccagcaagtaatacagctctaactgattgggggagaatccaaaacactcgaaagaaagagaccaccaaagaccatgtacatttacacatgtgacaccagtttgggatgaacttgcataattttaccaacttagcaatgtgctagaccactgagattatgtctaccacacagccacttcctggtcctggaaattttgtctcaacccaaggtcctgttcctaacctcctctatcaatgtaaaataatctgtcaccctggttttcttattctcagttatgccatacagctcatggaacctaagcttcaaaatctgctccatgcaccacatgctgccagaatggctctttgcccattctctgcatccaaatgaagtatcctcctcaaatcctcccacctgcttctagtacctttgtaaaagctggacccatgaccttgcttctcttaacttttgcaccctgcattgcaaatataaaccccaaacattattgggcattgcatcattttatgtgcatcatgcaagtgtatggtataaagagatgatatttactttgctcatccagcaagaaccatggcaaacaattgctgttagatatcaattaatgatgcatcttatgataatatgattcttctatttgaaattttacttgattacatagtttatgttgttgggaggagaaaattactcatactactgaaaatggcttatcatagatggaaatatcagcttcagtccaactgaataccttcttgtgtcccaaattttctgcacttctaatgaatgtttgaaggtatcatgttccattgttttgatcccaagtagccaatccaggcttgatcatgaaaggactccataaggaagggcctttaattttttaacttggtgctgtattgagaaatcaattaaatctgtctggaaggtttctcctgtcagtggttctgaggtttggctcttctgtggactacaacagttcaaattttattcctgttggagactacttttattagttatgcactctttttggaatttttgtgaaatgtgctaaaagctttcatctgaaagaagcttctggttgaataataaattgtttaatatcatattccagttattcatccttgctttataattccatggtagattctaaatgaaaaattgttcacctttttttttgccttctattctaaagtttgataggtacttctcattctcattgaaattccatggcagcgaaaaaagctgtatacaaagactacatgatgttgagacttaaaaatgtaaagctttcacttgtatgtgttggtttgaccaatgaggctatgtccttgttatgaaatttcagaacttggttaatgaagtttttttatctttatcctgctgcagcagcatggtattatgaattgattgggtcatatttagtttgttgtgaagagtaaagacttgcagattttttgcaaaaatttattaagatgactcttgttatatcttgttttttcttttcttctgttctctccttcctctcttctcacatttgagttggttgagatgcatgccttaaaaacttcttttgatgcttaggaaaatctttagggttttgtatttctgtacttctttcaaactttgatttggaatgacaaaggtaagaaaaagagtgatacaaattttgagtgttctgagatgactatcttcagttttaatctccaattatcttctgatgatccaaattgatctactatttaagatgagggttaaagttctagttcaattaccagctaaccattagttaaatgtttatcttggaagaggaagacctctaattaaaaaaggaatcaaaagaaaaggttactgctgttactttgggttccttacatcagtttgatgtgacaggagacccacatcagcatctgatctactccattgccttgtgtgtggatctctactgaccagccttggaaagtggaagtctggaaagatagaataattcaactgcaatcaggaccctacttcctcctcctgatcttgtgctctttaacaaaagtttgccatataatcagtaagatttttttgttatgtgcacaatttgcccaagctttgatggaacttttttactttaaaagttgatggaatttgtttgtcattttttttccaatgtcaattgaagcacatttatcaacttagtcacgtccttttgaattcagtcatctatctttcctctaccgtgatgtcaaaagaaatatttctatttctatttccatgtctagtcaattttgtacggaaatttctgcttcaaagggcattttcaagtaaactgaataccatgtcatattcacattgtttttaagtaaactgaaagaatgtatttttaatttgattgttaatcttctcatattttgagaggcatacatgctgtttcttaatcataggagacctatattatgttagccctggtcaaggtagcaagccaatatcttgaggatggttccttcatgaaatgaggaggtagtaacctttgtcatgatgacatagtgagactattgttcctgtctgtctctctctgcctttcagctagcagtatgattgcgctaaattgtgaagttgggagttgtctgttaactgttgaacaattctttcatgatgagtagaactcttggatttgtgtctgatggatatcaaattcgtcctttaaaactctttcctcataatattgatttgtgctgaaaattttatgcattgatgaatggatggacaagccaaatggttgcccctgcttttgcaagtagagttttccatgcaagatgtattatttggcagattgaagttctttttggggtttgttctgatatttccttttaattggtgttttaagctaagcagtagtttattcttatatttccttttaattggcgtttaagttaagtagtgatcaacagtgaacttcaacagacaagctcctctcttttgcatttctgctgccttgctatttattcctttccattctgtccatttctatcatcacaaagctccaatgattggttcaatcccacctgacccccatcctcaaaagatgactttttgaaagtaaagctgaggttatgagaaagctcatgatggtatttaaactcattagttttgcaaatgtggatcatccagtccatttagagtggttgcttctattatttttttaataggcaatagaatttatagatacgataaaaaagcagtacaccaaaatgtacaggatgtatgcaacggttaatgaacggcaatgccaaaaaagagaacacaaaaacaaccctctccctcaacacaatcccaagcaatctacaaattaatcgaaggcattgagtcttcttttttgtacaacctaacccatactaaaaggttacttaggaataaacatttcagcttttgatcagattgctcctgctctttaaatgttctttaatcttttccctccgaatcatccaaaaattgtatagcctagtgggtcattacattcttatgtaaaggaaccatgccaacttaaaagagtctctctgaccatggaaggaatgatccaaaccatgccaactaaggagaataacaatttccataaatgatttggttgagtaaaggagaatgtgattacgcttcatttctatgagagaacatctatatgctagtggtcatcctctcctttgaagttgatctagcgtcaacacctttctgcaactagcttcccaagtaaaaactcattttagatgggatccatgaatttcaaattaggcctgttgagaagggaattgaactccttggctccaaaacagaatagagagatttgacagagaaaactccactcttttaatccatccaaaccaccttatcatgttcttccgtttaccaaattgtcttgcaattttgagaaaaagtctgccgaagagtaagcttattcaagtaagggaggtgactgatattgaggggtgggctgctgctttgggtagtagggtggggatccccacattctatctaggccttccgttgggagcctctttaaatctccggctgtttggaatgtggtgggattgctttaacaagagattgacctcttggaaaaaaacaatatttgttgaaagggtgagcctttggggaaaaaaatcctcaggcaataagcttcatcttgtgaagtgggacatagtttttgaggctaagaatttgggtgggcttgatttaagagggcttgaaattctcaatgattcattcttggcaaatggttgtgaaggttttctgcggaggacagacaattgtatatggaagagtattgaaggtggcacgtttggagtgagtggtgatggatggtgctccaaaggcattggaaagccttgtggagtagaactttggaaaggctatatagggagaggattgagagagttttggcttaggactaccatctttgttggtagtggtttaaaaccaagttctaactagataggtagtgaaatgagtccttgcttaaggattgtttcccctcgtttagaattcctctaatatcaatgctagagtaggggatctttggttggaggagaatggacatggtctctgaaaccattgttctaataggagttttcatgattgggagttgaaagttcacaaattctttgatttcattctttggtgtgaagtggaacaaagatcaggagcctgtctgttcttattgttcttttgtgacaagctaaagggatttggaagtccagtttttttgcttctctcttttttgatctccttaaacactgctggtgtactaggaatgtgcccccttcatgcttgtgacatttaattattttatcttatttaccatatatatttccttcttcttttaatcctcaaccccttcccacccaaaacaaaatagagatgactttttgacggtcagactgaggcttagaaggaaggtcactgtggcattcaagctaatggggctattgttttgtttttgttttccctttgtatttttttgtatccttaaagctgtcatctgttatgtgaaagatgtctcgaagattatctcaccaatggaccaaaataaatatgatggtgcatgaagtcattcatggccttctgcttatacaagcattatgttgtttgttctttatttctctctttctccatcctgcatactcataactagttccttttccttgtgggttcataatgaagcttagcttctttagttttgttcatttattttgtttcttgatttaattgatgagtcaaatccataggaattgtccttttgtaaaatggtgttgaacttatcttggtgagattttaaattacaggagaagtcatcaacagcatcacgtg

SEQ ID NO: 12362 - DNA, 19488 bp, Vitis vinifera
  Intron number 8 from transcript GSVIVT01028768001 (locus G SVIVG01028768001) derived from phytozome v7.0 (chr-ID chr1 6; pos 19047838 to 19067325 reverse strand)
gttcgattctcatctcaatctcagttcaccgtcttgttttcattccatttgtctggttttatgtgaattgtttctagatctatgattttttttttgcaaggtttgaattgttttctcgattgttatgagctacaattgtgatgaaaatggatttaaatgcttaagcactaatgaatttgggaaatttcttcataattgcttcctttctcatttgagatcaggcttttatcttttattatttgttatttatatataatacaggagttctagtcaaccaaaagtcaaccaaattttttggtttaattgaaattctggaggactttttgaatgcttctgatgatattcatgtataggtttatggtaacaacatttgatttgatgcgttaaaaggtatagtatgatattgttgaaaattaaaaataatgtgaaataaataaatttgatggataaaataaaaaaaataatgtgaaatggttgaaaattaaaagcattggaataggagtcaatgagaaggacttcaattcatttctaattatagtgaaattgtgacttggaatccaaataagataagtagataagtagataagatgcttatcaaaaaaaaaaaaaaaaaagataagtagataagattaatctgttggcaactaaaatggaaaataggctttcataaagaaagaaaataacatatttactttatttcaattgcttcctcaatattttcatccttaaagtacttatattttcaaaatataaaaataatattttattgtcttatttgaatatattttctgttttttttgccttttttaaaattagaaaataatattaattacattaagaaacatgtgattttaaaaactatttgagaaaagtacaaaaatgagttaaatttaaattttttaaaaaataatttttaaagattaaagataaatctgtacaagatcttttacttcttaaagatataaaataaatccatattttttaatacaagatattttatttttaaaaagataatagaaaatgtattaaattttcatttttccaaaattttcatataaaatctttttagaaaaagtgagttttgacttactaatataaaaaaatctcaatttttataaattaattttatctttattcgtttaattatttttaaatatatatacttttttataagtcatataattatttcttaaaatatccttctacttgataatattaaataatattataaaaaaattaatttattattttaatttgataaaaatatcttacaaataaatatattataaattttttagtatataatatggcatacaaattattttggaaaaattctcaacattcttatgtaacaaataaaatctttctaattttctaaataataatgattttatataatttattatataaatccactcattttttcattctttattttataaaaattttattaattgacatcaacaataaaataagaaattttaaaaattaaaaacacaattaaaaccaataaaattaaaaattttattgtttacattagtgaaatcaagacttgtatttataatctttgttattagcattattgatttgttaataaattgttatttttaaaatatctattaaaataatttttttctattgaactcatttttttaaaaaaaaattatcaaaatcaataagacttacatatttaatcttatagtcatggattgaaaaatcggaaaatgtcgccgatatttcggagaaatatcggttatcgggcggcatcgaaacgataatcggcatcgattatcgatcgacggaaaaatcggctaaaaatcgacaaaatcgccgatatatcggcgaaatatcggtggagaaccgaaaaatcggcgaaacatcggcgagtggaggcacgtgcggagaagacggaggtggatggaaaaggagaagacggaggtggatggaaaaaaattggcgattttttccaaccagatttcacccgtttaatttaattttttataaaaaaattacaaaataaaaatattaccctctcattgtaagcatgaaaggaaggattccatgttgggcctgtcttatgacacagcccacatatccactccaattactgtgggcttttttttcagcccataagaccatgccaagactttgctgaggatgacttttataggagtcatttgactccttgttcctctcattttccgatgtgggattgcttaaatatcaatgaaaaaaaacataacaaaactccaccaagaggatttgaaccttggaccaatcttttactatagtccacctaggacaccactagactacatgtgttttgttatctaatatgccaaacaaaacaatatatattagattttaaatttttttataatattaaataaaaataatataatatttttaaaaattatgaaattagtttaaattttcatttttttatatattcacatttcaatattatacatatttcatttaataaaatttaaaatattaatatgatttaatttgataatatcaaagatataaaataatattattgatgtttaatttattcatatatattttaaaatttttataattatttttaattttaataatatataaattatattttatgacgtcacctgttcgatcatcggtccggttctgaaaacattgattacacttataaaataactttaacatgtatattcttgcttatttttatcattctttggatttttctaagcatttccatcaattttggataatttttgtctcatcgatatttgatgaaaaatatccaccgatatttctccgatatttccgatatatccgtaaaatccaagtaccgatatatccgtatttaccgatatttcaatccttgcttatagttagtactttatcattctatttctattaattacgttttaaaaaattagatgccaaaaaaaaaaaaaaaaaatctgcaatcatttgttatagtcacaccatttataatctttagtaggggtcactagcatcaattttattattgaaatgagaacatatatatatatatatatatatatatatatatatatatatatatatataaactccaaaaatatattgaattctaggggtgaggatggtttctttaaaattgaactttagctatatttctaggcaaagcaaatcaatctattagaaaaatatatgtatatatatgtactagcatttttttattagaaaattttaagtaggattctttatttaagaaagaggaaatcataaggataaacacttacaaaatataaaaagagaattccttccttaacatataggtaaacacttttacttttttcaatttattctttttacttttctttattcctatcactttcctttaaacacattaaattctttcccaaaaacaaggaagagtaggcataattgctccacatatctataaaacttacatatctatgaaatcaatattttataggcataattgaaaaataactatatttatagtaattttctatttaggatgacctacttctagaaattgtaatttaatcaaacatacttgtttagactaattgtaatttactctaaactatatttatagtaattttatcatttactcattttcattttagaaaaccctagaaatcccgttcaagtatccttgcttgacaattgtctcttttatcatatactaaaaacatataagttgtagaattgtggatatgattatttattgtgatcatattcaagttttcaacctatatgttttgtatatgattggtataattgtctgcaaatgatgcttgaattgtccgtttggacagtttggaaatacataatatctatgaaatcacacgcctatgctttagcatattgataagttttgacagtgattccccttattctctgggtgcatatttggagaaggtgacatattgttagcaacttagttaagctaactaatagtatgtttataccctagccaattcgtgtacttggagaactatggggaaatgctgccgaaattttatcaaaatgaaactaagtatgttagtgattgattcgtagggattatgtatttccaaatgggataggaaccactaccaaatataggaatttgagatgatcaaaagcatatcacattcattataagttgatatgaagattcattgttatgtgattgaagggtttaatttgcggaagtacgaggaaaatggcaatagataagagttggatgcagaagtcaagagtaagtagtgaatatcataaaggagttttggagttcttagactttgcctttagcaatgcacctggaaaagaaatgctcccatgtccttgcattcgttgcaataattgtcttatgcaaaagcgagaaatcatgtatgatcatttgttggacaatgggatagctagaaattatgtacggtggttgatgcatggggaatatgagttttgagaacctacaaatactagcactaatgagtctactatgcatgatgagatgcaagaaatgttaaatgatgcatttagaatgccaatgccaaatgaggaatctgaaagaagtccacatgtgcatgaggagtttgaaaaaccaaatgaggatgcaaacaaattttataatttgttaagagaagcagagcaggaactatatccagggtgtaaaaaattcacaaaattgtcttttatcataagattatttcttatgaagtgttttaatggatggagcaataagtcctttacaatgttgcttgaattattgaaggaggcatttcctgagggtgagacattgccaagcaactattatgaagctaaaaaaatacttcgtgaccttggccttcattatatcaagattgatgcatgcccctcagattgcatgttgtattcaaaaaagcatgcaaatgcaaatgagtgtgttgtttgtggtgtctctagatggaaatcaagtgatgatcattctacagatgagttcactaattcagcaaagaaaaagaaaattcctgctaaggtcttacgtttttttcccttaaaaccacggcttcaaaggttatatatgtcagctaagacagcttctcacatgaaatggcatgttgatggtcgcatggaagatgagatgatgaggcatccagcggactctttggcttggaaaaacttcgataacgtacacccttcatttgcattagaacctcgaaatgttaggctcggtttagcaagtgatgggttcaatccttttgggaatatgtcaatttcatacagtatgtggcctgtggttcttattccatataacttaccaccatggatgtatatgaaacaaacattcttcatgttgtcactacttattcctggtccaactgcacttgggaatgacattgacatatacttacaaccattgatagatgagttgaatgacttatgggacgttggagttgaaacatatgacgcttcaacaaaacaaaatttttgtatgcgtgcagctatattgtggaccatcaatgattttcctgcatatgcaaatctttcatgttggagtactaaagggaaatttgcttgtcctatttgtaataaggattgttcttcatttcaattacaaaacggacagaaatggtgttacatgggtcatcgtcgatttttgccgattgatcatagatttcgatgtgataaaaagtcctttgatggaaatgaagaacatagagcagcacctaaacaattgtctggggaagatattctacatcaattagatggaatggaacatattactttagggaagacatcaaaaaataaggtgtcagcaaaaagaaaaagagaacatgttgaacttgagcacaattggaaaaaaaaaagcatttttttccaatttccatattggaaaaccctcattttgcgtcataatttggatgtaatgcatattaaaaagaatatatgtgacagtatagttggcaccttgttgactatcgatggtaaatcgaaggataacttcaatagtcgtcttgacttgcaagttataggtatcagagatcaacttcaccccatacaaagagggaatagggttatattgcctgctgcatgctattcactaacttcaaatgaaaaaaaggaattctgtaaatttttgaaagaagtaaaggttccggatggttatgcttctaacatctctcggtgtgtacaagtgaatgaaagaaagatatttgggttgaagtctcatgattgtcatgttctcatgcaacaacttcttccacttgcaattcgaggagttctacataagaatgtttgtgctgttatagttgaactatgtagtttcttcaaacagttgtgttctaaagtgttaaagactgatcaattagagcaccttgagaatgacataatagtcacactttgcaaattagaaagaatatttcctccatcattcttttatgttatggtgcatttacctattcatcttgcaagtgaggcaaaggtcgctggaccagtgcaatatcgatggatgtatcctatcgagcggtatgttctcattcaattaatcttatgtatattaggtttcgtatagttcatgaaacaaatctatcatgttgtggaatgacaggtatttacgtacattaaagtcttatgtccgtaataagagtcgtccagaaggttctattgcagagggctacatagcagaagaatgtacaaccttttgttcaagatatttgcatgatgttgaaacgaagcatgaccgtgaagaaagaaattatgtcattgaaaataacataacaaatggtggagggttaaccattttcaaatgcatgggacgtacaataggaaagtcaacatctcatgttcttagcacagaagaatggtcccaagcacatttatatgtgttgactaattgtgaggaagtgacgtcatttattgagtaagacacttatttgaataaaactttatattaattctcgtacaaaaatttaattttggtctttgtgaacattataattaattttttcttttttattagagagcataagcaatctataagggttaaacctcgtattcgtgcacgagatgtagatttgattcacacaagagaattcattagttggtttgaagaacgtgtaagttcattcactacataaattgttctattatctaatacacatgtatgtattaacatcttatatttgaatctatagattatacaaatgcgacatgaaggtccaatttctgaacacatactatcattgtctcgtggaccaagcacatcagttatatgttatagaggatacatcattaatgggttcagatttcacataagagaacgagaaaaaggaaaaaaaactcaaaatagtggagttgttgtgaccgcagagatatcaagctttgcaagtgcaagagataagaacccaattcctggtcatgttttttactatggtgtgctaactgatgtaattgagttacattaccttggtggaaatagagttattttattcaagtgtgactggtgggatgtaatcaatagtggaaggggaataaagaaggatggatatgggttcacgtgtttgaattttgaacgtaccatatgcacagatgaaccatttgtgcttgcatctcaagcaaaacaagtcttctatgttcaaaattcaaatgaggaaaattggcacaccgttgtagagatacaaactcgaggggtttatgatatgaatcagaaagtatctactaatgatccagagccatatcaacaacttataacacttcatagtcaacgtgatgtgcatgagttggtcgagaatgatttaatcaattgggatagaaatgataatgcaggagaaactatccaaacggatgttctactatcacgacaagaaaacattattgaaagagataatgaattcattcatgatgatgatatagatgatgtgtagctaataatattggtaagtacatacatatatacttaccagatatacaaattgtaatttatttcatattatttatgtaacttattttgtattactttttctaatttactttattatgtaggaaatgtcacatcaaagaggaagagtacaaatagtgtctccagaagatgagttgaacaatctacaacaactcttagacatacaacctgctgcaactactactcctagtagttctgatccttctgattcttcagatccttctgttgctggtatgattaagaagattatgtttaactttacatatgataaatgtgtttacatatgtttaatttcttgaatgataggtttttaatgtttaaatttatataagataagtaaattatgtttcttttaatttcattattactcttaataggttcatcttctagcaaaaagaggacacgtggcccaacacgtaacttagatttacttagtatgaaacccggggaaaaaaaaaactacatgattcaatacgagagggcaagttgtttatgatggaaaaggggaaagattatcaagctatatgggaacattggtgcgatctcaacacaatgtacccatccaagttcaagattggaatcatgttagtgaagatgtgaaggaaagatttgggccttagtattggtatatgctagttactattcaatctaaattgtaatgttattgtttaaaaatgatacctcttatttatacatgacattttaatgcaatacaggaaaaatatgaactagaagaaacatataagagctacattcttcaatgttgtggaaatttgtttagaagctatagaaataaaatgaaggccaagtattataatccttataatacagatgaggagagattgtgccatcgacctccatgattactactcaaaaagtgctatttcatagcttgtaattaactcttttaaacacttttgagtagtagttattgccttttaacccaattaacatgttaaggacccttgcaatcatttctaatcaaattgtgtaagttttggtgtttttgttagtaatttgatcaccaaaacaatccaagattgaggagagttatttagaatccatggaaaagcttttggaagctcaaattcatgaagaaccaagctttggagctccatagccctttgccaaagtcgttcaaagtatgcaaggagagaagcaaggagagaggaaaaacagagtgaagaaaacagaggacagcagctgcagtcttcttttgcacttttggagcacttcctgaagtccattttctacatgctatataccatttcaaagctcaggaagtcaagaatccaacgcctcaaaccgtgtacgatttggagctgaaatgaggaagttacagcctttggaagatgactgctccaagatgaaggaaggattcaacaaagtgttgcgaaatcacccttttgttgcggaatgatttcgcagcctttttgcacagtgctttggatttcccttgaagtttcacgccgcgatggaagccaaacaccacaaggtggaagccaacttcgcagccctgcgagtttaacttgttgatgcgaaaatatttcgcagccctcttgagtgtctgcgaaatctcgcagacctcgttttcacctgcaaaatggtccttagtgcttccagatatttgtgcaccgactcttttagatcttttcttcagatatttttgtataaatttccattcttctccttgtaatcaaccaaccataagatttcttagctaggaaggttggaaaaacttctctatatatattcccttgcatccactgtaagagaatcatgtaagaaagatcaaaatatagatatatcatatatagaatcaacgaacagagcacttgctctgtttttcatatatattcttgtcttctctttcattttcattttctagccaaacaaactctgaggatttttcctcagaggatgagaggctaagctttttgtctcttggagtaaggaaagccgggtaagtttccacatgcataaattggaagttttgttgttttagtttttaatgaagagaaagtgtgacccgttaatggtttttatctttttagttaacttaaaacgcctttaaatcacctgggccaacacttggtaaggcaagtgatctccgtccatggagatgcactagtttaccccttgcgagcctttgggaggtgacttgaaggtaggattttctagaatagccaacacttggtaagcttttggactccaaggagacatccattagttatctcttgcgagcttttgacgggtaatccaaggttaaagatcgccttgaatggcaagtgctaggtgagaggcatgagccattgcaagatgcatcagtgagaaggatttagtgtttgaacccattaatgggaagcatctgtacaacaccggttggagaaggaactatatgttaattctctaacgcgaggaaaaagaaacaagtgaccggaactctcctttttgtatgaggaacctgagcctagtgatctgaaactccaagaaacacttttctttgtaagtaaaattagttactatttttggttagtttaaaaccaaacgtttttcattcaaacatctttatgttttcttttaaagctacccttgaaatgaaaagacaccaatttaactttgaattaatatcatttgtgaagtgaaaacccattccagtgaacgatcctagagccactatgctatagtagctttgtctttgctaccttagtatatggtgtaataggttataaattttgttgattactccctcaatcaaggagcaccagctggacacgaatcagctgagacaccaagtgggcacgaatcaaatggcgccgttgccggggatcgaaccccgaatcaaatggtgtcgttgccactgccgctgctagggacgaatcaaatggcgccgttgccggggatggtgccactttacagtgatatcaccttttcagagtacttgtgatcttcatcacaagtttggtgacttttcttttccttttactaactctttttatttctttctttgttcatattttagtatatcttttatttagtttttagtttaccttaattttctttctttgaattgtttttcttttgttttattttgttttctctgttcttaattcacaaattgctagttgtgcatgctatattgattacgagatagcagaagaagccatgaacttcttgagttatgtggctgaattttcaagagaatgggatgaaccaaatgctagagatatgggaagaatgacgtttcaacctaaaactaagggtgagatgtatattttgaatgacgacatgaacatgaaggcagagattgcagctatggaaaggagattggatgagctagaaatgaaccagatgcaagaagtgcaagccatctctcaaacaccattgcaagctatgccttgtgccatttgtctatcttatgagcacttgggggaagagtgtcctaccattccagccgagagggaaatgtttggtgattgcaacacctacaattccaattggagggaccatccaaatttctcttggaaactacagccacctcagtatcagcaacctgctcaatcaccacagcaagcctcaagccttgaacaagctatggtgaatctttgcaaggtcgtgggagattttgttggaaagcaagaagccatcaatgctcaaatcaatcaaagaattgacagtatggagagtactttgaataaaaggatggatgaaatgcaaaatgatatggcccaaaagttagatattctccaagattcaatctcaaggttagccaacctcaacacagtgcaagagaaagaaaactctccttctcaaccttatcaaaattccataagtatccatgaaatggaggctcaagagggagaatctttaatggagaaggaagttaaaacggttatcactttgagtggtaaagaggttgatctgcccacatgcaagctagagcataaggtagagagtgaaacagagaaagaaaagagggaggaaatcaaaggaaagaagaaggggaaaaacatagagaaagatggctatgatgttaatgtacaaagagaaccacagaggatagtcatcaaggaagaattgatgaagaaacacatgcctccaccttttctccaagctttgtatgggaaaatcatacaaaccaagtctcaattgaaggatgcaaacttcatatgggatccgggcaagctaaatcaggagaaattttttttgatggacttagtctttttaaagactagctagtccatatatttttgttttgtttttttttacttgctttaattttgatttcaatgctttaattttgatttcaatgctttaattctagtttgttttgatgtaatataggtttttggatgatcaaaatcaagaggaattgtaaagaaattgaaggaagtctttcggagcaaaatcggagcaaaatcagagtcaaacagagcgaaaacaggggaaaaacaggggtctgcgaaattttgcagcctctgcgaaatcggcactttgttgcgaaaccatttcgcaactcaattgactcctctgcgaaaagtttcgcagctgcgaaaccaactttggcacacgagtgccatttcacagcacaggagcccccatttcgcagctgtgaaacggttgcgaaccaccaaagcatgaaagatcctattttcgcaggcaaagctccattccgcagaggatttctcggctgcgagaccgattttggcacacgagtgccattttgcagcacagtgaacctcatttcgcagctgcgaaacgactgcgaaatcccaaaacgtgaaaaatcccaatttcgcagccaaagctccattttgaagagtatttcgaagctgcgaaaccactttttggcacacgagtgccatttggaagccccgtacactcatttcgcagctgcgaaatggctgcgaaacctcaacacctcaaaatccttcagcgcgcacaccatgagttgacatgtcacaaccgcacccccatttcggaaattgttggacacatctcgatcacttatcgaagttcaaattatgcatgcaatatctcgtttcaaatattgggaagtcaggagtccatagcttcaaacggtgctcaatttggatttgaaacggaaaagttatggctgtttgaagatgactgtgcaaaccatgaacggaaatgtcgcacctccatttcgctactattcgacacatttttgaagcacttcctggagctcaaattattcataccatatgtcgtttcaaatcttgggaagtcaggagtccagcgcttcaaacggtatgcgatttggaggtgaaatgaagaagttatggtcgtttgaagacaagcgcgcaaagctaagcgggaatttcgcagccgagacgccatttggaagggtgtttcgcagtagcgaaaccactttttggcacacgagtgccatttgcagcacagttcccctcattttgaagctgtgatacagctgcaaaatcacctttgagctgcgaaatcacttttaagctacgaaatgggctgcgagaattcccctcctctacgaaatccaccacccgctacgaaaatgctccaagcttcaaaaatgatctgtgaacatgtcacttttctgcgaaatgatcttcaagcttcgaaatggctacgaaatcacctccaagcttagaaatggccttcaaattgtgaaattgacttgtgaaatggagagaggtttgcaaaaacaccttgcaaagccaagggaagttgctaaaatgccaacagagctccgcgaccatgcatctgaagaggagagccccgcgcaccctaggatcacacacactaagcctctcactccattttttacctccttaaaccatcagagctcataactccaactgaggagactatgccacctaaggagactaccagaacagaggccaaagtcctgatccaacccactcaagaggccaccacagacacatcagctccacaggaccttaccattatttgatcatctctttactttttgtctttacatattatattagtatagataattccatattttgatgtcttatattctggaattggatgtattactgatgatacatcatatatagacatcatttttgtttaaacttggcatttttttatttcctctactcactaactcttatgttttctttgaaacatgtggtttctcctacatgactcagactccatatcacatgaggtaccacttccttcctccttattttcaattcaaacattgaggacaatgttcagcttggttggggggagagttgaggaagtaagttttgttattaatgctaagttattttggtaatttagttgctttttgcttaatttttaaaatttttgctttaaactccatggatattaaggattaactctcaaaattaaatgagagaagtcgagtttcaacttgattacatgagtcttagagtttgtattatgctcttctaaaagttgatgaattgttgaaactcccattgcatgcaaacttatctcttccaccttaagctattcgcacacacatacattagattccggttataagatgtgaaactatctcaccctctaagcttgagaaatcataatttgacacctttaacctctctttaatagtgttgggacacctcataaagaccaatgagtctttgaaaaaatagaaaaaaaaaatatatatatatatatagaataaacttctttgcttgccttgaaacctgagcatggtccgaaggggtggcgaaagcctttaaagcctggtgccctaagcctttattggttgggagtcaccgatcctctgcttgttacatgggtgaattggttaagtttagtaagtgaaaagaattgtgaataagaggtgcgttcctagcctatcaagagatggttaattttgctaagcttaaagaaagacttaggttggggggagatgatagttatccatactatactcggaagctaatcacattaacacttagcttttagtggaagaatttgatttggatcttttgagagtggaaattcttttgatgcttaaacttgcataatatcaagtgaattctttgacaactcttattataggttgagtttcacatctttattgatccatggatgtccatcatgccactcatatcattttttggagtgatttgcatgatcccttttatgtatattattatagttacttagtttttatctcctccattgctaagggactagcaatatgtcggttggggggagtgattactactcaaaaagtgctatttcatagcttgtaattaactcttttaaacacttttgagtagtagttaatgccttttaacccaattaacatgttaaggacccttgcaatcatttctaatcaaattgtgtaagttttggtgtttttgttagtaatttgatcaccaaaacaatccaagattaaggagagttatttagaatccatggcaaagcttttggaagctcaaattcatgaagaaccaagctttggagctccatagccctttgccaaagtcgttcaaagtatgcaaggagagaagcaaggagagaggaaaaacagagtgaagaaaacagaggacagcagctgcagtcttctttttcacttttggagtacttcccgaattccattttctatatgctatataccatttcaaagctcaggaagtcaagaatccaacgcctcaaaccgtgtacgatttggagctgaaatgaggaagttacagcctttggaagatgactgctccaagctgaaggaaggattcagcaaagtgttgcgaaatcacccttttgttgcggaatgatttcgcagcctttttgcacagtgctttggatttcccttgaagtttcacgctgcgatggaagccaaacaccacaaggtggaagccaacttcgcagccctgcgagtttaacttgttgatgcgaaaatatttcgcagccctcttgagtgtctgcgaaatctcgcagaccttgttttcacctgcgaaatggtccttagtgcttccagatatttgtgcaccgactcttttaaatattttcttcagatatttttgtataaatttccattcttctccttgtaatcaaccaaccataagatttcttagctaggaaggttggaaaaacttctctatatatattcccttgcatccactgtaagagaatcatgtaagaaagatcaaaatatagatatatcatatatagaatcaacgaacagagcacttgctctgtttttcatatatattcttgtcttctctttcattttcattttctagccaaacaaactctgaggatttttcctcagaggatgagaggctaagctttttgtctcttggagtaaggaaagccgggtaagtttccacatgcataaattggaagttttgttgttttagtttttaatgaagagaaagtgtgacccgttaatggtttttatctttttagttaacttaaaacgcctttaaatcacctgggccaacacttggtaaggcaagtgatctccgtccatggagatgcactagtttaccccttgcgagcctttgggaggtgacttgaaggtaggattttctagaatagccaacacttggtaagcttttggactccaaggagacatccattagttatctcttgcgagcttttgacgggtaatccaaggttaaagatcaccttgaatggcaagtgctaggtgagaggcatgagtcattgcaagatgcatcagtgagaaggatttagtgtttgaacccattaatgggaagcatctgtacaacaccggttggagaaggaactatatgttaattctctaacgcgaggaaaaagaaacaagtgaccggaactctcctttttgtatgaggaacctgagcctagtgatctgaaactccaagaaacacttttctttgtaagtaaaattagttactatttttggttagtttaaaaccaaacgtttttcattcaaacatctttatgttttcttttaaagctaaccttgaaatgaaaaggcaccaatttaactttgaattaatatcatttgtgaagtgaaaacccatcccagtgaacgatcctagagccactatgctattgtagctttgtctttgctaccctagtatatggtgtaataggttataaattttgttgattactccctcaatcaaggagcaccaactggacacgaatcagctgagacaccaagtgggcacgaatcaaatggcgtcgttgccggggatcgaaccccgaatcaaatggtgtcgttgccactgccgctgctagggacgaatcactccacacttatcggatgatgattggaggtggctcatccacttttggagtacacctgaggccaaggtaaagataattatcttttcttgataatgtatcttatgatagtcatattcacttaaaatgatatttattagttatatctaacctaataattcatgtatataacttttattatgtttctattacctatataggtgacttgctattttttaattaatgtaggatatctcagaaaaaaacaaggcaaatagggcaaagcaagtgataaagcatacatcgggatcaaaaagttatgctcaaatttgatatgaacaggttggaaatttattattaatatgatttgtttgtacataaataattcatcataaataactcaattgttttacttgtaagaataggcacaaaagaaagaggatcgaagtgagcctaatagaattgagatgtttgccttgacacacacaagaaaagatgggacacctgttgatgatcattctaaggagattatggtaatgaagtaaataattttatatacttgtatttcaaccatagcctcatactaaattattttaaaagtctaacaatttttttttttgttttttacaatttcaggatcaatttcagcaattactatcccaacctgaagggacatcttcttttacttctgcatcatttggagcatctacatctatatcatctacatctgtagcatctacatatgtagatgagatatatactcgagtcatgggtccagagagacatggtcgtgttcgagggtatggatttggtcctactcctaccttagtctttggttctactagtagaaagcgatcaggagctattctttcaacacaacttgaaaatgcccaagagatgctaatggctgcagaacaaaagtttacaactacaactgaagaactctccaatgtaaaagatgaactctcacatgtgaaagaaacatttgaagaaaggttgatagaaattcaaaagaagacacgagaagaagtgaaagaagagtttgaagaaaaaatgatggaaatgcaaagaaaaattcaagcacaaattcaagaacagatgatgcaaatgatgcaacaattttagcaaaagtagtataaatttgaagattttgctacatctttatatgatagagtatcttaacttttttgaagattatgctacttatttatatgatagattctcctaactttttttgctttctatgactattatgtgatgtttggttggttgatttgttatattatgttaaaatgtgaaactaaatttgaatctctttgttttttgtttgtttgatttttttttttgttatattatgttttttttatttaatgactatatattgatatataagtttttaactagcttggaataattgattgtaatatatagaaatttttttaattgcttaattgcatatacaggtctaaaatgggtttgtttgggtttataacaggtttgggaaatttgaatttataaaaaaccaatttccaaaatataacaaattttagtcacggccactaaaaaattgtgaccataagtgtacttttagtcacgatcaataatgaaccgtcaccaaaatttggggacagcggccatcacatgattattttcagtcacggtcattaatagtcgtgaccataattggacattttgtcataatagacctaattattagtcacggtcacttaattaccgtgaccatatacctatatttagtcacgattcatgaattgaccgtgaccatacgacccatttagtcacggtcagggaattgaccgtgaccataacattgaatttagtcacggtcatcttattaaccgtgactatagacatacatttagtcacggttagggcattgaccgtgaccataacatttcatttagtcacggtcatcttattaaccgtgactatagacatacatttagtcacggttagggcattgactgtgaccataacattccatttagtcacggttagggcattgaccgtgaccataagtttacatatagtcacggtttattacctgaccgtgactaaatcaacttaataaatatcaaagtattcttaactttttggtcacagtttttgtatggccgtcacaaaaaaggaatcatatggtcacgatcacttagaaaaccgtgaccaatacctttagctacgcctcatattgtgacgctcggtcacggtttcataaggccgcgacaataggttttggtcacggatttataagatttggtgacggtctatttcttgttgtgacactctcttgtttacaagttgtgttaaagagttgtcaacaa

SEQ ID NO: 12363 - DNA, 6894 bp, Vitis vinifera
  Intron number 1 from transcript GSVIVT01017364001 (locus G SVIVG01017364001) derived from phytozome v7.0 (chr-ID chr9 ; pos 7393760 to 7400653)
tttgattttttgattccgcagatctgggcttcacagtaagaatttctctcctttttctctattcagttttttcttaccgatcttgtgtttggctttcacgttgttgattttcatttggatttgattatatctgtttgttttgattgtgggtgttcgtttttgtggatttgcgattgtggttgtggcattggggtgtggggatttggggttggggagccgtagttgcagggtgaatggctagggtttgtgtgaatttatgtttaggtttaggttttgctgagatttttgaggtctgaacgacttttgctttggtcagggtacgtgcggttatgtaacgcttttggggctttatgccacgtggcagttgctcttcggaattgagacttccatgggattgcttgagagaaactgaatgccagaaatatgagattgccttagttttgtggcaatctttctctctaccgaatcaattaactttcaagtcttaaccttggcgccaaagagtaaagggcgaaaagggtaaaggaaagtggtttatttggataacattttctctctcatcaattgactattaagttttaagtttggtgccaaagaataaagagtgcaaggggtaatggttgagtttgggtatcaatttttctctaaacttagatcaactaacttcaagtttgaaccttggggcagaagaataaaaggcacaaaggggttgaagaaaagtagttgtgtttgcatattggatggtaattgagtttttgaatgctattggcaacttgccgtgtgtttcttctatagactcaatggttgatatgtaccttatctaaagtacaggtcatttttttgttgatcttaaccatggcacaatgaaaacaaagagtgcaaacaatataggaaagtaattgagcttttgaatgctattttgtattgtttcttttatagatttagtggcataccgtgtaattttgtataagagtagagggtattttttagagcaggtttgatggttttgtcttactaaattggtgcatatttatcgatcaagagggatccattaagccattgaatccatcccacagcatgtagtaaaatatgtgaaaaagatgatatcaggcacttgaaaccttttggttattattaaattttagtatttacatttctttatgtagcatcaatggctatttgtttacaatccttcttaggaaggttgacacaggacaaaatctgataatatatgattgtgtggaatattgagagtgcaaaacaagggaattgtttactctagataaatgttatatctactctccctgtaggggaaaaaagtctccaatgtgttcaggtccttgctttaatttcaccatgttagtacccaaaaagctaggcagcctgttgttacgtgaaccacgaagattactccaatggaatagattttaaccatttggtttgtatatcccttttcttattttgagacattttattagaattctaaagtctaaaaccattaaatatgtatctttttctttgggagatttggctttgttttggttaccaagtgtctgctgactgcttggcctttttggccatgttacattcttttatcaaaagaaatcaaatcttgtgaggcagtggttcttgcttgaaagcagtaatcgtgcaagaaattggcatgattcattgagctgtaaccatttgatttcgtgttctaaacaatttcacacattttttaccactcaaattttagtcaaatggttaaaattatctaatcatgccaacttttgattcaagtgaggattttatgatgattcattagattgtagccatccatagttgaaacaagaattccatgtgaccaaaagggccagacagtacatgaacagtcacgtgcttcttgtgacaaagccaaattctattttgacatgcttacaacatcagaccaacaaatggtatagttggatgtttccctttttctttttatatgatgaaattttaggggtatcatattaccttacaagcaaaagacttacaaaaataaatttggtctctaccatagttttaaaagacacaaggtgcacttaaggtgcaaaactttccttcagcttaggcccaaggcacaattcacggtgtatgcttgagtgaagtaaaacatgacttaagatgcatattaattttataaaatatgattcaaagtctaatcgaatcaataaaaaatttaagatctcaaacatttaaaagaaacattcaacaaaaaaataatgaaattttctatgcttttacctatcaaaaaaccaaaaaagtaatgaaattatataaatttcaatatacaattagaaatttcaagaataaaagtgtttaaaaagaaaaagtaaagtagaccatgcgggcctctttaacaaggtgcatgttttgacaagcgagttgctacaactagggagtggtgcctttggcctagtcgagctttaatcatgccttttaaaactatggtctctacttggctttacattgatgtggaggaactcccttctgctcattatatgacagagtgattgaggtctatttcttctaattagacaattgtattatatgttccttggattatgtcgtataatcataagaatgtccttaaatattttgtgaagggtgaacatgtttttctggacttctgataaaaagggttgttctctggaccatctaagtttaggttcctgtacaataatgtggagcctagttttcttctaagaagtttatgcaaaatgaagacaagaacattgtgatattaatagataatcttgtctgtcctgcactgaaatgactggtagagttcctaagtttgtatatttaaaaacatttttgttttggtggcaccgtggcagcagtattcggtgtggttttcattagagagattatactagactggctacaagtccttgaatatggtatttgtgcacagtccagatttggttagtggttctctccaagaaatgacctgcaaataactggaaattattgggctaaataaccacttttcaaagggtcagatgctaaccaaatacctaagataaatgattgttggacctaaaatagataagaaattgtactacaaaaaaggctcaggttgcttttgtatggctatggtgatgttactaagatcagctccatggatagattcctgaatccttaaagcagaaccgtggttaaagatttcattaggttttatgtggctttaggctttggttgtgctggctccttggctatgacgctcattttttgatctgttcaaatgatttaagattgtttgagaaaaatgagtcacctttttcttccccatttgtcaacattggaatttttcattgtatatgtgattgttacttcacctatgtacatttgatgcaagttgcagtaagggaatcaactgttctagcttcagaacatatagctcatcaatgatgatatttatttctccattctcatctttttatttttactccttttttttttttgagcaaacatgttaagaatcaccatcaagaccatcgtatatgggaagtacacaaggaactcctgaatattgttcttaggggtgagcatgcagaaatattcataaaaagctgttagtggacttacctggtgtctttacacaaagcttttttaggatgtaatggtaactgtgtttcttgggatttaggatgtcacatgcagtatgttgagtttaaaccattgcaatatatatagtgttttctcaacattggattaaaaaaaccatgttttaccaggttgtgttaaattttctccattgccttttcaggacaatcccatgttagttaattattttctgtctagagtataagtgattcacaatttagtagatttagttaattattttactaaatcctttttgttttgttctgagttattatatcattcttaggtcgtttttattcaaaattttaggagcatatgccttgtatgctgttttgacaacagaaacgcaattggtatactgtttagttggtttgtctaggcatgtggcacatagaacaggaagtataacacagtttggtgcttgtactctaaaatttagtgcaatggagtttagatatatttagatcatcttgatattttttctgtggaagaaaaaaatagagaaatctaggttttcatttatggtcatgtgctaattagatgtggagtcaatcttatgattagggatgtcagtggggtgggtttgggatagctggctctgtcctgggttttgggatagttcactctatcctgatcccaacctctaaatcctttgtacattccccattcctggatcaaatataggtggcagggtgggttgggaccttggcaacaggggtgggatgggctacttaccattaccaaaactgtggatgccatgttaggaaaggctagggttgatggtggagagagcatttgattgaaaatattgatgctatgatctctagttggttgtcttcccattgtgggttgatttatgctggagagaggcttgggtttgaagttgttacacctgattttaggattgatctgctgcattcatatgctaaaggtatgttgatgggcttccacttctgggttgatttgttctgtccacatcctctcatacctttatcccatcatcttcctggatttgaacaagattatgataattattaagaacctatttgtggacattttatgcagggagagatgcatggtcattttagcctgtgaatggtgttttgagcacatgatggttttggaatgacgagagattccccttgctttgtttagggttaggtttgtgaatgactaaagtgatattttaattaattgaacacataagataaaagtacatatttacctccaatccagggcagggtggggtgaggcgaagaaaaccctagcacagcctgaatctgatgtggttttttggaataattcccaaacctgcctctatcctgaatatgctgttcccaaaaccctaaaataggggtgggcagggctgggttagccgataaccctgacctgttgccatccctacctgtagttagtgttccttaataaccggtttcaatgtgccgtagttcatgcttgtaaaatttttttggaagtacaaatttaaggaatataattttatttgggtttaattaaatttttttataactgctacaaaaagaataaaaataaaaatgggaaattactgacttacccaagaaagaaatttgcttttctcctatagggtagggaggtattagtttaatctctaacctttaggctagtgagaggtattagtatttaatcatatccttggagtaaccttatggatgttgtggcaaggcctgtggaatgaattgtcctgccttactgaggcataaagctgtgtttgagcctcaatgataaactctcactcattaaaacattgccaagtacctcagtggacatctctaccagggtattacttgtttaggtcattgctaagctgcaaccctcggcaagttggctaattgattacggccttgtggaatcaagtgattagagggaagtatggagaagctagagggggatggtgctcgcgggaagtgagagaggctcatggtttgggtttgtggaaaggaataagggcggattggaagttggtgagtgataggttggctttcatagttggtaatgggagaagggtgagtttttggagggatagatggtgtggggagtctcctctgtgtatgacctttccctctctttttgctttgatggttgagaaggaagcgtgggtggtagatatttgggatcccttggctgaggggggctgggggggttggaacccctgctttttaagagcgttcaatgactgggaggttgaggaggcggaaagatttatggagaggattcagagtaaaagagttattgaggatgtggaggatacggtgtcctggactgaaaccaagagtggtaaattctcagtcaagtctctctacatagctcttgaagcgggtggttcatctttgtttccttcaagctttatttggaatgtgaatgtgcagcccaagattagcttcttcgcatgggaggctacgtggggcaaagccttaacattggatatggttcagaaaagaggatgggcatgacgaatagatgttttatgtgtcttgagaaagaggagaacataaaccatcttcttcttcattgttcaagaacgagggcgttatgggatcttctttttgctttatttggggtgtcttgggttttgcctttttcagttagagagacccttctaagttggaatggttttttcctaggcaaaaatcgcaagaaggcgtggagagctgctcctcttcacattttttggacggtttggaaggagaggaatagattggctttcaaggatgaatcgttgtcaattcagagactgaaatactcttttattcttactttatgggctgaggctaagttgttcatagacgattgccctttaactatagctaattttattgattggttgggttttaagtaggtttgtggtaatcggttctctttgtcttttggccttttttatggtgggtgtataggtattgtatacttagagttgctattttagcgtctcttttttaatgaaattcatttacttatcaaaaaaaaaagttggctaattgattacttcagaaaattgtggtagtgtgtagattctgacatgttatgaattagaattttcaactttatcactaggattgcatattcagaatttcagactggaaagattgttaaatgataaatggtattggaagtgttctgtgtatgcttttatggttgcttttctgctagagtcattctgcttattcttgctctctaaaagatgtcttttccttctaatgcaggaattcatccctttctacaaag

SEQ ID NO: 12364 - DNA, 2479 bp, Vitis vinifera
  Intron number 4 from transcript GSVIVT01012605001 (locus G SVIVG01012605001) derived from phytozome v7.0 (chr-ID chr1 6; pos 4548794 to 4551272)
ttgcatctcaaggaggtcctataatcttggtgcaggcaagtataactcttaatatgaaactagtttggtggaaaatgtgtggttgatcttcttctttggaaaactaagtagatctattgacaaaattggaggaatttgtcaactttttttacaagttttcacattgacatcaagacatctaattatatgtagatgattctggggcttttgattttgcaactttaattaccacaattctgcacacctcagtaggaaaaattatatagagaaaattggttgtagaaaacttataggagtaccatgttttcagcaaggaaaactatacttcattgaaaacaaattctatgattttccaaaatgcagaaaagtgccttcttatatttacttgcttatttttccttggaagctgcttgctctgtcagacttttgccagtcacagcattagtttgtggtgcttgtagagtgatatgggaaagccatccatataggacccatacatcaagttgacaagagcatttggaaactgatgtataggattaccaatcatggcagtttcataatgaagattgatgatcaaaagagacttgatgtttgtggagaattgattttcattgatgacgaatagctggtagtatattcaaggaaactatatattccatctaggcataattctaggtcaatgacaactatatatttacaagatcactaccacttaggattgagtatgtacaaggaaagatgcaaaatcatagagaatgagatttcctaagattcgggagatttcctatgacagaatttcaacaatgttccttagactagtaccttttctttagaataattttttgttagtaaaagtgaggatggtggatgggactcaggactatgttccccttaaaattgtaagttcaaggatgaaaaaaagatgcacttccaaggtgttctaagtatatcctttgtcaattagttagtaggaagatccttgaatacaggaatcaaatttggaaaaagaaagttttgaattggataaaggatgcggaattttaatgcgcaagttaaaatagaaggaagggtaaaattagaaataggcacatgcaagaaattttgaggtgaccaaataaggaggtgttgtggtagatattccagacaatgcttagggaaatttgaattaatgtgtattgaaggtgctttttggtatagcaacaatgaattgatttgtttataacaattctatatagcaacaatgaattgattttttatagcaattgtagaacctcattgaggctcagtggtgccaactcttttcgcagtatcactgttgggtgcttgttgagcattactaagagggttaggctagagtcattaggcctagggttatgatgctgctaaataacccaaaaaatggtggctagtgatgaggaagctaagaagttgtaagagaaaatagcaatgcattttgcatagcctgtccttccctgctttcccatgaacagtgatgaatggctcctgattggtgttagttgaagtggaattcttgacaatctagaataacatgagtaaattaaaccacatatacctatattagccaaccttttctgtgcatatatggaccaatgaatcaatataatatttttgttaaataatgggtcctattcttcccatttattcacctctttttttctacaaaatttcaaaatatccttatttcataaacatgcagcaaactagttaacagattgattatctggctaaatgttgtgatcatatttcattttgttcctgacttcaaagtttaccctcttttttgaggatttgttttatggagcccttttagcataagaataattttgacaatgtaagaactcctgtcctgttctatgaaagcaacctattggagctatataactggtttgtaactggttcaacactttattctctctgagggaaaaatgctttttaccatttatttgatgtttcacatcaggagacttgagttttgctgctattaaatcctgataactcgttcgccatattgtgcaacttgaactgtttttcaatcactctcatcattattattgttatctacataattcaatttgatttactatttcgtataattatgtcatatatgtacctgtgtagggatatgattgtttgaaagtgaacttttatcttggtgtttgaaacttggaggcatctatgacaacgatgctagtggaaaacaattacggcctttcattttaggcttctaaaatattatagtttttttcttttgttttatttatttatttattttttcaggtttttttgttttttttttgttttactgttttgacttatgttagtttggtctttgaacactagtcaatttcggtacattctagttcctttccatcactgtgcttccttcatgttactctgtgaccatatgctatggtgttgagattccaataagcaattctcttttccttgtaggtagaaa

SEQ ID NO: 12365 - DNA, 4788 bp, Vitis vinifera
  Intron number 5 from transcript GSVIVT01030239001 (locus G SVIVG01030239001) derived from phytozome v7.0 (chr-ID chr8 ; pos 10019213 to 10024000 reverse strand)
cagaaggttgcacaattttctgcacaactagaacagtaagtggcatttgatattattattattatttttttgatagataaaaggatgtatattaaacgagaagaggaagcaccaaaaacagtaccctcaaagtatacggggagtatacaaaaacagcccaaagtagcactccgagggggaacggagagaaatacaccacctttccttacttagaccctaatcaatctaaaaaacttacaagagaagaagggttcaaaaccataaacaccctaacccaagaccaaagattacatacaaaagaatatttcagtctttgaagcgaaaacttctcattcccaaaagctaacgaattcatttccttctagactgaccaaaatatacataagggggccatttgccaagcctttttacgagctttcccacaaacgctccatgctacccaagaagagtttccttcattgtacacgaaagagtccaagccacatcaaaaagggagaaaagaagattccatagaacccgtgtctttacacaatgaagtaaaggtgatccattgtctctacttcaaaaaggcatagaaaacacctgtttgccaatgagtaccccctcctttgaagttgctccaaagttaagactttaccctaggaagcctcccaaacaaagaaggccaccttaggagacacactcgccctccaaatactaccactagggaacaaaggagaaattccgggctccaaaatagaataaagagactttactgagaaagcgccacacttagaagctgtccaagaaagcatttgatatgattgtgtatttactatttgaatgagttatttttagtcatgataatttataagctgatctcttgctgtggatatttcttttttgtatttcttgcatccctcacatttttttataggcaaatagcgaatatatattaaggacatctaagaaaaaagcacaacaacgtacacacagtgtatatgtttgatgcccaccaaaggcatgcttaaaaaggagacacaaaaaacaatctccctctccttactttaagctaagccaatctgcaaagttaatcattgacaaagagtggtcgcctatgtacactctaatccattcctaaaaagtacccatgaaataattttctaatttgactgttctgaatcttccaaagacctcctgtttttttctttccataacgtacaaaacaagcataaggaggctttccaatatcttttccttcttttcccaaaaaaatccatgccaatagatttcctcttacagtggactgcatcacccaagctactccaaaaaacagagaagtcaattagccataggatactatctttaggacaatggagaagcaaatagccaactgattcttcctcatttttgcacatgttgcattgattaggcattgtccatgccctccttttaagttgatcaagagttaaggtctgaccctaggttgcttccatgcaaagaatctcaccttcacaagtacctatggattccaaaaaatgctagaggggaaaggttcacttctttcttgtattgatcacatgttattctcctttacttgatcataagtgttagagttcgaatgtgaaataattggagcttggtttgttctactagaagaaacaagtcaaatgatatcttgttcgataggcatccaactcaaatgatatttgattatatacctatatcttcaataagcagtcaacagtttcaattattgcaatttggggctgaaaataaacttggaaaaaaacgaattgatttgtgaaggagttggcaatggagttgggttatagggtggatagtttccctcttcttacttaggtctgccattgggtgcccctttcaaattagcattagtataggacagggtgaaagagaggttttgcaaagcattgtcaatgtgaaaaatacaatatatctctaaaagggggaagactcattttgatttgaagcatattatctaatatgcctatttactacatgtcctaattttcctttcatagaaaggtaagattaagactagaaaagctgcaaagagatttcctctgtgggggtaggacattggagaaaaagtctcatcttgtaagacgggacattgtgtgcatggataggaggaatgcaggtttgggcattagaagtctttcatctcttaataaaactctcctgcgcaagtagagttggagatttgtttctaaaggggaagtcttttggaaataggtcatagaggggaagtatgggaaggaagaagggggtaggaagtcttgcttagtgagagtcaaatatgggctttgagtttggaaagctattaggaagagtgggacctccttaatagtaaggttgcttttgaagtgatttgatagtagaagggtgaagttctaggagaacatttggtgcaaggaggaacccttaagggtgtcatttcctatcttgtatgctctagtttctctaaaaaattcttggttggcagatatatgggatgagataggagcggggggttattagaatctgcatttttctagacactcgaatgattgggactttgggagctactaagacttctctctcaaggttgcaagacaagtcattgaggaaggaaaatttcaattggatgatttaggagtcaaagaatgatgtttttttagtgaaatccctatactctctcttggagctagggagttcaatcaccttccctttaggcgcaatttggaattcttgggtctcaaggaaagtgagttctttttacttaggaagccacttgtggaaaagtcttggcattagatcaggttcatagatgaggatggctgctgacgaacaaatgctatccatgtaaagtcgaagtagaatcaatcaatcatattcttcttcattgcaccgtgtctagggttctatgacaattgttgttctccttgtttggtgtagtttaggtgcttccttccacaatcgaagaaactcttttaggttctatgagaatcaatcaatcaatcggatggctgctgacgaacaaatgctatctatgtaaagtcaaagtagaatcaatcaatcatattcttcttcattgcactgtgtctagggttctatgacaattgttgttctccttgtttggtgtagtttaggtgcttccttccacaatcggataaacacttttaggttgccatgctcttttgttggaagaaaatggaagcatttggaaacgaggagcagtttgaaaataagttgaaatggttgtttctaagtagtttgttagcttgggttgggatgtatataaaagaaggttcaatgctttttattggttttgtagactaggaaggatcatgttgagagatagagagagagagagggaggggttttttgtttctctttggtgaatttgcaacttagtgcccactatatgtagctcatatactctggtatacatatttcctttttatatatgcacgcacacatatttctttgcttgtaaaaaaaagtacatatttctttgcttataaaaaaaaggcatatatttctttgcttataaaaataaaaagttcgtgcaaagagagagaggggtgacacaataatgaatgggagtttggagaggtgggtgcttgttttatgaggttgcaagggtaaatgattagaagggatgtagaggacacatcatggtttggcaagaatcaaagagcgacatttttacacttaaatccttgtacccccttgggtccagatgaaggttgagttctttttgcttaggaagcttcatggggaaaatttttactctagatcagctctaaatgagggattggaggttgctgagtagatgttatttgtataaaggagaggaagacacagtggatcatatcctccttcattgttccaaagtggtcatgctatgacagtttttttttcagtgggtgatgccctcagttaaaggtgttcttctcaactggcatggatcgttgtatggaagaatggaaggaaattgtggagagtagctccttggtatttatttgagagcttattgaaggagaaaaattggagagcttttgagaactccaagaaggcagatcaagcaattaaataatcttttatacctacaaaaaaaataaaaataaataaaaagcaattaaataatcttttatgtacatgttcctggaatgggttaagatgcatataggagatagcaccttatctttgattttattgtttagctgagctatgagaaaggtgagggagtcttttttttttgtgttcccctctgcttttcaggcctttggttccttgtatacactcatgcatacttttgtgcacccctttgataggcacttttaatgcatctgtgattagctatcaaaaaagaaaaaaaggaataaaaacagcacatatgtatattagtcacaatataaagtactaggtgtgatagtgtgggacatgaaaacttgaatttcattttctttattttgtttttgaatatctatccacttactcggacacttaaaaatttattcagttattatagaactggctaaactggtctgttcatctgggctgactaattttactggtttttcttattttgtggggtttgtggggtctgttcatcaggctagatggtacatagtttcttgattcttttaatacattttgaatttaaaaaataatccattttcctaatgtgaaacatatctgaaaataaaggtggaggtattttaaccatgagtggtcaaatttatttggtttttttttttttccttttttttatcagatatccaaaggcaattgagattt

SEQ ID NO: 12366 - DNA, 5294 bp, Vitis vinifera
  Intron number 2 from transcript GSVIVT01032740001 (locus G SVIVG01032740001) derived from phytozome v7.0 (chr-ID chr1 3; pos 1141516 to 1146809 reverse strand)
cggcatcttccgccgccgcggctgccgctccggccgttgccgctcgggccgttgccgctcgcgtatgagatagatctaatttgatctgatctatacattgctacgaggctatttttggtagaagaaggttttcttttatttcggttcaatgcaatttttaggtttttcctctcttacgtagattggatctggaaatctgaaaatttagatgacctgatctagtatgctgtgattggtatgtaattttgtttctgatggatttggtcaaccaacattctgtatacaatatgttgatgggtcatcattgatcaatggaggaagatgaatcattataatctgtttccgtttgggttgattttagttttggttttaatctttctcattattccttacactttttaatagagttcttgatggccatgccttaataatctccatttaattgtactcaacttgctgtcattatgtgttttctgtttttgctcttttagaattatgctgaaatttcattgctcaataatgtggagatctgttagtgtaattccagcttgatttgcaaagctgtggccggttatcatggctgtattgttgaagagatttacttgtgggtctttgtctaattgcctattcgtgttcatgattattagttcaaaatgtgagcctgattccaatgtgtgtgtttggatattcatctagtagcctattccaatggatactgatagggctgtttggaaggtagtcaatcatgaccgggatgcaattgcccattgaatgacaatttggtaggggaacttggaagtgaggattgttcgaaggtgctttaggttttaggatgtttcctttagaactgaaagataatatttgtgtcatcagtgttagtttaggaaaggcccatggaagggttatcaaaagggatgtggggatgatgttttctaacttataagttcatccctttgcggttttggcatgtcatgctaagttagggcggggaagatagtaagctactgaagttttcgaaggtttgaggccttttagtatagtctttctgtccttggatactggaggcacctgtttcccagttaatgtaagttggtattggctaggctcatatgtccagacgactttttgggtgagaatcttgaatttggatcatctcatgtgtcgctgcacatgcaaaggatcgaggaatagtgaatctccccgactcattacccttttgcttgggaatcgtggtaattagtctgctatgccttccagatatctcacccggcacctttgttgaaatagaagttctaaggagaagggctgggaaagctactctttcttttctaatttttttggggttgtggactcctcaatctctagaaccatagaagtttttgccccctgtatttgcagtcttggtttggggggggggggtgtttgttagaaggccatctttggtggtgttcatcagcagagtggatttgagccagtgtctaattcgtcttaccccttgtgcctatttttattttcctccactctcttgtttagtttcattaggtgctactgctagtatatgcttcctccgtacatggggttgttctgcatcttctgctgcttgttatacttatcttcttataataagaagattgggtcaaggatatccttgtctttgagtgcttgtgtacaaagcatatcagcaccacccattgtatcccattatctgagatatggaagaataagaaccaagatatatcatgtttgaaatgtggtggtgtctttaataaaggcaggatatcagtgttgatcattccattgttttcctaaaacatgtttggtgggtttatctaacaaatgtaaagatgcagctttgtttaaagaggacgagttgatggggttctgtgcccctatacatctgaaccgatagcatctgggcatgagactttccagcccgagctaagaggtacttggccggtacttagtgtgcgcctatacatgattatatctctatatctagtggctaacacctgaaaaagtgacatagtttaccctagatttgaattggtattaggtagctgtttcatattgttctaacttctagccaatgtttcatcattctagggaaagagaggcttttgtaattgtatctggcttccttaggtcatatctaaatctagaggaagggtatacaaatgagggccatgccaataggcccagagctgcctctagcttgcttatggcctccctttttgatccctaatgaattgatagtgaattatgagattttgctaatttttttaccttatagaagaagccactggtatggaaaatggaattgcttcaatgactgcaaattcctccaatatcgtttaacaaatgttgtgagaagatatggagacgacaatttttccatatgaataggtttgattgttttgttcttggaagtgtgtgtgagaacatggcaaaaaggcagcttccttgggttggagagaagctttctaattggcaatgtggaactagaaaattatggtctgtctgtagtaaaaaacagtcttatgatatttagaacaaaaaatagattctcatatttaaaaacacattggataaattttgaattgaaaacagtgtttcagaatttgtaatgaaaatagggtaatttttcagaataaatatgaggctttaaaaaaaaaaaataggagaaataactagaacccatgaataatattttggggaaagtagcgaggccaccttgtctctatgaaaaatactgttctttagaattaagctctgaaatagaattttactccttgaaacagcatacatctattttaagaattatttcaaacaaacccccttgttctctcatacctaccttctcttttcctacatttaagaaattaaacgagaacaggggatgaaagggaagcgaatggcgattctcttttcctatatttaagatattaagggttactttaaaaatattagaaactctttctaaaatcattctcaagactattttaaaaatattaaaaacgttttttaaaattatttttaaatatattttaaaaatatgtttgatagtgattttaaaaaatatttttaacatctttaatatatgaaagataaaaattttcaagtggtaaaaagataacagactcccgacgataaaagagaattgattcgcaacaaaatactaccaaacacacttaaaagagaattgattggcagggtgtttgattgattcatattcatattcaaaattttacaaatagtttcatcaatcccttgtacaggctgaatgatggaacttttaacgacctctttcggagggatagctttcaccattaatactgccatatgctgtacgttccacatattctttctgcccaaaatattttcttggttgtggaaaaaaaaaaattaagttctctttcaatggtaaaacttaccgatggaattgataaaagtaatggttttttaatttcaaaataattatgaaattagtgtttgtttataaccagggtttgtaattttagttttatgaatcattaaaatcatgatcataagttttgattttatatatgttcttaaaatcataatccccaactataattttgaaaaaaaagaaagatgtggaggctaatatgagatgaaaacaaatactagaatatttacatttaaattttgtattttttttattttaaaaaaaaacattatatctgtggcaaacaaaacggtgtcatcaaagcattataaaagttggatgatgggacatgcaacaaacctttttagcttctatacctttcacctttaatagtcatagtcatcccacactctcccacctagtatttcgttttccttacaaggatttcaagatactttcaagagttttgaggaaaagtaatatattcgaaaaaaaaaaaaattccaaacaatggatcccttattaaaataatttttaaattagtcaatttattcatgaaacctataaattttgttttatttatttttattataaaactataattacgattttaatattttaggccaagctctcagacagtgttaagtcttgaggacctccttgggtattgaatttacggcaaatctagttctcctgatcagcaagccagttccttgcaaacaagctatgggattacagagctgagagtgagttaggtatttgttttggtagtagaaaactagagccggaaagatcaaaggcgaatcataataattaattatgattttaagtttatattttaaaattataatcactaattatgattttaggattaaagttctcactataattttgatcgttaacataaaatcaaaatcgtaattatcaactacgatttcaattttatgtggatattcccctaattgagaacaactagtttagagattattatgagaagatatctattttttggattttttttaaataaattatttttactctaaactctactttcgaattgttaaaaatattttaaaagtttttttttctaatatctcatttaataaaaaaaatttaaatgattaaaaatttaatcatttaaagatttttaaactctgtttggcttcatttctaaaaatagaaaataatagtgaatataatgatttttaaaaaattgattaaaaagattaaggtattaaatttttttaattatcttaaattttaaaattttggaaaatagtttttaaggatataaagtaggttaaaggtagtttttactttttaatggatgattttatttaatgaaaatacaccagggtaaaacaggaaatgcatgatggagatttagtgattgaagtcgatggaggtgttgctaggggcaggaaagtaatttcggagtccacttaatccataagtgagaagatagccgttggaggcgcggcttcgccacaattacacttcggaaaaccaggtggtcaaattgaagtaaaacctagaaaactagccgttaaggctttatttttatttatttttatttatttctttttaatttttgtgtaagaagaagggtctctgaagctaatgatacctgacattatgtctccggttttatttttcccaatacaaagattctctttctctctctcacagatcttcacgtgaaatctcccaggagccccatctcttcttctcagttctcactacaaaacgctctctcaactcacttcagctcctgtttcatccctcattctctttccatcttcccactattacaatacaaagaatctccctttcttctttttcttcttcttcttcttctggtttcttttcacagctggtatagttctta

SEQ ID NO: 12367 - DNA, 6919 bp, Vitis vinifera
  Intron number 19 from transcript GSVIVT01013566001 (locus GSVIVG01013566001) derived from phytozome v7.0 (chr-ID chr 5; pos 20970927 to 20977845 reverse strand)
tctggcgattcaaagaagtagctgagaagaaaaaggtaatctccttgaagttttcaatattctgaagtctacgattttattgtatctaaaaatgcaacaaacttgcttggcttgaatctgaaggtcttgcatactcaaattgttaagtagcttgaattaatgatggtagcacaaagtttttcttatatatatatatacagagtgagagggtgagagaagaaaagaaagtaaaaaatgctcatatactggtattattttccttttgccattctaaatcaccggtaaactgtcatttagtagagggtagcgtgcaaaaccaaaaatagtgaaaagagttgttatctggaccagtttcttgtagttctgttttcctagcaattctgatcattttttttttctaaactttttatcgtcttgaaatttattcacattcattgctactccccaattgaactgggtcagttttctatttatttattttcagatcttactgcatcaaagttgtcaattatgctttgttaggtgttttgatttttccataagaagagaacgtttgttactggattaatatgatgttttagtttctggttataactgctaggaaaataaactattaaagatttgaaatataaaaccatttttttcttctataagtgaacaatgtaagttcaactaaacatgtttccagagaggaaagcattaaaatctaagtatgaaaatgcaaaaacagaagaaggtggggaatcaatcaaaggtcaagtagaccaaaataggaccagtaacatgcctaaatgactggaatggtttgaattttggtctgttgaagattgaagctgcattggttttgttctagttttgctctaacgtaaaacgtgttggccaaaacaggatgcaagggaaccaaattgattatttgagagccaattgccaattgccttctgatataagagcagagtgaagttctgaaaggataggtggatggggaggagcctttgtatgtctcctttccatctctatttgctttggcctcatctaaggagacttggttggcagatttgtgggagtagacatttttcttgatgggtaaaaaagcaatatattagaacaagacgctccagaaaagtgccctagagcacatagaaaatatacaaaggatgcctaagagtgccacaaaaaagggaattacaaaaaaacaacaccccctcaaactaaacccaaccaatccacaaaatcaacaatggaataaaggccaaaaactaaatacagcttagcccactcccaaaggttacataggaaagaaaatttaatcccttggattagacgcccctcattttcaaacgccttgcttttttttccttccacactatccagaaaaggcaaaagggagcagcctgccacacctttttcctcttcttacccacaaaaggtgttattagaatccttgcttcactagaaatcttaatgatagggagcttgataatgtacaacatttttttgctggactgcaagatatgttagtgaatcgagaggaggaggctagggtagggtggatggttttgaggaaagaaacattcttaatgaagtctctatatgttgtcttgagccaaggaacttaattgcctttccagcaagggtacatctagaatccataggctctctcttaggcaaatttctttgtgtgggaagtttgctggggaaaagttttgactcttgaccaactccaaaaaagagggtggacattggttaatagatgccttctttgtaaagtggatgaggagtcaattgattttatcctccttcaccaccgcatggcaagggttcttttgcttttgttttctttgtttgaggtttctttggttcaagtggtcatagtgacgaagactttgctagggtggtatggatttgttgtttgaaaaaaaacagaaggtggtatggagagttgctcctttgtgcattttttagactttgtggaaagagagaaatgaaaggtcattttagaatgaggagttgtctatccagagtctgaatagcatgttccttattatcttatcttcttgtcaaattgtacataggtggcaactcaatgtctctaatcgattttgttgagtggttggattcttaataggggagggaggtgttttttgtaatccaaccttggtttctccttggctcttttttgttgttagctttggtgcgctttgtatacttatggtgtactttgttgtctttttgctattattaatgaatttcatcatcccaaaaaaaaaagaaaaaaaaaagatggaaattccttaaccatgattgattttatccattggttggggttttcatgaaggggattttgttttctctactccttcccttctgtctcttggcatcctttgtatacattctatgtactttgatatgctttttgttaagtgttattatcatagttgtgaaaggcgcgcctaggctccgggcggcacgacgccacccttcggcgcctcgcctgaagggatgtgacgccccttcacgaaggcgccacttaggtgcgcaaggcgcaacgtggtcacctccggctaggtacgccctcctcattctccttctccttcttcttcttcttctcttcaatcaccgcgtcgtgttgcaaagggctaagagctgagaagccttaatttttttttggatttttgggaccaaaacgacgtcgttttggccctgttttcctttccaaacccttttttttttggtatttttgaactcgacaccactcccaaatcgtgccctagcctcaacaatgcggtggagaagtgaagaagacgaagaagaggaggaaaaatagtcacgtacctttccgggacctcggtatttttctcttttcttcacttttctatatttttttccattgttgtctcataactctcattgacatttttttttaattataaatattgtattttgacatgaaaattttactaaataaaaataaataaacaaaaaacattcatgtgcatattttttgttaatatgatatgcatatttttttttttcaatttttttcttaatttaattataattttttattgtagtataaaattataaatttaaatattgtatattgtagtataaatataaatattgtattttgacatgaaaattttactaaataaaaataaacaaacaaaaaatactcatgtgcatattttttgttaatatgatatgcatattttctttttcaaatttttttcttaatttaattataattattttattgtagtatagataatttttttgcgagatggataatgagagtgaaactcaagtggactctagtgcaagtggaagaagagatcccaaatggaagtatgctcgtttggttaatgaaaaagatttaaacaccgtcatatgcaattttttgtgataaagtaaccaaaggaggcatatatagacacaaacaacatcttgttggtggatatagaaatgctaaaaaatgtagaaaatgtctggaacatgttagagaagaaatggaagagtatatgagttccaagaaaaaaaaaaaaaaaaagcaaatgaatttggggagtgaagatgttaatgaagatttgtttggtttggaagatgaagattttggtgaggaaattaatagtagaatgaatgtcaccaacatttctagtgaaggtagtaaccgaggaggaagtggtggtaggatgttttcttaaaaaaaaccaagacaacaaagtcttatggatcattttttcactcctaatgcagagatggttgttcaaaatcaaaggagtaggaagatgaattaaactaccatcaatgatgcctacaaaaaggaagcaagagaaagagcttgtatgcttatcacaaggtggatgtatgaggttgctattccatttaatgcagtcacatatccgagtttccaaccaatgattgaggctattagccaatatggtgtgggtatgaagggaccaactcttcatgaggtaagagttactaaccttaagaaagaattgtctctcacaaaagatttgatgaaagatcatatggtggaatggggaaaaaatggatgctcaattatgttggatggatggaccgataggaaaaagagaactttggtgaactttttggttaattgttcaaagggaactatgttcatgcaatctattgatgcttcttcaatgattaagataggagaaaagatgtttgagttacttgacaaatgggtagagcaagtcagtgaggagaatgttattcaagttataacaggtaatcacttaagttatgtgatgacaagtaataaatactatttcttgaatttttatttacttttaaaatttgaattatttatctcgagaacttgtgtaaatttattatctacaatgtcacataggaaggttgttagaattaaagtgcccgcatttgtattggacaccatgtgctgcacattgccttgacttgatgttggaagatattggaaagctaccaaacatcaagaagacattgaagagggctatatcactaaatgggaatatttataatcgcttagggctactcaacatgatgaggcggtttactagacaacgggaattgcttaggcctgctaagactcggtttgcaactgctttcatcacattattgcgattgcatgaacaaaaaaataacttgaggaagatgtttacaagctcagattggtcagatagtaaatgggcaaaagagcagaagggggaaactatagccaacatagttctaatgccttcatttgggaacactattgtgttttgcttaaaggtttcgggtcccctagttcgtgtgcttcgtttggttgatggtggaaaaaaaactcctatgggatacatctatgaggccatgaatagacctaaggatacaattgtgagaagttttaatggaaatgaagaaaagtacaaagaaatcttcaacatcattgataagaggtgggagattcagcttcatcggcctttgcatgcagcagggtactttttgaacctaaaattcttctatgataaaccagaaatagagcgtgatgcagagattatgagtgatttgtataaatgcatcttaaggctaacaagagaccctgctaagcaagaaaaagttatggctgaagtgaatttgtacacaactgcctaaggactattcgggaatgagtcagctgttaggacaaggaagactagagcactagattagttatttagttttctttatttaaatgattggattgtatttttgctaaaataggtgaattgtttcactaaaatgttaatatctatactacagttgaatggtgggctgcatatggagcttcaactccaaatttccaaatgtttgcaatgaaaatcctcaacttaacatgtagtgcatcaggttgtgaacggaattggagcatctttgaaaatgtaagtgaccaaaataattacaagtaatagtctaatagagtattgaatgtaacttaaaagttaaaactttaaaatatatttatgagcttatgaatttttgcaagttcatagtaagaggagaaatagattagatcatcaacgcttgaatgatttggtatacattaagtataattgagccttgaagagaagatacaatgaacgtaacaccattgacccaatttctttgaaagatatagatgatagtaatgaatggttgataggaagaatggaagatgaggattcttatggaggtgcacaagatgattttgtatttgatgatgataatttgacatggggtgatgttgctagagctactggagctgaggaggccaggtttgatactagagctagagctagagcaagctcaagcataataccaccaacgagggggataacttcaagttctaaaactttgccttctcattcactaatagatgaagataaacatggagacatggttgattcagtagatgaagaagatggggaaggatacaaatgtgatgatggaaatgatgatgatgatgattttgttgatttagaggaggagtgatgattgcttgtggaaaaatttgttatttaagtgttttttaatgatgtttttgaattgtggacaaatttcatgttttggtttggaaactttggattgggatatgtattaggctattagcaatatggatttggatttgtttttatgcttggagttatttatttttatgctttttgttgattaaattgaagttttggatgatatttgatgatttatgtgtttaggacaaataaatgattgttaaatttgattatattatataaaaatatatatgtaaattagggtgcgcctcacttcactaaagcccgcgccttaggtgcgccttgcgcctcaagctccgggactactttgcaccttgagccttttaaaactatggttattattatattttttatttgcctatcaaaaaactaaaaaaaaataaaatattggcggtattgaaaatgatgataattccaataatgtttagttcatgaatggttttagttgaacacattgtttatgtgcataatgtaccttggtgtggggccttcttttttaggtacaatatggtaggcgtcaggtcatagtttatcttggaaaggagagaatttctttccagtcttttaaggtccaaattaaatatttattagagagagtgctcatatgatctgtccttgtcaagttgcatgctttttcctgggtatatcagggttttggtgcctaggtttttattctctatgtaaagcttgtctgtataagtatagtatttgtgaatttgttgcacatggacaaattcatcctcttaaatttcattccttagaagctgtttcttttgggtcaaacatacataagcagaaacgatctttgtgtgcatgttttttatttcttttattaagatgactttttgttgattctctattttaattaatggtttcccagaatctgactg

SEQ ID NO: 12368 - DNA, 5817 bp, Vitis vinifera
  Intron number 10 from transcript GSVIVT01012031001 (locus GSVIVG01012031001) derived from phytozome v7.0 (chr-ID chr 1; pos 2018203 to 2024019 reverse strand)
ttgcagtcctctcttcgtcatagtggaacattgaggtaaaaattttggtccttataatattctttaggggtatttcttctggagtgaatattaagcttacattacaaaggtatatttattagctatattacttctgtagttaagtataaagagctttcatcattattcttggcttcacaaaaggaaagagaaagggttgatttgcaagttggacattgaaaaagcctatgatagcttaaactgggagtttttgatgaaggtgcttcggaagatgggatttgggtcgcgttggatggattggatgtggtggtgtatttctacggctaaattttccatcttaatcaacggggtgcctgctggtttctttccaaattctaaggggttgaggcaaggagatcccctttctccgtatctcttcatcttgggtatggaagttcttagcaccctctttagacgggctggtgaggggggcttcctttccggctgtaggcttcgggggtgtggagatgaacgtttcgcatcttctctttgctgacgatacaatcattttctatagagcggaaagagagcaagtatccaatctaagctggatcttggcatggtttgaggcggcttcgggcctcagaattaatcttgctaagagtgccctaattcctgtggggcaggtggacgagttggaggagatggcggctgagctaggatgcagagtgggagctttgcccactgtctatttggggctgcccctaggagcccatcataaatcttctttttcatgggatggggtggaagagagaatgagaagaagattagcccaatggaaaagacaatacacctcaaagggggggagaattactcttatcaaaagcactttggccagcatacccatttactttctatccattatacgcatccctaaatctgttataaaaaggattgagaaaatccaaagagatttcctttgggggggaggaaggttggagaggaaagctcacttaattaagtggaaggtggtctgtagccctaaggaggagggaggattaggcatccgaaaaataaatgtattgaacaaagccttactgggcaaatgggtgtggagatacgcctatgagaaagagaacctatggaaaagggtaataggggtgaaatatggtcaagaggggtgtgggtggaggactaaggacgtttgtgggccttatggagtgggattgtggaaggagatcatgaaggaagctgattggtgctgggagagtattgtgtttaaggtaggcaaggggaccagaattttgttttggacggataagtggtgcggtaatgaggcgctttctcaaattttccctcaattgtataccttggcgggtcataggaatgccaaagtaagtgaagtgtgggactatagcctgggtcaaggaggttggaatctcagattggctagagatttcaattattgggagttggaacagataggaaatatgctgaatctgctgaaggatttcaggacttcgactgaggaggatgctgtgagatggaaaagggaaagtaatggtgttttcggttctaagggtgcttacaaaatgctggtggggtcctcagcctatgtcttcccgaacagacgcatttggatggataaggtgccaacaaaagtatctttttttgcttgggaagcttcgtgggggaagatcctcaccttggataagcttcaaagaagggggtggcaactccctaaccggtgttttttgtgtggatgtgaagaggaaaatgcgaatcacattatgttacattgtacagtggttaagactctttgggagatcgctctcgccatttttggagtctaatgggtgttcccagaatcagttttagaagtgttacttagttggaggggttcttttgtggggaaaaaaaagaaaagacacctggaattccattccgttgtgcattttttggacggtttggaaggaaaggaataggttagcttttaggggggggtctttagatatacagaaattcaagaatttttttgtatgtaatttgtggagttgggctagggtgtacattggtgaggatacctattctcctttaggctttttggagtggcttgcggccacttgagggtgggtgaggttttccctatcttttgttcagttcttctttttgggcgtttgtgtataccccctgtatacatgcggctttttagccttttctaatatattctgatgtttatctatcaaaaaattattcttggcttcacaagttgatccaaattatttaaaaccatgttttccattatttattagaattttattaatttggtcattgttttcatccatctgttcctgtttggtacttgtccatgcaaaatcttctacctactgtagtgctccttgctgctgctatttttttacctgtgtgtttgtgtccttttttcttagtaaattatttatttatttatttattttttaacttttccttcttgcttctttaccttttggcactacttaagtttccatatatgggtctggattgttttgtcttcccccctctatggtcttgcctgtagcaattcgtttgtctcaacaacttcatttgaattatgctcattgtttaattatttatttttcaaaaataatttttaatttttttaaaatttacacaccacacacacatatataggaagctatattcttttttatcttacctatcaaatatatatatatatatatatatatatatatatatatatatatatatatatatatatatatataggaagtgcagcaaatgcttgagaaattttgggtctgaccctcacatgacctttttgctacctggtccaatgtcccaaaataactttatgcaacctgttgtgggtcatggtaaggtgatgttatactgggtggatgatttctaaggatggttgcttctctatagaatctttttgcaaatccttgtattcaggagccttttaaccattttcagccaagatgtggagttcaagcattctttgtaacattggtatttttgtttgggaggcgtgtgtgagaggattttttcaagagaccagcttatggcttttgttaataggtattgtctgtctatgtgaacaagagaggatttggcaaatcatattcttatccattaaatgttgctgtgcagtttgtggttttcattatcatcccttatttggggtgtattgttttgtctctctgttggagcatgctttatgtggttggcatggcactttttttggtgaaggatgccagatgatatgttagcaaaacggggagcaaagcagttgattccttttgtagggtattttctaccccctaagttcttgatttcataattgtaagcatttttagatgtgcacctctaatgacatctaaagcagatagttttttcccacttttgaccacaactatgttgtccttatgcttggaggaaggatttttcatccttctttgtatttaatccatgaaaagaaagtttttgtttttaattaaaagaagggtggtagaggatatggctgatgccccttttgagtttgtttggtatgttaggaaagagtgaaatcatagaattttttagggcatgaagcgttttaaattggatttgaaagtttgtctttgcttggcggagggcttgtttagtatgttaggaaagagtgaaatcagagaatttttttagggcttcaagcattttggattgacttttaaagattctctttgcttggtgaaagggccattttgggggtttattactcatctttattaggttttatagatagcatggataggatttgagacatgttttgtgcttgtttcttagtttcctttgataaacacccttgtatacttcgtgtacttgggttgttcccgctttttgttaggcaatcttgatgtcttattttaaaagtccacatggaccaatcattggatgccatgtgttcaacttatggcatgtgagctccatgcacaacaaatacaaagtgtcacatgtttaattcaactctccattaacacccggtgcaccttgctttagggcttcgatgcatgaataagttcatttttcttctcatttctccatatgccacaattgtgtgtaatatttagatgtgggtgcctgctgcaaatgaagggaggaaaaatcattccacaatatacaaaatttggttaaatgaagaaacagagagaacttctccaacaggaagctaccatctctagaatgcaaggaaggccgtttaggacttactcttgaagtagcatatgctagcagcaaggaatgaggcattggaaagactatataaggacaactatacatcataagaataccatataaacttgtataaggtaaaactgtctctacactccatgaggatgtaaaaaattccctacataaggaacccaatgcttcatagttgttaaaggcgcttaggccaaaggctcaaccactccatagctatagggcctcacctaaaaaggcttacgccttctcggaaaggcgcatcttatttatttatttatttatttattttttattcttgaaattcctaaatgaatattaaaactttgtatattttcgttgttatttttttgttgggtgattcttttaaatgactaaaatcttgaattggttgttttgattgaattttggatcatattttataaaattgacatgcactataggttgcatttcatttcgataaagcacgctccttgctctttaatccttacaagatttttgtgccttaagtgccccttgtgccttttaagactatgtgatgcttggctcctctctttgctaatcagtgatattattagctgaacagctgaggctgcaaatgacatctagaatttgatggagccacccatcatacctcaaggccctctctttgagttttacaccctaagatatcaaagtagcaagctttctaaaagggctaaaatccctacttcgatggttaaactctttcctgttagtttggcaaaagctcactactggaccattatggtctttgatcatccctctggtcatcaagtaggttgggttacctaaagtgcatccatcgaaatttaacttgaatgaactcactgcattagctactgcaatagtataagttgaattgcactgtgacagggcaagggttttatggcatcttctgttctctctgtttggtatgtcgtgggtgctcccctctttggttagagagacgtctttaggatggcaaagttctttcgtgggtagaaaaaggaaaaaggcatgacagactgcttccttatgcttattttggacaatttagaaggaaagaaacagtagggtgtttgaaaataaggggcagtcggtttaagggcttaaatcttctttcctttgtaatctgtggatgtggtgtaagttgtatctagttcctctttccactgtagtctttgtggactggttgggttcgggtttgggggggttgtatttttgttgtcctctgttttttgtggtgttttcaggcgttctttgtatacttcgtgtactttgggatgctcttttgccgttcctctttataaaattatactttttacccataaaaaaagtagtataagttgaactgcattctgactggctggacatgacccattattttctgcttccatgttttggaagttgttacatttctttattgtattatttttgttaacatcaaattgttctgatgtgatagtgtgttatatttcttgtgtatttcccctattcaggatcagcagtgtttgatctttccttttgtgatctttatttcatgataatctaattctgtttcttgcagaaatatacaggaag

SEQ ID NO: 12369 - DNA, 3660 bp, Vitis vinifera
  Intron number 2 from transcript GSVIVT01008388001 (locus G SVIVG01008388001) derived from phytozome v7.0 (chr-ID chr1 7; pos 2567778 to 2571437 reverse strand)
ggagaaatttgaaagggatatcagggatacaacgagtgccattccaaaagtctgacaggttagtgagggggaatgttcccatactcgaagctgtagagagccataatggaatctggagtttcctccttgggatcatgttgcagcggtcaatctcagtgagattaatctacaaagatttgcttcgaaattgcgagaatagatcctgaaaaccgtactaatctcagtaccgcttttattgatcaaggagaaaattgcagcaagcatttggggactaatacttgcagccagaaagtatctattgctcatagagggcagactgaagagtgctcagaaataacagtatcaagagtggagcaaaggtataactaggcctcatttgatcatggctccaaaggctgtgttgccaaattggtaaacaaattctcaacatgggctcctagcattgcggccgtcccaactgacaatgtctttgatatcaaataccccctaaaatccccattcagtgactgcttccaatcatcagtgaagtgaagagctgtgactagatttgctccagaaattctcctcatcagggcagtgaatcatttttcataccaatcaatcctactcggtgacctattatgtatcaatttgagtttatggatccaacagaggcacggatggggaaagctaattacaccagggttcttacttctcaagagctacccaagtttgttgaaactcttcatcccttaccggaagtcaccaaaactttgaacaatagagagccccagaaagtgccaagagagagagcagaatgtatctggggattcaacaccagcaagacagtctcaaatctcattcacaagctccactccatcatagcaaccttgctacaagcatcttctcccctacttgcttctttgcttgggaatttactatattaatttgaatttttgaatcgtttcacaactaagtattcccagccttgaaaaatccatctttagagccccattagtcactaaaacccagattttaataaattcactgccattttcctccaggcatgcattttcactattttcttcaattttcaaccattttcttgattttctcgattttcaataagcatgaataaattttatgattccaaataatggaattcataaaaccaactcatgcgaaagtaattagggccttggtgggagcccgacattcatgatactctcttcaaaactgtttgcttgatatattgattttttattctacttgataatattcatgaatttgctttatattcattgttgagatattcttgcttcccatagagatgtggatgctcgctaatcaggtacgccctttctaccccacaaccctaaaattctatgaatgtgtatgttctcatgagacatgaccatgtttgatgccataattgattgctttgatgcttgtttgatcatctttgatgaaaacacataccgtgtgccatatttttttaattaatctcttatgtttcatgatagcgcttgagaagccgttcaggtacgcactttgaccctctcttgtggttggttttcttgttaggcatgcaatatttgaaatcacctagcctacttaggtacctataattaactgattaatggtcacacttcccttaattttgttaatagagacctttttagggcttagaggggtgctacctcttagaggtaccttcccaataagtaacctgatccccgaacctagactcaggtttctcaaagacatgctttttccaaaactatggagtcactttttagggtttttctttcttgttttattttccctttaaaataaaaataaaataggtggcgactccaactttttcaaaaaatcaaattttcacaaataaataaaaagcgagtctcgccgatcgagtggggacgcacgtgaaaaatgcgggtccacagaagttctttcagatgtattaatggatttcttgttggattggaatatggatagaaaagtttctacagtcactgtggataattactcaagtaatgacggaatgatcaatatcttggtggagaaattatgtttgagcgattcactcttattgaatggaaaaattttccacatgcgatgtgcggcacatgtgttgaacttaattgttaaggaaggttggatgtcattgaagtagaaattgaaaaaattcgtgagaatgttgcatattggtcagcaaccccatcaagaatggaaaagtttgaagatgcagctcgccaattgcgtattccatgcaataagaagttaagtcttgattgtaagatacgatggaattccacatacttgatgttatcaattgctataacatataaagatgtgttcccacgtttgaagcaacgtgaaaaatactacatggttgtgccatcagaggaagaatggaatatggcaaaggaaatatgtggaagattgaaattgttttacaacataacagagttgttctcaggacgaaattatcccactacaaatactttcttcatcaaagtgtgcgaaatcaaagaggcattgtatgattggttgatatgctcaaatgatgttgtgaaaacgatggcatcaagtatgttgcaaaagtttgacaagtattggagtgggtgtcatattgtgatggcaatagcagctatatttgacccaagatacaagataaagattttagagttttactttccactaatgtatgggtctgaagcttcaaatgagatagaaaaaatccgtggaatgtgttatgagttgctttctgagtatcaatcaaagtctaatttggggcaaaaaacttcatcctatggtacttcatcaggttcaactcttttggagttaaactatgatgaacaagatcctctttcaaagtttgacttatttgttcataataccattggagaaagtcatatgaagtcggagttagattattacttagaagagtctattctgccaaggaattcaaattttgatgttttaagttggtggaagacaaatggtataaagtatccgactttgcagatgattgttcgcgatatctatgctattccggtatctatagttgcatctgagttagcctttagcacgggtggtagggtggtatcaaaacatcgcagtaggcttcatccagatactttggaggccttaatgtgtgctcaaagttggttatggaaggaaaaagaaggtaaccgatttacataattatcaattttatgaattgttttttattaaaatatttagtaaagttttctaatattttttttggtgttttttttttactaggtgattcatcaattcatgactcacaaccctaactcacaatgatggatgaaaatgatgatttacttgtgctttagattttttacttaagatgatgttagagacattttttctttcttttttgctaacaatttctttgtaatgtcttttttttattttttttcaatgttgttaagcttatggatatattttaattttggatattatattttggcatgtcttctatgatgttaattactatggttgtaactaagaaccacattctttacgatcaagttcaagacttgcaaggtagagtccttgtaccttgaattaatcaagaagtttggtattatattggaaaaaaattggctgctagagttgtcactcataggccataagacctttttt

SEQ ID NO: 12370 - DNA, 12551 bp, Vitis vinifera
  Intron number 1 from transcript GSVIVT01016019001 (locus G SVIVG01016019001) derived from phytozome v7.0 (chr-ID chr9 ; pos 17414780 to 17427330)
tcgaagtttaaactttggcaacaaccattttttaggtatgtatcttctttcttttctcccaagaaagcataaaaagttttgtaattaccaacccactcttgcattgtagttcttggagcctattgattacatgtatagatgatcacttagagcttgtttaatcacaatttgaagaagcatttctaatatttctattacttaaagataactcttttgataaaaaaaaatttaaatgctaaaaaagttaaaaaatacttcctaaaattactatcaaacgaatcttaatcccaaaatttgaaccctaatagtaatactacatcatactttgccatttttagtcaatttaaaatatctctttttcccatgcattaagtgtccctggagtgctaggacctaaaacacttgctatatttgacagcacttcattagttttaagctagactagaagttaaaaatatttttaaaaagttagaaatgttcctagtactcctcaacaaaaataaatatttgaagatgcataaagaaaaaaaaaaagcacttgagtatgaaataaaatgttgagatactaaaactacctttctctttatttctctccctaaaactattatttctctctctattacacttccatctttatggcaaatttgtatgcgacaaaattaggaaatgatttttcttaaaaaaattattatcttgacaagtttatttgtatcaatgtaaatttttatttcaaggttttcttaaattttgcttggtcattgaagtccctatggtgtattattaagaaaataaagacaacaactttgtattatgaccaagcaaaatttaagaaaaccttcacaaccgaagacaatacttcattgaagtccacaccttccttttgtgtgtagcccttggccaccaagtgcgctttgaacctagcatcctctacttctggaattccttcctttctttttttaagacccatttgcaaccaacaatcttttgatttttaggtttctcaactagttgtcaagtgtggttcttttgacaaccctacattcaaaagcatgcatcgttctttatctaaaagagtttttttcatccattttgtaacaccattttgctgtggagtatgcctaactatgcggtgtctcacaataccttcattattaaaaaactcattgaactctttcccacagaattccatgtcattgtcaattcttaagccattgatttgttttccaatctgcttctcgatcatggcttttcattgcttgaacttcccgaagacatcattcttatgtttaaagatatatacccaaacctttctagagtaatcatcaataaaggtcaacatatatctctcaccaccatgtgatataacctgagaagggccctaaagatccgaatggatataatctaatatacctttagttctatgaacatctacattgaatttcaccctacattgtttcccaaaacacacaatgctcacaaaaatccaattctcccaatttttgtccatcaagtaaaccttgtttcctcaaaattgtcaaccctgtctcattcatatgcttaagccacatatgccataatctagtaatctttataattgattttgaggttgaaactgcagctgcacctataaccgctctaccctacaatgtataaagatcattagttttatttcctttcatcacaacaagagcattctttgaaatcctcaaaactacacctctagctttatatgtgcattaattggagtcaagtgtccttaaagaaaccaaatttttcttcaattttggaacatgccttacattagttaatgtccttacaatgccatcatgcatcttaattcgaattatgcttatcccaacaaccttacagactaaattgtttcccatgagaaccttcccactgtctatgagttggtaggtactgaatcagtccctattaggagacatatgatagaagcaccctaaataaagaatccactcatcacctgagttattaacagtaattgaaagaacatctatagtatctagattttcttttacaactactgtatcaccagaattgaaagttttatttttttttcttttcctttacgatctggataattttttacatagtgcccttctttcttatgcttgaaacatttgttgtttcctttggacttcaatttagattgaccttttctgccattatttttctttcttgttctcactctagccaccaaaccttcacatgagtcttcttctctactctcaaacacccttttcttcaactcccttaagttcaaggctgctctaacatcttctatggagagagtttctctaccatacatcatgatatctacgaagtgctcataagaattcgataaggaacacatcaaaattatggcttagtcttcatcatcaattctaacatcaatttttctcaaattcatgatagttttattaaactcatcaaggtggtctttaataggcgtaccttgtttcatctggagagtaaacaactgcttctttaaatataagcaatttgtaaaagtcttggtcatatacagactttctagcttcaactataacttggtagtcgtacccttttttacaacctcacaaagtcattactcaaacacaatagaatagcactatgtgctttatccataagttcatccttctcttcatcaaacatcgttgttggtagagcctatctaccctgttgataaggcatgcatcttaataagccacaaactgaaatcatttcttccatcaaacttttcaacctgaaactttgtcgttattccaggtctaataacctaagctctgatattaatttgttatgtaaaaccacgataaagaataataataaggagaaaagaataaaaaaacgaaaacaaaacacaactatttacgtggttcaactttaagtctacatccacaagtgaagatgaagaagaactttcactattgtgaaaaggagattagaactcttgaagttctcaaattccaaacccccaatttatacctaaaaagagacttagtattttgatcaaaatctcttcctatattttttttttctaattacaaaggaaaattccatataggaaactaagtgtataattgttaaagatgtcttttcctaaaaaaagatctcataataggatattccctataataataggaaactcacatgtaagaatatcttttattagaacgctatcaataactttccagttgactcaaaaatacaatttgagacactttccaacactattaatagtgtagatcacctcaattgaaaaaatctttcttgatcctcaagtagttaatagtagtttaacacctaaaattctaacaatccaacatttcttaataaaatatttcatcttcttacctctttgcattataatggaataaaaaccatgttagttgctatcaaggattaaataaaaaaacaaaacattattacaaatataattaaagctaagaaacaaaataaagaataaaataaaaataaaatattgtttcttgctacaaatttataattttctcaatatctatttgtttaattttttttttgtacttttatatatatatatatatatatatttaactctttgattgattttttttaaaaggttaaagaaaatatgaaagttaacataactaaagtaaaacttcataaataacttagattgtgaagttttcaagtgcaactctattgaatttcatagaaagagtgtgtgaatttttaatgcaaaagctaaaaggagccaatcccacattggaaaggaattaaaacctttttgtctttatatagtttccagcattcttagcctcttgggcttatggagaggaaagtgggaaccttgtgtgcaagtgacccaatttgagaaaccttaaagtgggtcgtcgtccctatgcatcacacataaacctttaccccttcaaagtggaattgaatgcctagtaaaggtgagaatgggttagagacggtgaaaatgggttagaggcatttgaatgagtaagctagaatgtgttgaattaattatttgatttatttatttatttattttggccatggaggtggcatttgaatgtggagaaagctagactatattaaattaattatttgatttaatttttatttttttggtcatggagcttttatagtagagcctcgttggacattgcctataaatagatcccttccctcaaagtctctcattcatgattgtactctctcactgctttgtcgctcttcctattgccttatccacctttgccactctattgtcgttccttgcatgaattcttgttcactattgccactacaacatccaagtttgttgttgttgcaatacttgaatcaagtgttgtattcaacctttttgcattcaacattcttccatccctactgcatccacttatgttggagcctcactgctactacatctgagtctattgcaaccattcaagactgttttacagctttactattgctgcatagggctataaccttcctcttgttgcattcgactctataacccttcaccccccatacatcttctagaggttctttaatgactcaattattgctcgagatttgcttaccttgtccaaggtgtgcaccttacataaggttttgactatagaatcttggaggtgggatgttggtttcctactagactgatctcaaaggagggtgtatttattttaaggatagtgcttgtcatgccttaatatctctaatccaataagtgctctaattctattcttttaattttcttatttgttctgttttagggttggttagatttgtatatgtttcaagtatattcttgacttaataatcttaaagtagaccatttagtaaagacttccctagttcacacttgtcatggtacctttaagattgattccttcaatggaacattcttcaatagatggttggaaagggttttctttgcaattgatgttggaaacttgacacatgttttgaccgatccaaaaacccaaggacaactctaagaattttcctaactagaaaacgagaaacaaaaaagctagatatgctatccttagcacactctcgaatgagttgtttaacgtttactatcaatatagggtggctaaggacatttgagatgtcatgaataaagaacatgttttggaagtataggaactgattcgttcccaattggtgtatcatgagtttggtcctcaaatgggagtaatcaacaaaatttataacctatatcaccatgcactaggatagctttagctaatatagcatagtggctctaggatcgttcactgggaagggttttcaacttacaactgataccaattcaaagttgaattggtgctttttcatttcaaggttagcttaagaagaaaacataaactttggttgaaaaatgatttgctttaagctaactaaaaagaaagtaatgggaattacttatgaagaaaagcattccttggagttttaggttcactggggaggctcctcatgcaaaaacaaagctctggtcacttgaatcttttcctcgcattagagaattaacatatagttaattctctaaccggtgttgtacagatgttcccccttaatagatttcagcactaattccatctcactgatgcaacttgcaatggctcgtgcctctcacctagcattcgccattcaaggtgatcattaaccttggacttcccttctcaagctcgcaagagataactaatggatgtctccttagagtccaaaagcttaccaagtgttggtaattctagaaaatcctaccttcaagtcacctcccaaaggctcgctagacataaactagtgcatctccatgaacggagatcacttgccttaccaagtgttagcctaggtgaattgaaggtgttttaagttaactaaaaacatagaaatcattaatgggtcacactttctcttcattaacagctaaaacaagaaaactaccaattcttgcattcgggaccttactcggctaccttagctccaaggaactaaaagcctagccactcattctctgaggaaacatcctcagagcttgtttggctagtaagaaaaaatataaatacaatcaaaacgagtaggtaaggcaaagcaaagctctgcattttacttcctttcaaaactatacaaaagttgtgtctaagaacaagctccccgacatcttactgtaatgtaaattacaaacaatatatatgaggctatttaccctttgttcttgcttaataactaaggaatcctatgataggtggattacaaggagagaatggggatttagacatcaaatatctaaagcaaaaaatctaaaaatctcggtcgcaaatatcgggaagcactcaggagaattttgcaggcatgcaagatggctgtgaaatttcgcaacctgaaggacaccatttcgcagccaaaggctgatttcgcagcccgggaaattggccttcaacttggtgtgatcggcttccaatggctctaactccttcatttcaactccgaatcacacaccgtttgaagtgttggattgctgacttcccgatcttcaaaacgacttatagtatgaataatttgagctccaggaagtgctccaaaagtggctgacagtttctgttctcttgaatgcttcatgttagatttctctctttgctttccctccttgcattcatgatttgcttatagcaaaggactataaagctttaaagctttggttcttcatattactgagcttcccattgctttgccatggattccaaagaactctcctcaatctcggattgctttggtgatcaaattactatcaaaaatactaaaacttacacaatttgattagaaatgattgcaaaggtctttaatatgttaattgagttaaaaggtaataactactactcaaaagtgtttaaaagagttaattacaagctatcaaatagcactttttgagtactaattaggaactcataaatatgccatagggaattaaaaaaaaaaatccaaatggtcgaggatagagatgaatgatctcaaatccattactaacatttgctaatcaatgactatgctaatgaggacataaatctgcaggaaccttttttggttgattatttaattgaaactcttccaaatccttagaaagattataaaaataacataaagcacaagaagaaaacaaatatacctagacgatgttaaaatccatattcaaattaaagaacaaaacaaaaatatgggcaaggctgagaagtacaatgaattgtctttaaggctaatacattagaaacaaaacttaagcctaaaaataatatctctaaaaagcaaaactctaagaccaagcctaatacaacaaataaggtccagaacctaactatcaaatagaggagtaattgctttgtctatgtcaatcttgaacatcatagaaagagatttgagaagtccaacctaagagcaaacctaatagagatagaggtgattgttgctatagtctcctctaaggtgtgcatggtcactagcggtgaaggactgggtgatagactttaggctactaggcacatctatggcaataaggagagaaatgagtgtttatggatgattctagccagaatgtccctagtgagtggcaaaggaaaagttttcctcaagctgaccttaggcaaagtgcttaccctatgtgatgtccttcacatgtcgaatagttgttgcaacttggtgttagtatctttgcttggaaagataggagtgaggattgctaaaatcgttttaattgagaatgatgtatttgttgtgaagggctattgtaattaggttctctttatgctggatgttatgatattattagtaataataatgcatcttcttttgcttacttagttgattcttattatttttggaatggtagactaagacatgtgaactttgcttatataaggaaaatggttgatctaagtttaattcttagtttaaccatggaaaatgtgaatcatgtgtggaacctagaatcacaagaaatcttgaaaatttgtagaaaagaggattaagaaccattaagtttaattcatggtaacttaagatatctaaaaagtacaattacaagaggtggtgaaaaattctacataactttcataaacaactactcaaggtacataagatatgtttgttaagaaacaaagatgaagcaagagacattttcatcaaatacaaaaatgaagtagaaaatcaactaagaaaataaagagaaagagaattgataagggaggatagtataagtccaacccctttaactctttttgtgaagatcataggattattcatgagaatactccttcttactcccttaaatccaatagagtggtaaagagaaaaagtagaactctaaaggacatgatgaacacaatgttggtaagttcaagagtccccttgaacttgtgggaaactatcttctttgcttttcatattcaaaatagaatacctaacaagaaaactattaaaacatggaaggattatgtagctaacatagcatacttgaaagtgtaggagtgttttgctaaagtgctttttcctaaacctaagaaagggaaactaggttataaaacctttgatgtagtattcatagggtttgttaagaatagggtaacatacaggtttttggatattaaacttaaaaacaaccttgtagaagtgaacaacataatagaaacaaagaatgttgatttgtttgaaaatatatctcctatgaaacccaataggaaagaacaaatttagagaataattagagatgaatctaatattttgaaattgaactaagaagaagtaaaatagataggaaagaaacaaaccttggagatgatatctacaccttcctaatagacgaagaccttagacctacaaagaaactataagttctctagatgcaccattctaggaggctcttaataatgaaattgaatctatcatatataatcatacatgggagatagtggatttacctcctagtgcaaagactataggttgtaaatggatctttaaaagaaagttaaatccaaatcggtccatagagaagtataaggcatgtttagttgtcaaagggtttaaacaaaggaagggtgtagattgctttgacacttttgcccatgtgaccaaaatatcctctattagagtgttaatcactccagcttccattcataacctagtaataaactggatgaatgccaagaatacattcttcaatggggaatcaaaaaaggaaattcatatggaccaacctaagggttatgtggttccaagaaaagagtataaggtaagaaggctatttaaatcactatatgggttaaaacaatgacccaaatagtggcataaaaaatttgatcatgtattaataactaatgtattttccattaatgatgctaataaatgtatttaaatttgaggataacacatgtgttgtgttatttacttgtatgttgatgacatgctaatttttggaacaaacatagaggttatttatgagaccaaaaaattagtaggatctaagttttacatgaaagaccttggagtggaagaggtaattataggactcaagaacactatgttgagaagatcttaaggaagtttgaacgctttgattataaactagtgttagctagcttcttatgatctcaactcatagttgcaaaaaaaatgaagaacattgtgttacctaaattgaatatgctcgaatcattgggagcctaatgtatttaacgaatttcaccaaatgtgacattgcctatgtagtagggagattaagccgctacacctagagtcccaatcaaggccactaggtcgctatttgtagagtactgaagtaattgagagacacacttgactatgtgctataatggattcccaaatgtccttaaatgatttagtgacattaaagggatctctaattaaaatgaaatgagattcactagtagatatgtttttacccttggaagaggtgcaattttttagaagtttgtcaataaaaattgcatttctcggtctattatgaaggttgagtttatatcctaagagaagacaagctttaaggttaagtagcttagaaatcttttagcagatatccctttatggatgagactaacaccatctgtgtctatgcattatgatagccaagctataatatttaaggctaagagttaaatatttaatgggaaagacaaccatatacacttaagacacaatactatgagataactacttgagataaggattatatctctaaaatttgtgaagtcatagttgaatttggctgatactttgaccaattcagtaaataggaaattagtggaagaaatattgagggggatgaggcttattcccaatatagaaatcaagagtgatggtaacccaacctactagaatggagatcccatgaataggtccatatgggtacatccctaaggtgtagatagagtgtattttacaatgattgaggatgagtctttacttcttacaaatgatttatttaattataggacacacttgatagattcacctatatgcatgagagtgcaagtggggttgcttcctatgagaacttaggtaggattctctagagctctcatggatatctaagtagggtaaatgacttatttgtgctaacttgttatgtacaacttgtagttaagaaaccaatgtagataataggttccttgaattacatacaaaaacactttcatagaaatatatttttcactaggtttctataactcaaaacctatttttcctaaagttggtgttcatagcctatgggcaccagtactaatgcattggattctagttttcctatagtaatttccttcttcactcatgctttattggggattataggaagagtgtgtgtgtgtgtgtgaatgttgagtgcaaaagctataagatggcaatcccatattggaaatgaattgaaacctttttgtctttatataatttcccacttctttagcctcttgggcttgtgtaaagggaagttggagccttgcacgcccatggaaaccaagcccattccaatgggatttcaggtgacccaattcaggaaaccttaatgcatgtcatgtgtgtgcattgcgcctagagggacttcctatgtacgcacatgattcaaacaacttttttgaaaggggaaatttaaattattttcattttcttgacttggtcactctcaattggagagtcatgggccaagtctttctagttagaggtaagcacgaattagaggcatttgaataagtcaaaaccatgttaaattaattatttgatttaatttttatttttattttatcttggagcttaatttataggagaatcctattggacttcgcttataaatagatccctcccctcaaagtctttcattcatgactatgctctctaagctctgcctactaccttgtccacctctgtcctcctttgttgtcattccctgtagcaacatctgaagcattcttccatccctgtttgacattgccactgcaacatcaagtctgctgctgttgtagtacccaaattgagtgctgcatttgaccctgctgcttctgtcattcttctatccctactgcatccgcttgtactgtaccctaactgctgttgcatccgagcctgttgtagccatttgagattgtgttgtagctagccttactgttgttgcatcatgttgcatcagactttacaacccttcatcccttatatcttctaaaggttctttaaagtcaacctctctattgcttgagttgtacttaccttgttaaaggagtgcgcctcagacaatgttttagttgctgaatcctagaggtacaacaccagtactctgctgcacttagattgattttagaggagggcaactttaatttaaggatagtgttttattatgcttcaaccactttaatacaagaggtactctaattccatcattttaagtcttcttttttgctttgttttgggctcaatcaactttgtataagtttcaagtcttaaatggtgtttgttttttttttttttaaacttaattctaaatagaacttaaaactaaataatatttagtagtgttatacattaaattgtttgtttgttttaatgttttatttctagtcttaaaaagtaaagaaaaaccaatatattacttttagtatttttaataaaagaacttaagaaaaagtaataagtcaacaaaaagtagaaaacgaatgatgtaaaatttggatgtgaattgttttcaacaaaaagttaaaaaaaaaaatgatccataataaaaaaaagaaaaaaagaaagtgacccaacaaattttactagtaacttggatgcttaaaattgaaagtataataaaaatgcttgatatccataatcaaacacggagtgagcaaagagaaaaagtgatgcagcacaaagagagccaaaggaaacttggcatgtctttcaaacttgcaaattcactaacattagatgttcttgatcatttgcacgtttattttcatgtagatttccaaggcacactcaaattgagcaagttgcaa

SEQ ID NO: 12371 - DNA, 13930 bp, Vitis vinifera
  Intron number 3 from transcript GSVIVT01001680001 (locus G SVIVG01001680001) derived from phytozome v7.0 (chr-ID chr1 8; pos 14210955 to 14224884)
ctttggcgtgcccaagcggcctcgatcagactgtttcccctctcctcattttttttttttttttcagtttaatttgtatcacttgaacctagatgatatttgattggaattatgaacttcatgcaattgatttaggtttgtttgttttgatttgtttttgtgtttattacattgcactctgtttgtgattttgaatctactgtgttgaattgggattttcaattgaatgttggacttgatgcggtttcaagtatggggaatttgaaaatgttactgttgtttttgaattgtcgttgattttgagtctttggatttaactcttagtatgttggtgtgtagagcaatcaaacagtggagttggaattgggccctccaagttcaaccgctagcctgtaatggcgggaattgatatttatgatgggtgtggagttcctatgtttggttttgagtctatgtgttggacttattgaactcgatgtgtttggttggtacaaatttcatatttgtggacaaaaattgttctgttaacatgtcagctttagaaaattttaaaattttatcttatttgttgaattggtcttgggcaatgtatgtatgtgacctcaacctaactcaaccagcgtatggattttcaaaattattggttggcaagatgaacaatgttttccttttcaatatatatatatatatcggtacagataatctgttaaaatgtaagcccatactgatcttaccataactcatgttattgttgcctttcttattagtcacattaacacagaccatatattttatttttgcttaggttggttgttggttgtaggttgtcgttgcacactgccgcaacatttcaagtctgaccatagtgagctagaattgttggttattcaatctttttgaatcattgattttattgcaaacaccaaaagggttattgatcaattatttggtcatgaaataattgatcatgatatatatataccaaaagggttgttgatcaattatctggtcatgaagtaattgatcatgatatatatataccaaaagggttattgatcaattatctggtcatgaagtaattgatcatgatatatatatatatatatatatttaaatcatcaaataatttagtgtccatttagatacacttcttgtttttgtttttaaaaatagaaagtagtaataacttatatataaaatgtagaaactcttatacaaaaagtataggtttaccgtttaccttatgtccttaacaattactttaacaaattttaaaattgttaagagttttcgtattttatatagaacttgctaccattttctatttttacgtatagcaaataggaagtatatctaaatggacacttaattatctgattatataaagtgtttttgaatttttgtggaataagaaggaatcagctttattgaggttccaaatcatggatttatgtacacatctctgaacttgaaatttggtgccttttgtaatttaagataggaaagatggcaatgattgtgagcctatgactacaaagttcagctcagctactatctatataagtatagatatgccaataatgtattacttgatttggtaaatataatgatctaatgtttcatttgcatcccagaaatttctgttttatgaaataatttcatttttatatggattagggaaaaaatgaatcaggtttgttggaaatcttcaagagtctttataaaccaagtgttagaaaaattaggctaatccaatctaaggtaatcaccctaaaggggggggggggggtgtgaatagggtgattgtctctttttgaaaatttaaaagtatgaatgcaagagacaattatatgaaaatatataataaaacaatataaaaacaattacatataaagtaaaagtgtagggaagagagaaaataaacacaagatttttataatggtttggcgcaacccggcctacatccactctcctctagcttcaatcctaagcttgaggttccactaatttaaggctttcaaaccaaaccttcaagcaatacaattggatcatggttccaattcactcttttgggcttttggctccaagcaccctttacaatccttaagagataccccactcttgaacaacctctcaagtaataccccacacttgagaatccctaagtgatacctcacacttagattcttcctttcaaagatatacaaataatttaacaaaatcctagtacaaaactttaggctcaaacgatacaagaaaactaggattgtatggtgtactaatgatatgcaacttttagaacaatggtgcactcaaaagcactttcccaatgttcaaatatattcaagaaaggttttggaagattaagctcatgaaataatgaagattggagcctttttatagaggaaaaatgtcaaactagctattaggggttcaactggtcgagctgaggatcaaccagttgactagtcgttagcatttaatgtttgatatgtgaccgttggacttcgaccgccccttgactggacctcaaccaattgaggtgggggtcaaccggttcaaccggttgagtcgtttttgactcaacaaccaactttttaaatttaaaacctcttaaacaagtttggaaaacatttaacgtaaggttttagttaaaaatatgaaatcatccaattttaaaggatttaaaaatgataaaactcttggatgattttggtgcataagtaaagaatgtaatgcataaagaacttagtacattaacaaccttacaaggagattttatgaaacttgggtcttgaaaaatacttatctttgaggtcttcttcttcttcatgatttttctttagcttgatttgtctttataattgccactttggaaattgtcttgcctaattacacttgaaatataatcattagttttaaaccttgttttgttatcatcaaaatcgagattaaccaaaccttggtttcacactaagatatggccattttggatcatattgccacagtggtttgcgtttgaacatagttttaaaaggtgtgctttaagtgcaccttgagctgtgcctaggctcaaggcgcaaccactccctagttatagctcttcctagccaagacatgcaccttattgaagaggcgtgccttattgacttttattcttcttttttaaacacttttatttttgaaaattttaattgtatattgaaatttatataatttcattactttttttattgaatgtttcttttaaatgtttcgaatcttaaattttttattgattgcattagattttgaatcatattttataaaattgatatgcatcctatgttgcatttcacttcactcaagtgcacgccctgtgctgcaccctacgctgaagctataggagacttttgcgccttaggcgcaccttgcaccttttaaaacaatgcgtttgaaatacgactcctgcctgcccgtctcaacattgttttcaatttatcttggagatggttgtcctatgaaaattgaatatctcatttagatttactgtgtttgagaggagtccattgactttttggtagtaaattgattctctgtggtttcattagcagtaaaaaacttttatgaattcaaaatgtggctattttcattattttttccttttggtgtctatcgcatgtgcagacaactcttcttaatgtattatgtgccctttattagttttcattaagttttcttttcaaagagtgtcttgctttgggcttgcttttcttttttgttttttttttttcaattcttttctactaaaagccaaagatgcacattatattgcctctcttttgatgcatgatatcagtcatcattacttttgtggggcaattatctagttaaatttctcactaaaagagattgactcacaaaagcaataaaatagcacttcccaggacagctctattggcaggtgcccctgcttggaaagagcaggcccaaggttcgagttcccacagaaaatagatttttttttttttttttttttgggtggacatgtccagtgtgggtgctgtttttctcatttttctattagatccctgatactattggaaaatataaaggtaataaacagttggttaatataggaaagtttattgaatttacatttcaattttgtatgacttccctgatttaataggaatgcattcaggaaataaacagtttcggtataggagagtgtatttaatttacatctattgtcagtatgaagcactaaaagagattaattcacgaaagaatctatagaatagcgctcccccagacagctcaactggctgatgcttctgcttgggagtgagagctccaaagtttgagttcccctcaggaaatagatttttattttatttttattttttttatgtggggatatccagactccagaatggttgctttttccctcatttttatattggggtctttgatattattggaacagataagaaataaacagttgagtaatgtagattttattgaattttcattccaaatttctatgacatgtccctgatattattggaatgcattcgggaaataaacagtttggtataggagagtatattaaaaaatatagagtctggatgaagcactaaatgtccagatggcttgattgtttagtttttccatttatttatttagttgaagctatatttggtttctgagaggagtcaacaatttagtacgctataaagtttggcataatgaataattaatatattagaacaaaaatcgctttaattatggttggcattattacaccaaacaatcaagtttaaaatctcaaatttttgattggtattattattttaactagatgaagattgacaattgacaatccactagaagaattgaattcaatccctttatgagtattccattctctctctcatttatcatagaactcaaaccaactaaaattgcacttgaactttctattttacaatgttatcaaaactggaccggttattaaattagaaaagttaccggtttaggattcaatgatcggactggcagttaaaccactatctaaccgacggttatctgcggtctaacctgtgacgtaataaatatataatttatagattattaaaattaaaaataaaattaaaaattttaaaatatatataattaaattttttaataatatttcctttttatatttgatacgttaaattaaatggtaatgataaatataaatgtactaatataataaattttattaaataaaatatgtataatttttaactatgaaaacttatttaagatgaaaagaaaactttaatatttaattttatctcttatctattttattattttaaacttttaaaaattattatattattttcatacttatcattgtaaaaataattgtgaatgtaaatatttatatttgttaaatagccctaaatgatacaaatttgaaaaaaaacatcaataatttatatattttattttattgaaacatttaataagttcgttgcataaaccagtggtacaatcactgtgttttttatccaagattcatggttcaagcccccaacatgcaaagaagtttcttttccttataatattataagcaatcccacatcggaagtctacaaactatatttcctgtacaaataccttgtttatcgttgaagttacaaacatattgttgggctggagctgggacagacattcggttggctcttgctggaaggcacattgggccagaaatgaggggggtccattatgattttggtcaaattaaccttgactggttcaagggaaaccggatggttagtccggttcaatggccgtactgttgttttggatggtttaacaccggtccaatgaaggagtagttcaatccagttaactggattggagaggccgccagttgacattcctaccggttgaaccggatggtttggttcggtatttaaaacattactattttatgcctatcagcactcttttggaactttttaccataattgttgaaggactacttttgtatcatcaatccaactattgtttcaatcatatttgttaaagggggctcttaggcatgcaaaggcccaaggtgcaatgactccctagctagggtgcagtgcctgccaaggtgcgacctttgttgaagaggcaccctttgtctattttcttttttctttttttcccttcaaacttactgcaaaacaacatcgttttggctccctttttttgaactgaattggggaggacaaaacaatgttgttttgctctctttttcgggaaatattgaaggcaaatatgtttatgcttgtgacattgtgttgacagatgtcaatgctaaatagtgttatattcttctccaatttgttagtttattagcacctaaaccctcttgaacatccattttggtttttgttttctgttttcttatgcttctattcttaaattttttactctattgaaattttgcattgttgcattactttttgttggatgcttcttttaaatgtttgaaatcttgatttttttgttacttggattggattttggatcatatttggtgacacacacacacacacacacacacacacacaagtttaaacaatattttaaaattgcacatatgcccttggttgttatgcagcttatgcctcactttgctcatgtgcacacattaggttgcaacttgtgcctaggccccgagggatctttgcacctcaagaatgccttatgcctatcagaactatggtttcgactagttgaagttgattgtcaattgaatatttgtacatggtgtccaaacctcttgattaagttttttaccccacttattacctttgagttaacttgaaaccattcaaaatgcatttataacctcaaatccatgtttgatagaccttggttgcaaatgtttgaaccctaattttcgtacttattaagctgtaatcataaaaaaaaaaaaaagtcctgaaactataactcggtttcttgttatacatctaaagcatggtctaaccattaaaatttcttttaaagccttaaatttgcatttggtaaaccctccttccaaatgtttttgtgtttggaaaagattcaaagggatttctatggggaggaggaactcttgataaaaagcctcatgtcgtgaattggtcaaaagtcaatatgtcaaagaagaaaggagaggtggacacttgtgatctctttgttttgaacaaggctctcctaagcaagtgttgttagaggtttgtgttagaagtctttttggaagcaagttattatagggaggtttgtgaaagaaggaggatgttactctatggaggtgaggaaggggtatggtgtagggccgtggaaggcaacaaggatagggtgaggagtgttcaaaactaagatttcgttatgttgtgggcaatggaaggaaggtaaagttttggaaggacacatgatgtggggtaacttctttgagggtctcttttcccgtagttgtatgctataattaccttataggatgcttgagtagttgatgtttgagagtaggctaacaaaggttggcattggactttgtgtttctcaaaacatttacacgagcgggagttggatggtgttgcaattttctttctaagattgtgaggaaaatcaataagaagggatgctaaagatggggcaatgtggatagccttgaagagaggcaacttttcattcaagtcctattatttggtttggatcatgggagaccaaaatattttttggtggatgttatctagaattcatgggttccaacaaaactaagctttttttcttgggaaccagtttgaattacggataatttaaagaatggaggatgaattttggtgaatagatgtttttgaacacagaatagaaggaaaaataatttatgattagttttttttttttaaattgaaaaattacagataaataaataaataggctaagtttgcagctttaccatgtaactgactaccaagaaactaggaactaacaagcacaaggatctaattagcagaatacctagatatcttaacttgattagtaatcagtttggatttattggaaacaaataacagaaaaacatagcaacaaactcttaataatttaacactccccctcaagttggagcatagatattcaccatgcctaacttgctaacaagagtttcaaacctaggcctggatagactctaggttaagacatcagctatctgttgttttgtggtaatgaacgacatgcaaataactttacttccaagtttttctttgataaaatgcctatcaatttcaacatacttcatacgatcatgttgaacatgattgtttataatgctgattgcagtcttgttatcacaaaagagcttcataggaggttctcaactcaactttggtttatcaaaaattctcttcagccataaaatctcacttactccactagccatagccctaaactcggcctctacactactatgagctataacgctttgtttcttgctcctacatgtaataagattccccaaaagggaagtacaataacccaatgtggatcttctatctgtaactgaaccagcccgatcaacatctgtgaaaacttccacatttctttggttaccttttttgaacaaaagtcctcttcctggtgtacttttcaggtatcttataatttggtacacaacttcaaagtgttcttcatatggtgaatgcataaattggctcacaacactaactgcaaatccgacgtcaggtcttgtgtggaaaagataaattagcttccctactagttgttgataccttcctacttcaacaaacactccctcggtttgttctccaagtttgtgattttgctccaattggagtatcacttggcttgcacctgctcattcctgtttcttcaagtggatctaaaacatactttctttgtgaaataaagatcccgttttttagatctagcaaattccattcccaagaaataccgtaaagaccccaaatctttaatttcaaactctgctgcaaggctcctctttaatctagctatctcaatgtcattagttccagtaagaatgatgtcatccacatagatgatcaaaatagctgtcttactatctccaaaatgctttatgaacaaggtatgatcagtttgctagtgactgtggctttgattcttaacagaccttgtaaatcttttgaaccgtgccctaggagattgctttaggccatatagtgacttctttaatttgctcactttggttccaaagctgtcctcaaatcctagtggagcatccataaagacctcttcttctaattcatcattaaggaatacattcttgacatttaactaatgtaggggccattctaagtttacaaccaatgctgtatttagctttgcaattggagcaaaggtctcctgataatcaatcaatcccataagtttgtgtaaaacctttcgcgaccaacctaactttataacattcgaaggacccatttataccccaccggtgtctttccttcaagcaagtttactttttcccatgtgccatttttcttaagagccttcatctccttgaagacaacctctctcgattcaggaacatttagagcttcctgtatatttttagcttcatccatactagatagttgtgagataaaacctaaaaatatacaggaagctctaaaatatgaacctaaaaatatacaataaggttactgatttttataggacacatgattggaaattggatgcttagtgcatgttctagtagcttttctttgagcaatgggaatattgatagagaaatcagtttttggtttagaagtgacacaaatcaagagaagtacctggacttgaagtttctatagcattcggatctggtctcagattggactcttagccttgtaaagttgtaatagcatctttcccttgagttagatttttccttgagtagacaatttcacatccgccttttttcctagttcctggatcattttctgttctagtatggactccacttatgggcattgaaataggctgtcttacttctaaatgtaaagcatccaagtccattaaaacattcggattcactataaaaatcagaatttaacaattttgattttttatcagaaaccatgccagaagtttaaaattctgatttttttattagaaaccatgtcattcccctccaattcaagtaatgagccttcataaccattctcccaatgaagaggagtattaaaaaaattgagcttagaaaaatgtgacttccatagtaacaatactttttttatttttggattaaaacaatggtaccctttttgtgttggagaatatccaacaaaaacacatttcaatgcttgtgggtctaacttactacaatgatgattatgcacatgtacaaaagcaacacaattgaaaattttaagaggtaaagcagaaattagacatgacattggaaaaccctctttaaacattttattggtgtattaaaattcaaagttcttgagggcattttgttgatcaaataaatggcaataagaatagcttctccccacaagtatttaggtattttaattgtaaacattaaaaatctagctacttctaaaatatgtttatttttcttttccgccactctattttgctgtgaagtatcaaaacaagagctttgatgtataatctcattttccaagaaatatgtgcccaatattttgttgaaatactcctttccattgtcacttctaaacgcctgtattttttcttgaaactgagtttctaccgtagtgtaaaactttttaaaaatttgttcaacatctgaattttctttgggcaaataaacccaacaaacacatgtataattatcagttagcattaagaaccatttttttttctagaaattgttggaactttatatcgacccaaacatcactatgaacaagagtaaagggtttagaagacttgtaaggttgcataaggaatgatgcacgataatgttttggaatttgacaaatatcacaatgaaaacaagaggaatttttatttttgaataaatttggaaacaaatacttcaaatattgaaagttagggtggcctaacctaaaatgccataacattatttcattgctactagattcaaaaaatgatttaagactagttatttgagtcttatgagtttgtccacacaagttacttccatcttcaaagtagcaaagtccatcactttctttagcattgctaatcgtcctacccaagtccatttcctaaaattcatagtgagtaaagaagaaccacattttaagtcacgagtgagcttgctaaccaataatagattacaagaaatatttggaacatgaaggacaagagattttgaagtagctattgatcctttcccaacaattgttgaaagagaaccataagctatcttgattttttgatttcctacatatggactataggaggaaaatgatttaaaacacccgatcatatgatcaattgcgtctgaatctatgatccatggacaactagaagtagcaagtacattaaatgtaacaacttaacagtagttgcctttttgggccaaagaacaagaggaagacacattatttgagaattttgtggattgataaagtgtatatagttaatctattccttactgaaagaagacatctctgcggctcctcccaagccactacactcctcagctacttgaaatgcctttggatcatggtttgtttgactgaatgatctcggttttcagttttgtgttttccatgtaactcccagcatgtttctctagtgtgttgaggcttatggcagtgatcacactagatcttgtcacttcttcaattttgctgtggttgtccaggttgagcagattgattgtttcttgttactagggcaggaacttcaattgtaagctgactattttctcccattatcatctttctttaaccctcttctctccttaatttagaaaacacatcactaagagatggtagtggttttttgccaagaattctacctctaacctcatctaggtctttgtttagtcttgctaaggacacatacactttgtaattctccattctttttatataccttacactatcctttgtgcagtcccatacttcattatagcataggtcaaactcctgctatagtgctttcatctcattataatactctgttacctcttgattttcttgatttgaatggcacaactttgtttttagtttgaaaatctggaatgagttttccaggtctgaatatgtctcttgaatggcttcccagacttcttttgtaatagggagaaccagatatgtcataccaattgctggctccatggaattgacaagccatgcaatcactaacgagttctcagacctccaagtcttcaatgttggatcattgtctgctagttttgttgtcttgcctatcaggtgacctagctttcccttgccatcgatcataagcttgattgactgcgcccattctaggtaatttttaccgttcggtttgtgaacgatcaattgaagagatggattttcaacttcattaagggttacagtagaaactggaggtgtacctgtactagcaacacttgtggatgttgtagtcctttgcccagtcatggctgttctcgctatcacgatttcccaaaaaacaacctatgctctgataccatgaatgtagaataggaggaaaaatagtttttggttagtttttttttcaactagaaaattactgataaataaataaataggctaaatctacagcttaaccatgtaattaaataccaagaatcctggaaccaacaggcacaactttaggacctaaactaacaagcacaactctaggacctaactatcagtatacctagatagctcaacctgattagtaatcagtttggatgtattggaaacaaataacagaaaaacatagcaacaaactcctaataattcaacaattttatatgtaaaggtgaggaggaatctggtgagcacaaaccccttcattgtactaagggaagaattttatggtagtttggtcttctccttgtttggaattgcatatatgctacattcattagttaaaacaacattactaagctggcatggacatttcgctgggaagaagaggaagaaagcttgtaaagttgctcctttgtgtttgtcttggactatttgagaagtgagaaataggagggtttttgataatgctgagttattggatctagagttcaaatcatcttttatgtgtaattttttggagtgggtcaaagggggtttaaaggatggatccatgtctatggttgattttattctctcttcttgttctttgccttgtagtgcacttgtatgtgccgtgtgtactttgtgtgcctttttttcatgccttttaatatgttactttctttcctatatataaaaaaagggttttaagccatactgcttgtattttttaaagtttgtaacttggtttcttttctagctatcaaaaatttgacctgtcattttaagatattacatttataactgctgtgtttattactgtagcctaggtttcgtatctctttcactagtcctatgctgttctctttatttaaatgggaatagaggtatcccaactgtgttttagaccatgttcaatcacactccctattctaaatgcctttccttgctcaactgtgttagacaatatcaataaaaaatttgaagtattgagtttgcttcatatacgcgtctagtgcaagacatattataagaagtgaaactgaatccttcttgctgttgaagacttttggaattcctttcagctattcctgcttggatgactgcatcaccatgctaaataaaatgaaacataagtacaaaatttactcctttattttcgacatttgcagatctcccatattctggattgccttcaggca

SEQ ID NO: 12372 - DNA, 16756 bp, Vitis vinifera
  Intron number 6 from transcript GSVIVT01007708001 (locus G SVIVG01007708001) derived from phytozome v7.0 (chr-ID chr1 7; pos 10133019 to 10149774)
ggtatgacttgaatgatatcttctattctcttgtgctgttgaatttatatgttcactgtttataaacaattctaagatgcgatttccattagaggatggagggtctagtacagatattttggatattctaatattagggagaaatttggcttagatacaccctggttcagaactaaacatggcaatgactgaatgaaaaaatgtggcaagttgaacagggcatgaacagaagtgccctaaaaatttaaggagcaatagctgctgaactggttccacttggtgttgtgcatgggtatctgaataatggccgttctatctaagacactcactgaggctgcccactcatggtagaacatggtggcttttctatctatggtgtcttacatgtgctgtcttactgagaattccttaaaacacaacgtgtcgaggccccatgatagcactcttgggcattcctgttctatctttagatggatgccacatttgctggagttggaagtatgaacctatgatattgtgagtaggaaggaggaaaaaagagggcaatatggaacctttatcttatttgtcctaactttcctgtctatttatattcttgcatctaataaataagattagaataattgttggtaacacaacatattatccccttgaagttggagaatatagtttaaacatgcccaacttggaaaaaaaaaattgttttaaggtaccataagacaacctgtcagaatgtagcacaactgttcattagattgaatgtagagtgtactactatatctccaaagtagcaaatttcaaatgagatagcaacaacctttatatgctttgtgtgcttgttattgtcacaatgcatcaaaacaggagtcagaacaacaataccataccttgaaggggagcctgaacctatgacatctcaaaagctatgtggaccatagcataatactcaacctcaaaacttggatctgttacaatagtttgtttcttgttgcatcgattaacaagatcaaccccacaaatgtgcattaggcagatgtaaatcacctattgactattggtctgatcaacatttttaaggcctattgctataaggaagagagcttatacaagaatcctttctagatgttacaatttaaatgatgtaaaatatgaccaacaacctcaaaattaggctgacgaggagtatgtatatactaagtgaagaatttctgaactcctttattgataatgaatcggtacacaccatacacatatatatacacaaatgactgaataagaaacaatcaatctagcttaattctctcctaaaattaggaaactaaatcataaggaaatatcctaaatgatctctccttttttattcctaaattaaagtcctaactttggcattatttcaacactccccctcaagctggagaatatatatcatataatcccagcttgcaagttaagtcttcgaagttaggcctaggtaaagctttggtgaggatgtctgcggtttggtgcttggtaggaacatagtttaatttgaccgtctcactagtcaccttctctgtgataaagtgtctgtcaatctcaacatgcttggtcctgtcatgatgcacggggttctttgctatgcttatagctgcctgattatcacacatcatcagaattggagatgaactcgtttgtcccagttcactaagaaccctttttatccaaatcccttcacagattccctgtgcaagagctctgtactcagcttctgcactacttctggctacaactgattgcttcttactcctccaggtaacaagatttccccagacaaaagaacaatatccggaagtggaccacctgtcaatgatgtttcctgcccaatccgcatctgagtatacttcagtgtcacggttctctgtctttctgaagaataggcctttccctggtgtcatttttaaatatctaagaatcctgtagactgcttccatgtgttcctcagtggggctgtgcatgaattgacttacagcactcactgcaaagccaatatctggccgagtgtgtgagagataaatcaagcgcccgacaagccgctgatatctccccctgtctaccggtgtactttctttctcgataccaagtttcttctgactatccataggagtatcaattggtttgcatccaagcataccggtctccttaagaagatcgagtatgtattttctttgagagactacgattcctttccttgatctagccacttccataccaaggaaatatttcagatttccaaggtctttaacttcaaactcttctgacaaatacttcttcaaattctgtaactcccccatatcatttccagatagaataatatcatcgacatagactatcaatatggccaatttcccggcatgagatttcttgacaaatagagtatgatcagcctgaccttgcttgtagcccagcttcaggactgcttttgtgaatctatcaaaccaggctcgaggagattgtttaaggccgtacaatgatttttggagtttgcaaacctgattctttgccatactttcttcgaaaccaggtggtatttccatgtagacttcctcttctaggtccccatttagaaacgcattttttatgtccagttgttgcaagcaccaatcttgattgacagccaatgagagaaggatcctgatagtgttcagttttgcaacaggagcaaaagtctcctgatagtctatcccataggattgtgtaaaccctctagctaccaaacgagccttgaatctttcgactgatccatctgctttgtattttatggtgaaaatccacttgcatcccacaggcctcttcccaaccggcaaatctgtgatagtccacgtcccattcttctcaagtgcatcaatctcatcttgtactgccttcttccattctgaaatttttaatgcctcttgtattgtgttgggaacctgagtatcatcaagagaagtagcaaatgctctgtaagatggtgataacccttcatacgtaacataattcccaattggatgatctgtacatctcctaacacccttcctcaatgcaattggcaaagtagaatcatcaatgctgggaattaacacctctccagccctatcctcacctatgttctcttcaggaagacttgaattggagtcaatatattggccacatgttgactgtgatccgtgctctaattcctgtcttttcctcctcctgatgtaaacttgtaagttctcattagcaagttgtggggctataggttgaataggcatgggagactggatggtcacgggagaaggaacatttgtgtgctgggctggctgaactgatggcggcatgggtgtggacaactcagtgggcgcgaattgggaaggatttggtgactctgagtgaaaagaaggtacaccatcaagaaaagactcccaaacttgatgttcattcatgctctccccctgaacatgagatttgggatagaagaagacatgttcaaagaaagagacgtccatggtggtgtaaaatcttttgttggttggagaatagcatttgtaccctttttgggttggagaataccctagaaaaatgcacttatttgctcgaggagcaaatttgctacgattttgaggatacacatgaacgaatgccgtacaaccaaatactttgagtggtaaatcagaagaggcggcatgggtgtgaggaaactgttttaagaaaagttgacgtggggattgaaaggtaagcactctggatggcatacggttaatcaaataggtagctgtgagaatagcttccccccagaaatagtttggaacattagaggaaaacataaggcaccgggcaacctccaagagatgtctattcttgcgttcggccaccccattttgttgtggggtgtcaacgcaagaacttatgtggataatgccatgattttgaagataagtactgagactactagtaaagtattcctttgcattatctgacttgaggacttgtattttggaattgaattgattttgaaccatacgattgaaggtttgaaaaatgtgcccgacctctgacttttctttcataaggaaaacccatgttacccgagtatgatcatcaacgaatgtcacaaaccatcgagtgccagaaatattttttatccgggagggaccccacacatcactatgtactagagagaaaacagtcgaaggtttgtatgggatttgaggatatactgttcgagtatgctttgcaaactgacaaatttcacagtgataagatgctggatttttattgataaataatctgggaaacaattttgcaaggtaaacaaagctaggatgaccaaggcgatagtgtaacattataatctcactatctttattgaccttagaatttgacacagaattgaaagactctgacatactctgagactgtacgcaacttgcttgagagacttggttggagaattggccacatgaaaggaggtagagcccagaacacagttcagcactgccaatcatcttccccgatttcaagtcctgaaaaacacacaagtttggatagaatttagtaacacattggagatcatgagccaatttgctaatggacaaaagattgcaatccaagtttggaacatggaggacagagtcaagatataagtctttagtaagttttatagaacctgtcccggcaatttttgactttgaaccatcagcaatatggacggatgaatgaccattacttggcttgtaattttgaagaatggcagcatctcctgtcatgtgatcagaagcacctgtgtctactatccacggcctcattcctcctcgattagcagtgaaggctacaccggtagtactgccactgccaacttggcttaataatttctgtagcatctccatctgctctttgttgaatggactcggctcgggaacagaggtgctctcagagttggcagccacgtgtgctctgccatctctgtcaaaccgtggctttggtttccaatcagcaggtttgccatgaagtttccagcaagtctccttataatggcctggtttcttacaataatcacaccaaggcctatcccgtttctgacgatctccaccactactattaaatgaccgagccgcaagggcagaggcatccaatgttggggcaggttgctcttttgatcccatcatcactttctttctactttcttcacgtctaacctctgaaaaagcctccctgagacttggcaggggtttaatgcccatgattcggcctctaacatcatccaattccctgtttagtcctaggaagaacttgaacagtctcttttgttccacaatttgcctgtatgttgctgcatcatccgaacatttccatgagtgagtctcaaataagtcaagttgctgccaataccttgtgagtgtgttgtaatactgagtaactgactgctctccttggcggaagtcatgtagagctgattcaacctgaaacagttctgaagtattttcagaacttgagtaagtttctttggctgcatcccatatgtcctttgcagtcccaaacagcaagaaattttcgcctatgtcattgttcatggaattgataagccatgacatgatcatgctgttttcaatcttccacttcctgaaacccggttctgtagtttctggcatgactgcttctccagtgaggtactcatcctttcctttaccgcaaatgaacagcaacacagattgtgaccactgtaaatagttatggccatttaatttgtgtcctgtgatgagaataggagaggaatcattgccaccaaggtttggaatttcagatctgccccctgattctggtgacgtgacgttggatacttgtgatgatgccattccgtattttgtcatggaccggaaaggtagaagaacacttttcaaggcacgtgcagggactggagttgagaaaaaatagccgaaggacgccggagaatctgatcagagggcccgcggaagcaaaagaaccccaaaagaggcacgtgcagggctcggattgcacaaacaggtaggaagggtggctggtcggcgtcaggcgagcctggaggaggaagcgcgtcgccggaaagtggctcacgtgccctcacgcgccggcgcgtgagatgcagtcgccggccggaaaaacgcgcgtgggcggcgcgtggatgggtttctggttccggtgctttgggacaaattggagatctcctccaggcgctccttgtggtgtagaaaaaaaccgtcgccggaaagttcgccggaaaaattcgccggaaaagttgccggcggtgagtgttttctgacgactattcgactgactggaaagtgttttctcccttggctctgagaacagggactgatggccggaatgagagagagagagagagatgatcggattgagatatggccagaaagatttggccggaatgagtgatggcctgaataagaggtggccagaagggattagggtttcagaaaactggctctgataccatgaagaatttctgaactcctttattgataatgaatcggtacacaccatacacatatatatacacaaatgactgaataagaaacaatcaatctagcttaattctctcctaaaattaggaaactaaatcataaggaaatatcctaaatgatctctccttttttattcctaaattaaagtcctaactttggcattatttcaacactaagtaactatactaatgacaaaagtatttgaaaaagaaaacaaaatttctgaaattatttgtattccaaaaaataaagagattacaaggaaatatatataacaagttgtacaaaaaaaattaggaaactaaataaaatcctaaaaatatacaatccctaaaattattctaaaatctaagacttggctaaagcacataatataataaataaataaataataaaataaaatctacaaaatcaaccacatattctaacactacccctcaagttggggcatagatatcatgcattcctagcttgccaacaatataatcaaacgtgatacttgggattccttttgtgaaaatatttgctaactattgtctggtagtcacaaaaggtgtagaaataattccactttcaattttctcctttatgaaatgtctatccacctcaatatgtttagtctgatcatattgaattggattatgtgcaaagttgatagttgctttattatcacaataaatcttcattgggtctttaggttccatatgcaattctttgagtaggatcttaattcacattactttgcatatgccttgtgctaaagcttgaaattcagcttcagtgcttgatctagctacaataggctgttttttactcctccatgtcacaagatttcctcccaaaaaagtgcaataacccgatgttaatctttggtcctttttaaaacctacccaatttgcatctgtgtatgcttcaacaagaagatgaccattgtttttaaacaacaatccttttctaggagtagcctttaagtatctaagaatcccttgaacatcatccatgtggcattccctcggtgaatgcataaattggctcaccacacttactgcgtatgctatatcgggtctaatatgcgataaataaatcaacttttccactagcctttggtatctccttttatcaaatagacttccatcaagatcagattagggtcgataggagtatttgcaagtttacaaactatcatcccggtctctttaagcaaatccaacacacatttccttggagagatggctataccatgctttgtcttgctacctccataccaaaaaaatatctcaaatttcctaagtcctttatctcaaactcctttgctaaaagatcttttaatttgttttacatcatcacttgtaacaatgatatcatctacatagacaataagaatagtgattttctttaatgatgagtgtttagcaaataagtatgatccccttgactttgactaaagccctatgttttcaagaattttttgaatctgtcaaatcatgctctaggtgattgctagagcccatataaagacttctttaacctacacaccttataattaaacaaattctcaaatcctggtggaaggtccatgtatacttcttcctctacatttctatgcaaaaatgcatttttcacatgaaattggtaaagagaccaatctagattaacaactagagataaaaggattctaatagaattcattttttctacaggaatgaatgtcttttaatactcaagtccaagagtttatgtataccctttagccaccaatctagctttatgtttctctattgaaccttctgccttgtgtttaatggcaaatacccatttgcagccaattgtttttttttccattcagcaactctaccacttctcaagtcccattcttatgtgaggctctcatctcctcaaatatagcttccctccatttagggtcttttaaagcttcttgtatattgttggggatagattttgagatcaaattagtggggtgaaggctttgtagctaggactaagttgatgataagacacaaaattagacaaagggtgtttagtacaagttctaacccctttcctaattgcaattggaatatctaagtcaaattcaaagaaagaacttgaaggaggcaagggatgtgcgtatctgtttctggagttgaagattgactatgtgagagagagatgggatctatcacattatcccatttccttctagagtaagccaatggtgtttttccagtttcagtgtcattctccaccactttgtcatttttttcaggttctagatctaaagagccaaaccctaaggttgactcaagttgttgttgttgttgctgcccattttcattcccttcattttgttgctgttccagctcactgctagcctctctttggctgctaggttggtcaaatttgagaagggaaaggtcatttatagctagatatacaaatgaagagggttgactcaaggaatagggcagatcttcaactccaattttcttctcttaaagatctgtcctaggaaagtatgagagatcttcaaaaaatttgacatccatggtcacaaaattttttttgttggaagatggaaacacttgtaccctttttgtgtgggagagtaacctaagaatatacatttaagagctctaggatcaagtttagacctttctctactatgaatatgaataaaggcaacacacccacatattataagaggaagagaaccaaagacattaacgctaggaaaatgacacttaagaacattaataggatttttcatgtttatggctttggatgacatatgattaataagataggcaacaattagcacaacattagtgaagtaaattttgggtacatttcttgtgaacatcaaagctctagctacctcaagtaaatacctatttttcctctcagccacttcattttgctggggtgtatcattgtgtgaagaatgatgtaaaatcccattttcaagaagatatgaacctagaatggtattttttttttttttttttttgatagataaaaggatgtatattaaacaagaagaggaagcaccaaaaacagtgccctcaaagtatatagggagtatacaaacaagcccaaagacacactcctaaggggaaaggaaagcagcacaccaccttccctcacttagagcctaaccaatctaaaaaacttacaagagaagaagggctcaaaactaaagaaaccctaacccaagaccaaagattacatacaaaagaatatttttatctttgaagtgaaagttcctcattcccaaaggctgataaattcatttccttccagactgaccaaaatatacatataggggccatttgccaagccttctttcgaactttccccacaaacgctccatgccacccaagaagagtttccttcactgtacatgatagagtctaagtcacaccaaaaagggagaaaagaagagattccacaggacctgcgtcttaacacaatgaagtaaaaggtgatccactgtttctacttcagaaaggcaaagaaaacacttgtttgccaaagagaaccccctcctttgaagttgattcagagttaagactttaccgcaagaagcctcccaagcgaagaatgttatcttaggaggcactctcaccttccaaatattatcactagggaacacagaagaacctctgggctccaaaatagaataaagagacttgattgagaaagcgccacactttgattctgtccagaacactctatcttcctcctccctttgcacctggaaggcttggatcctatgcaaaaaatgctccaccaactcaatctcccaattattaaacgcccttgagaaaaaaggggtccaatcatccccattaccaatgggattccaaacatctgatacccaagcattcttagacaaagagatggaaaataaagaagggaatgactcacaaagtggctcatcttcacaccacttgtccgtccagaatctcactctctacccactacccacttagtaggccaacctaccatttaaaatcaaccactcctccttattgctttccaaagcccaataccgtatctcccacttactgctcgagtgcgccatcccccctcctcttcaccatacttgtgactgatgactcgcctccaaaaagcctctctttcgttggcaaaccgccaattccacttacttaagagagtgttattcatcagagctaaatttctcacacctaacccaccattcttttttatccaagcaaaccaagttccccctaacaagatgtggcttttgtacgagagctcccccaccccatagaaaatccctttgaatcttctccaaatgtagcctcacttttcttggcaagtagaaaagagacataaagtagatagacatgttagatagagtgctttggattagagtgagtctccctccttttgaaatatactgcctcttccacattgcaagccttctatgaaaacgctcttcaacaccatcccacacagccattgatttgaagggggcccccaaaggcaaacccagataacaggaaaggagcccacccactttacaacccaactccaaggccaagtcctctatatcatgcaccttacccaccaagattaactcactcttctctagattgatcttcaaccctgaacacgcctcaaaccacatgagaagccagcttagataagtcatctggtctaaagactcctcacaaaataccaatgtatcatccgcaaataacaaatgcgagattggagtcccctgaccactcctacctctcaccctccacccatataagaagcccccactaatagcccttctcaataagcaactaaacacctccatggctatcacaaacaaataaggggagaggggatctccttgtctcaactccttcgacctttggaaaaaaccggaaggagaaccatttattaaaacagaaaatttcacagtagagatgcaccattctatccactttagccatctctccccaaaacccatttttttaagtactgccataaaaaaactcaaactaacatgattataagccttctccatatccaacttacataacacccccccccccctacattgtctttcaaccttgagtccacaacctcatttgcaattaaaactgcatccaaaatctgtctaccctccacaaaggcattttgggactccgaaatcactttccccatcacctttttaattctattagccaacacgttggccaacaacttatagaggctgcctacaaggctaatcggcctgaagtctttcagatcttctgcacctcccttctttggaactaaaaccaggaaagtagcattcagtgactttacaaatctgctcctctcatgaaattctctaaataaacccataatcccaatcttcaccacatcccaacaaaacaaccaaaaagtcatggtaaagcccccgggctttgtccttgcctggatctatgagtgctacaaacaccccttcttttgaaaaatgaatttccagcccctcggcctcactgctcgctaactgcatgaaagacaacctctcaatacaaggacgccacccccctacttcagaacaacttctaattttgaaatactctttcaaaatggtattgaaatactctttgccattattggtccttaacacttggattttggtatggaattgggtttggatcatcttatgaaatgttttgaaggagttagcaacttctgatttttcctgtagaaggtaaatccatgttgttctagtgcaatcatcaataaagctaacaaaccatttatagcctaaataagaagtaactcgagatggcccccatacatcactatggatcacagagaaaggaatttcagattttttgttgcttgaaggaaaaagaacacgatgtctcttagacaactcacaaacttgacattgaaatttggaaagttcaaaatcaacaaataattgaggaaatagtgagacaaagtttggatgaccaaatctatgatgtagcaaccaaatttcctttttttttattttttttattatcaacaatctttgaaagataacctatgtagttttcttagcttcgggagtcaagtaatacaacccctctctctcttcaacattaccaatcttcttccccgtagctaggtcctgaaaaatgcaatgagtgggataggaagttacacaacaattaagggacttggtcactttgctaatggataataaattgcatgcaatcttaggtacatgaagaatagggtttaaaggcaatgaaggagaaatagaaactgaacctttgccattaatgtggatagaagatccatttgcaatagtggctttaccttttttcgggcatggattgtaggttagaaaatgatgtgtttcattagtcatgtgatttgaagcccctgaatcaatgatccgggatttagatggagatttttcaagaatattaagggttgcatggatattacctgattatgcaaagagggaggatgagttggcggaattcccaacatgttccatcatcttatacaagagctctaattgatccttagtggaaggagccttctctaaagattgagtagcactttctggttctgaattatcagtaatcgctctgataaaccttcttaaaaggctagttgtctcctttattaccaaccgagggctttccattcaactttcggcatgtctccttcatgtgtcttggtttatggcaataatcacaccgtctattatctttttctctagaccttttttgccatagtttgaaggaaccataggaccaataggggtactgtcctgagcaactttaagggcagaattttcttgagaacttggtgctaacatgacacttctcctactttcttcactacatacataagaatgaacttcacttaagcatggaaggggttcttttccaagtactctacttcttaactcatccaattcaagcttaagatcgacaagaaagtcaaagacacaatctcgttcctagagctcaaccaacattgatgcatttgttgtagattccatctcaaagtgttgacaaagatccaactcttgccataagattttcaaggtgttgtagtaggttgttacagtgagatctttctgctttgtgttgtgaatcatagtcttcaactcataaatccgagtagtttttcctttctttaaataggtttgcgagacaacatccaaacttctttggctgaggagagatataagaatggttttccaatttctggtaacatagaattcaacaaccatgacataatcatggaattttcagcttcccatgattcataagataaatgataattttttggtttcttaatagtatcacataaatatttcatcttttctctacttgtgagaaaaagtttcgctaattgggactacttaaagaaattttctccattcattttttctattgtaatctgcaacattggattgtctaaatgggtgatagctttagtttaaaatgaagagacatcagtaagggtatttttggaggattttgacatggtcaaggaagataacagacaaaaaaaatatgaaaaattggggccaacaaaggctaaaagcaagaaatttaatcttggtaatgaaagccaagaaagaagatttttttttcttcaaagagagaaaattatcaaaaattcttttcaggctctaatatcttgaaaaaaaaaattctaaaattattcgtattccaaaaaataatgagattacaaggaaatatataaacaaactatacaaaaagaaaaaaaattaggaaacaaaatcagatcctaaaaatatacactccctaaaattactctaaaatctaagacttgcctaaagtgcataatataataaataaagaaaaaatgaaatcaaatctacaaaatcaaccacatattctaacaatattatcttttcaaataataattaaatcaatttcctgacactatgatgatagtgtgaaaagttttcaagtaattccccttcttcttcgtcaagtttaatggtagaattcatggacacattaaaaaataaagcacctgagagatatgtctcaaaatgaagatcaagaatatactttgaaagaaaatgtcttgataagaacaaaaaatgtcaatctcaagtatttccaaatctttagtgtggaattgattagtaaatgaaggtcatgttaaaagagaaaaagtgtgattaagaaactcggcaaagttttaaaaggcgtgctttaagtgcacctaggctcaaagtggaaccactccttagttatggtgcctcgcttgccaagacatgcgccttattgaagcaatataccttgttgattttactcttcctttttaaatacttttattcttaaaatttctaattatatattgaaatttatataattccattactttttattgaatgtttcttttaaatgtttggaatcttaaatgtttttattaattggattagattttgaatcttattttataaaattgatatacatcctaggttgcatttcacttcacacaaaagcgcaccttgtgttgcctcttgcgcctaaactataggagacttttgtgctttagttgtgtcttgtgccttttaaaactatgaaactcaaccatatggcacaaaattagcaattagttattgattgcaagtatatttacaattttacattgacataatatgttaaatcattaggatcaaaagtggataatgaaatggcaagaccctcttgagaagatatcaagctctagccataagaaagaacttgctatttttttttgttattattggtaaacccactaaagaaacttggaaggtggagctaattgaatcaaaagagtaagagatagagaaatctagaagcgaaggactcaccctcagaagtacatataaggtggtctgtaagtcaattttgactagaagatgacaatgagtttcaagtatggcttgagtttgtgttgactgtcaacctgacccagcccacccgagtagtatcctatttgagactgagtagaatgggatcatcctaagaatctgaaccagaaaatgagcctccagtgagttgtcacttccttcttttggttcttccaacttatgatgagccttctctcattttcctcacttgaactagtttcccttttgaccaagcagaaccttcaatcttagcattgtgtttttgcattctatcttgccatgccttccttgaggtaatcgtctcatctggcttagttgtctcaccccctatgacacataacccacctcactttgcaagcaatatggctaagtccttgttcactcccttatgtgatttgagaaagatggtgtaagttcaggggcacccaactgagactgaaagtgggccgcctggttttgtgggccatatggggttcctatgtcttactctcttttgggtccagcccttgggtattgatttaatctccaacgagccacaaatgtaactctaggcaaagcgctttgtgaagtggaagcagtttggcttttgcattaggcttcagtttgggcttgtttctctccatgtggcttccctgatgcctacttttcttcttcttgtgcttcaaatctctctctctctctctctattatctatctatctatcacacacaacatacacatgcacatgcacacatgcatccatctatctatctcactcacacatgcactctcatgtttaccatctcacacatgcacatgcatctatctatctcactcacacatgcactctcatgtttactatctcacacatgcacatgtatatgcatatgtatctatctatctatctatctatctatctctcacacacacaacatgcacatgcacatgcatctctcacacatgcactctcatgtttactatcttacacatgcacatgcatctttctatctatctctcaatctcacacacacatacacaacatgcacatgcatctctcacacatgcactcatgtttactatctcacacatgcacatgcatttctcacacatgcactcatgtttactgcagttgtttttttcaaagtgaaatatgattcttcatgactgtagaagttctctttaaaaagacgttatagaaatgtcattaacatgccaatcagaatttagaaactgagctatatatgtaaataaggtgcaactgcaattttgcctatccaagcgttatttgttttcaaacttgtactatccttattaatttatattgtgttcaggaagttgactcaaagcgctggtctcctttcttatt

SEQ ID NO: 12373 - DNA, 13597 bp, Vitis vinifera
  Intron number 1 from transcript GSVIVT01033225001 (locus G SVIVG01033225001) derived from phytozome v7.0 (chr-ID chr4 ; pos 9991517 to 10005113)
cagaaactatacttcctctttatagtaagttttgaactttgtatacttttatatccatttattatttaactttgttcaaatattatgcatttaaaggatcatgaggtggttatacatatactctagtttagctcatgatttaatgtgtttgtgtttccatatttactttcttgctttcttttcttaatgattcttttgtaattttagtcacattagttctttatggacggttaaaaagtgatttgtgtggtataacatatttagatactacaatgttttgtttgtgtttatcatgtctcactcataagtcaattacacaagttttcttccatcaaagtaatattattatgtataagtgatatttaaaggttactctttcattaatttgtgttgtcactaatcaaatttatatcacattaaaaccatgttttacatttttttaaatatttgttctaaatcactatttacttttaaaagttgtaccaaacactctaatagtttttcttgtcatgttgataagttttaaaaggagttgcaaaagtatcttgcaatagctcttagtaattttattcaaaatttttcttatgaagtgatacattccatgttaaaaataaaaaataaaaaaaatgaacaaagaaaaaatggtatccacaaatgtcaaataaaatgaatgaccaaggtgtagtcatcttgtaaaaaccttaatatagtattcgctaattgatcttacctctattaactttctttcatttgtatcatagggaggggatcaagaatccttgttttatagaaactttataggaaattgttgttaaaaaactatataaaaataataataatagagagaaagaaaattgaaaacacataaagcacaccacaattctcatggttttcctaaagcttgcataattgagtgaagatgatgaagaactttcattgttgttcaaggagattataatctagagttcttgaattcttaaggctcaattacacccaaaaaggctcttgttttctaattcctaattacttaggaatattccatacagaaaactaatttcttaattataaaatatacatattcctataacaaaatattttaaacaaatatattataatagaaaaatattaaaggcttacaaatggactcgaatgagaatttaagatactttctcacaatctctaccttaactacaaatttcaagttctagaaaaactcaaaaagtcttcaagccccaattacacccaaaaaggcttttttctttcaatcaaaatcctttcttatattttttttcctaattacataggaatatttcatataggaaactaatttcttaattataaaatataggaatctaggcaccacaacttgtacccttgtatattatgtgcacacccttgcacttccatgcccttgctctaaacttaccatcatttgcatgactataagcaagatgataaaaaaaatttaatctatataattagtagaggaactagaccatatttctttaggagtcctatagccaatagaaactaaaagagctctcataagataacaagaagatatattctctatactaaaagcatacaccattatctctttgaaagaattatatttatccattatggaaaactattttattgtggagtatgtccaactatgcagtgtgcattcataatgcattcctatttgcttcttgattataacttttcattacttcaacttcttaaaaacattgttctcatatttcaagatataaaccttgacctttctaaagtagttatcaacaacatatatttttcaccaccatgtgatacaatccaataagtggcctcaaatatctaacatacattccaaaaagtgttgataagaatttggtagagaacatatcaaaattatgacaccttagtcttcattattaattctaagatcattcttccttagatccataagttttattgaactcatcaaggtaatcttcattagatatacctttcttcatttcgagagcgaactatttcttcaaacacaaacaatttataagagactttgtcatatacaaacttctcatcttcaaccaaagctcaataagtgtatcctcttttacaactttatgaagtacctcattacccaagtgcaacaaatatcttcatgtgctttctccataagtatatccttctcttcatcaaacattgttgttggtagagtctatctaccttttaatattttagatgatccttgttgaataagtaaggcatctaaggcacatatctttatgcactataaactaaaactatttcttgtatcaaacttcctaaccttgaacttttcaccattctatgtttaataaccttttccatagtacaattttttaatgaaaaaactatgacaaaaaggcaataatactcaaaagaaaatatgatgataaaaatggaaaacacatcaagcaaacagtgatttttgtagattgtcctaaaacctacatctacaaagaaagataatgaagatatttcactattattaaaagttattacaagtttagaggttgcaaatctcaaatccctaactatacctaaaacattctctcctttactcaatttttttttatatatataattacataagaacatcccatgtaggaaattaattacctaattataaaataaacaaattcctataagaaagtctcataatataatacatgttttatataataagagtgtccttaacatgaatacatcctagtgagaaaatatgaaatctaagatactttctagcaaaaactaaggtaagacatttttttttctttgttataatgattgacaaataagaaatgcaattggaaacctaatgcaaaatccatgtggggccaaccattggtttaataagttcttatataaatgtgttattctgcatatttgacaaaccaatcattttctttagatattttcccaaatttaaattctaggggaattttctttatatatatatatatatagttgttccatttcttccttttctccttgatcaactatgatgaaatacattacatgtcaactcgagtttttttagggttttatgaaggttaacaaacaaaggttacctataagtcctaatgttttaataagtaatttattcttttacaaaggtatattaaagaatgaacaagacttttagttattactgttgaatataatgtatttatagtgtataatatttccttgttaatataggtcacatgtatggtagttaggattcctagccttgtatatatatatttctcaattgtaagtagatatcacatgaatgagaattaaggtttttcttctttctctctctctcaacatggtatcagagccaagggagaaaacctaattctttccagtttcccgtgtcatcaactccgggaaaccttcccgtaaccgtgtttcattccggtcaccttccccatctccaaatactttccggtcagtcagatcgtcgtcagaaaacactcaccgccggcaaacttttccgacgaacttttcgacgacgttttttttttttccgacaccgaccataccagaaggagcgcctagaggagatctccaacttttgtgaaggcaccggaaccagaatatcatccacgcgccggccacgcgcaattttcctgccagcgcgtgagggctttcccggccacgcgcctcctcctccagcctcgcctgacgccgactagccttccttcatccctggttctaccatccgagccctgcacgtacctcttttggggttttttgcctccgccaaccctccaaacaatttttccggcgagcttcggctactttttctccatcctaatccctgcacgtgcctcaggaagtgttcttctacctttccgatggtgccacgccgcgatctgaagccgtctccctttccagtggtgccacgccgcgatctgcagccgtattagggctctctttgatccaaatatacttcattctccagataagtagatatggctactaaaacttccattttttcctctgttatatctggatctcctatgattacttcggagaaattggttggcagtgacaattatctttcctggtctgcctctgttgaactttggtttatgggtcaaggatatgaggatcacttgattaaacaggaggcagatatccctgaggttgaccgcgtacagtggaggaagatagatgcacagttatgtagtgtattatggcaatcggttgatcccaagattcttcttcatcttcgggcctacaaaacttgttttaaattatggactcaggccaaaggattatacacgaatgatatccaacgtctttataaggtggcttctgctaatgtccatatcagccaacaggacttggatttatctacttatattggccaaattgcctctcttaaggaggagttcttgattgtgatgcctcttactcctgatgttggggctcaacaaacacagcttgacaagttcttcatggttcttactcttattggcctccgtccggatcttgagcctgtccgcgatcaaattcttggtagttcatcagttccgtccttggatgatgtgtttgctcgcctcctccgtatctcctccactcagactttgccatttgatagcacttcagattcttctgtgttagtttctcaaactagctctcgaggaggccgcagtggtacccgaagtagaggtcaaagtcctcattgcacctattacaataaacttggccacactcgcgatcgttgctatcagttacatggacgacctcctcgcactgcccatgtggcccaatcctctgattctccgttgcctcagcctccgagctcttccgcatctcaggcttttgttgcctatgttgcccagcctggtaatgcctctacctgccttacccacacatcttctcttggaccctggattctagattttggagcttttgttcacttatctggtaataaggatcttttctcctctattactactacctctgctttacctactgttaccttagctaatggttctcaaactgtggctaaaggtattggtttggcccttcctttgccttctctacctctcacttctgtcctttatactcctgaatgtccttttaatcttatttccatcagcaaaatcactcgtactcttaattgttctattactttttctaataaatttgtaaccttgcaggaccggagtacggggaagacgattgtcataggacgtgagtctcaaggcctctatcacctcacctcagattcatctcctgcagtttgcatttccactgatgctcctctcctcattcacaatcgtctgggccaccctagtctctccaagttccagaagatggtccctcgtttttccactttgtcgtcacttccgtgtgagtcatgtcagctttggaaacatactcgtgtctcattcccaaagcatttgaataatcgggcaaagtctccttttgagcttgtccacactgatgtttggggtccttgtcggactgcgtctactttaggatttcagtattttgtcactttcattgatgactattctcgatgtacttggttatttttaatgaaaaatcaagctgagttattctctattttcgagaaattttatgctgaaatccgaacccagttcaatatttctattcatgtgttacgtagtgacaatgccatggaatatttttcagcctcatttacttcgtttatgtctcatcatgggattctttatcagtcttcttgtgctcatactcctcaacaaaatggggtagctgtacgcaagaatcgacattttgttgagacagttcgtactgttctcctccataataatgttcattttcgtttttggggggacgctgttcttaccgcttgttatttgattaatcgtatgccctcctctgtcttacacgatcagattcctcactcccttctcttccctgaccaaccgctttatttccttcctcctcgtgtctttggttgtacttgctttgttcatattctcactcctagacaagacaagctttctgattcgtccctagcagcggaaatggcaatggcaccatctgattcggggttcgatccccggcaacggcgccatttgattcgtgcccaattggtgtctcagctgattcgtgtccaactagtgctccttgattgagggagtaatcaacaaaatttataacctattacaccatatactagggtagcaaagacaaagctactatagtatagtggctctaggatcgttcactaggatgggttttcactttgcaaatgatattaattcaaagctgaattggtgtcttttcatttcaaggttagctttaaaagaaaacataaagatgtttgaatgaaaaaggtttagatttaaactaaccaaaaatagtaactgattttacttacaaagaaaagtgtttcttggagtttcagatcactaggctcagattccccatacaaaaagggagttccggtcacttgtttcttttcctcgcattagagaattaacatatagttccttctccaaccggtgctatacaaatgctttccattaatgggttcaaacactaaatccctctcactgatgcaccttgcaatggctcatgcctctcacctagcacttgccattcaaggtgatctttaaccttggattacccgtcaaaagctcgcaagagataactaatggatatctccttggagtccaaaagcttaccaagtgttggctattctagaaaatcctaccttgaagtcacctcccaaaggctcgcaaggggtaaactagtgcatctccatggacggagatcacttgccttaccaagtgttggcccaggtgatttaaaggcgttttaagttaactaaaaagataaaaaccattaacgggttacactttctcttcattaaaaactaaaacaacaaaacttccaatttatgcatttggaaacttacccggctttcctcactccaagagacaaaaagcttagcctctcatcctctgtggaaaaatcctcagagtttggttggctagaaaatgaaaatgaaagagaagacaagaatatatatgaaaaacagagcaagtgctctgtttgttgattctatatattggattacatctatctcacatgcccccttttatagtggatgcaagagagtttatataggaaggtaatttacccttccttggatacttcctagctaaggaattacatgagtggctgaatacaaggagaaaatggaaatttatacaaaaatatctgaagaaaagatctaaaagagtcggtgcaaaaatatcgggaagcactaaggaccatttcacaggagaaaatggtgtctgcgagatttcgcaggcattcaaggagggctgcgaaatcacttcgcagcaacaagctatcctcgcagggctgcgaagttggctttcatcttgtggtgtttggcttccatcgcggcatgagacttcaggggaaatccaaagcactgtgcaaaaaggctgcgaaattctcgcaacaaaaggctgattccgcaacactttgcaaaatgcttccttcagcttggagtgatcgtcttgcaatggctgtaacttcctcatttcagcttcaaatcgtacacggtttgaagcgttggattcttgacttcctgagctttgaaatggtatatagcatgtagaaaatgtactttgggaagtgctccaaaagtacaaaagaagactgcagctgctgtcctctgttttcttcactctgttttcctcttctccagtgctctttccttgcacactttgaacgactttggcaaagggctatggagctccaaagcttggttattcatgaatttgagcttccaaaagctttgccataacttgttcaagtagctcctccatcatttggcatgcttgaattgattcataagctgataaaaacatgtaaacttgccacaaaatggttaaaaccaattactaaggaccttaatgaattaattgggttaaatgaatatgattactactcaaaggtgcttaaaaccattataattaggtctacaaaatagcactttttggtagtaatcactttccgtcaaagccatgaagtgcctcttcttgggatattccagacttcaaaagggttattgctgttattcccttgagactcatcgatactttatctccactgatgtcaccttctttgaggactcaccattcttttccaccacttctgagtctcttcctatttctgaagtcttgcctattcccattgtctttccacctgatgatatgcctcctcgaccactttaggtttatcatcgtcgccctcgtgtcgttgctcctctcccttttgttgaggcacctgctaactcacttcctatcccttcagcttcccctgccccggctctgccttcttctaatgacttacccattgctgttcggaaaggcactcactctacttgtaatcctcatcctatttacaattttttgagttatcatcgattatcttcaccctattctgcttttgtttctgctatatcctctatttctcttccaaagagcacccatgaagctctttcccatccaggctggcgacaggcaatggtggatgaaatggctgctctgcactctagtggcacttgggatcttgttgttttaccctctggtaaatctactgttggctgtcgttgggtttacgtagttaaggttggtcctgatggtcaggttgatcgccttaaggcccgcttagttgctaaaggctatactcaggtttatggttctgattatggtgacacattctcccctgttgccaagattgcttctgtccgtctacttctctccatggctgctatgtgttcttggcctctttatcagttggatattaaaaatgccttccttcatggtgatcttgccgaggaagtttatatggagcaacctcctagttttgttgctcagggggagtctggtttagtgtgcaggttacgtcattctctatatggcttgaaacaatctcctcgagcatggtttagccgttttagttctgttgttcaagagtttggcatgcttcgcagtacagcagaccattcagttttctatcatcataactctttggggcagtgtatttctctagttgtttatgtggacgacatcgtcattataggcagtgatcaggatggtattcagaaactaaagcaacatctttttacccactttcagaccaaagacttggggaaactcaagtatttcttgggaattgagatagctcaatccagttttggtgtggtcctttcccaaaggaagtatactttagacatcctggaagaaaccggtatgttagactgtaaaccgatagatacacctatggatccgaatgtcaaacttgtaccaggacagggggagcctttacgagaccccgggagatatcgacgactcgtaggtaaattgaactatctcaccattactcgtccagacatttcttttcctgtgagtgttgttagtcaattcctacagtcaccatgtgatagccattgggatgctgtaatccgcattcttcgatatatcaaaagtacaccaggccaaggtgtattgtacgagaacagaggtcatactcaggttgttggttacacagatgcagattgggttggctcacccacagataaacgttccacttcagggtactgtgtttttattggaggtaatctaatatcttggaagagtaagaaacaagatgtagtggctagatctagcgctgaagccgagtatcgagctatggctttggcaacatgtgaactcatatggttgagacatcttctttgagagttgagatttggaaaggatgaacagatgaaactcatctgtgataaccaggccgcattacatattgcattcaatccagtctttcatgaaaggaccaagcatattgaagttgactgtcatttcattagagagaagatcgcatcaggatgtgttgctacaagttttgttaattcaaatgatcaactagcagacatcttcactaaatctctcagaggtcctaggattaaatatatttgtaacaagcttggtgcatatgacgtatatgctccagcttgagggggagtgttgaatataatgtatttatagtgtataatctttccttgttaatataggtcacatgtatggtagttaggactcctaggcttgtatatatatatttctcaattgtaagtagatatcacatgaatgagaattaaggtttttcttctttctctctctctcaacaattacatttatccattatgttgtattttttcttactaacttcttaggagttcaataaaatatttcatcttatcttactattttcccaaatgatcaatttgatcttatttattggtagatcaccaaaaatgacccttatctagccacatgttaaggaattaagatgaagtagtaaaatatttcaccaacttttaatgtggtaacaaaattgtttatgtatcttacttgtgtccttttatagatgtatatgatatacaactagtttggccaaattaccttgactattctattatacaagctagtaattcaacctaatcttaattcaatggatatactttaatttatggtattttttcccaactttctatagtatttggaaaaaataattatttaagtaaatggaaggtaatttagtaagattaagtcaaatctttttatagtttcttacttggtattaaaattgttagaattacatcatctgccacttgttggttctttcatgttttggaaatgtaaggattattatatgcataaaacacatgaagaatttctattattcttggctttatcttgtctttagaaaaaaaaatgatgatttctattttttttttcctttttttcttttttgacacacaatctgctcattttttgttgttttaatagtgaatagaaattcatgttgttatattgttatggtatgtttaatttaattttcatttctctttatactattatacaatatctatcatatctattagttgtagcctaatagagttttttaatgtaccattaattagcaactaagagcattttccttaagaaaatattttttgttatgtttctaaatcttctatattttaatagttaagtgtcttgatgatgatgcgtcttaaatgtttaatcacaaaaggggaaaaaaagtgtggagtcaaaataggcaatgcttgtctaagccaaagtaaaatttgaaaacttaggtttataggtttgtaaaagatgtagaagtattaagaaatgaatcaatatcttagttcgttaattagagtctagaaactctagggttgctagtgcatgtaagtaaaaaaaaatatataattaaattaggttttttatgaatatttgcttgtggtagtgagacattattacccttttcttttttgtgaaatttctatttaaaaaaattaaaattagtgagattctaagacacttttatttctgtttcggcatcctctctcattttctattttaattttaattttgcccattgatacaatataatcatagttcctctacttaaatcctaaacaagtaaaatcctagtctaattatttgattatgaaaaaccacttaagcattgttctatatcatatctacctttttcttttttcaatttacattatttttccctttttagttttctttctctttaagacacaattttttggtcaaacatgtttccaatgaatatactacctatgtgtcaactattatttagaactatttcccaactagctttaacaacttcaatttgaataactttagggtgttaaaagattgattatatataacaacccgcaaccaaccatgtggatattggccattcagggtccaaagaggccctcacggctttaaaacacgtttacaaggttaagaggagttcacatgtatataaccctagtaactttctctcttttccaatgtgggatatcacaaacaccctctcatgtagacacaacatcctcattatgtcccacaaattgcagggtcaaataaacgaacaccccttataaacaaactcgcacactaaggttggggatcggctcgcacactagggtcggggatagactctaataccattttcaacaacctacacccaaccatatagatactatacacttcgggcctaaaggggcttcacgactttaaaacgagtttacttggttaagaggagttcatacatatatagcacctcgaactttctcttctatcaaatatgggagttcacattataacttatagccaacatgtactcccttataaaatccctttagcaacttttgtaggcttaaaaagatttttttttttttcttttggatatgcacaatattttaattgttttaaatttatttgacctgtagggacctaaatctagaaccttcttggattatttagtccaaatgcttacaacattaatcaattcttaaggtttttatagaacctataaaaaaatgatttaattttttcatttttttcttagataatatctcaacatacatacatacatatgaagtgggtttttgaaatcatatttgagttgaactttagagacaaaaagagacattagatggggatatggaggtgcacatacatagcaaatgggtgtttaaactcatatttaagataaattttgcaaacacaaagaaatgattggaatatggaaatgtttttaccatagaaacataagttgagagtaagaagaattatggattttctaaatactatactatgaaatttaattatttacatctgtattatacatgatcatttttctttcttatttacaacattgcacaagaatttgctccttagtattcccactttgtagtaccatagataatattggcttcaatatgagaaaaaaatttaagaaggtttcaagaggaactaactccttgtttaaatgcaactaatcatggtgtccaatattgatgtatatgaagaaagcataatgagatgacttttaagagtaataagactatggcacttaagttaaatttctttgtgtcaattctttattttatgggggtcgaactcctcttccctatccccaccttcatccctctcctagctctaccttcccttttgcttttggaaattttgaagataggttgaatcctaattattttttggcttgttagtcatttacgtaatatgttattgcttaaattttggcttatggtggaagcaacaaattttttaattttctaggacaatgagattatcttattttgattttgtgaaaaaaaaatattagttaataatttctttaagattgttttttttcctcccaatattgctctctattatttgttgtatatatatacttttttttctctcttcctctaagtgaagattttgaaaacaagtggagtcctaggtcttttttagttttatggtacagctaatgtgttgtaacttgcatagcatgtcactatactcaaatcaatcatttttaggtgaatttatgggataatcagggtctattacttcattcttattaaaagaaatttatttgcctatatttattaagatcattttttttctcctgaatcgctctatacttcatcttgtagaaagggataataaaatcaacc

SEQ ID NO: 12374 - DNA, 2588 bp, Vitis vinifera
  Intron number 6 from transcript GSVIVT01010248001 (locus G SVIVG01010248001) derived from phytozome v7.0 (chr-ID chr1 ; pos 18315727 to 18318314)
aagtaagattcttttttttttctctcttctttctaggcacatcctttacaatgtatataaatttgcttatctgataggatatctatggtactgagtttttatgaaataaccacatctaaatgggatgttccagtgactaactaaaaaaatcctgtgctgaagttgcaactatctgacttttgaaaggttttttcttggttggttacatttatcctatttaaatggcttttcttattagagacatctcagggaggtataaaatgacagatactagtgcatagattttgctttcaccaacccagacttccttttgtggccttatgctaccaagagttgagcctttgcactttgactttcatcaagaaaatttgtttttaggttgtatcaagttacttggattctcatgatttctgtttggagatattgaagaatataaagctcagcaagaacactttgttaatctgcacttttttatttgtttttttctttttttggattgataaaataaaatgtattatagataaaagagagtatacatgatgtatacaaagcaactaaaagactcaagaaagaagcgtgaagtcacaaaactagcaaacacaccctacaaagattctaaccaatccacaaattctaacactgacaaagaaccgtccctaatatacaatttaacccaatcccaaaaaaggttcaagaaagaatttttaattgtttggtccaaactttcacagttattgaaggcttccctatttctccctccatatggtaacacacataacggagcaaccttccaagccttttttttttcttttccaacaaaagaatcacactagcttagaggaatcccctaactgaaacttatgcaaattagatctatcctaatagctaaggttgttgattgccagcaatcagagagatggccatttgcatttctctcaggatagatgggcaggaagcatgtaggctccatgctgtggtgagtgttaatttggggagggctatttgaaaacagccaattgaaaagcattacaaatattcataccaggatttggccctgaaaactagccctagacctggaatctgattagtttgttagcaagttggtgatctaaagtggtattttgacacattgttatccagcttcatgtatgtagtagtggttctgctctctgacataaagtaatatctattatctactggtaaacattgtccatttgagccactaatgttggtgtgcttgatttgtcctgccaaagttttgtggtaaagattccactaaacttgaatggctatccaaatttcaattctaggtttgtaagtgtcatgaagtccctcatttgatcgtttgcatccttcttggatgtcattgttaggcatcaataggttttttgaaaaaacatttggaatcaggctcacactgttgtttgtgttgccttggaaatgcaagtcacagagtagtgtgtgggaactcaagaaaattctaattgcaactatctgttgttagtagaggagtccttcactgtgcaggtctatcttggatccccactaaatctggcattttttctattctcagtacctcaacctaaaatgtctttagctttcttcttgttctcttagcatttttaacttgaatcaagacacttttccttgctcttgcattcaacgctcttcttcccacatgattaaagcattgtggatgacttgcccttgtcttgtcatcaatttgtgtgacctatgcttctcatatacgtattcatttgtatgttatgtcttttttttttgttttaaatgataaacaaacatgagaatcaaacccaagttatgtcccaacttccttcagcatttgcactgagccgattatacctttcctgtattgctccttatccattgaacaaccttgtttcagaaaactaatttttcacacatgctgcctcttagtacataagtatttcatttccatgaaacagtgcatggctcgatattttccattgccacatataagtcaggaggaagattacaatccggtcatcccaaatatcttcaacatctgctgtggagctctaatgtgagttggggcctaatggaagttctgctaactggaaactgggaagattaaagtagaaaaaaaaacatttttaatctcacttcttcatgttgaattctactagatgtatttatttattgttcccacctaagctggaatcacatatccacacaggtggggttgatgcactaacttgctaattgtttttaaagtgatggtagtgacttattgggttacatttaggggtttaagttggtaacaagcaccagaattagtgggaaacagaatgacattcccattccaatcatctactctggccaaccaaatagggcctctatgttatatggttcaaatgcttagtagaacacattttcttttcatgctacattttagagctagtttaatcatgttgtttcattaaatgtgagtgattaaggagatgtttatgtttaattaggatctcaacattgaccatctgaattacctgttttgttttgtttcctttgcagccacaaaatcagcaggctaccccatccaaacatca

SEQ ID NO: 12375 - DNA, 5917 bp, Vitis vinifera
  Intron number 4 from transcript GSVIVT01007867001 (locus G SVIVG01007867001) derived from phytozome v7.0 (chr-ID chr1 7; pos 8176369 to 8182285)
caagtccaggacttccttgaaaagaggcccccaaggtaggaggactctctctgattctctagactgtttttgggcctttattttcacttatagttatttggcagtggatgaacaatgaaaaattgaatcttatgttatggaacctagtttaaaaatattaatcaaaagagaaaaagtaaagctcattgtgaggaagtttagcaaagagtactaaggttagaattcaagaataaggagagggactattggcttcaggctttgagaatcaatccaaggaggatggcctatctttcacacttttactaggatttcagtgagcaacagcttatgggaagatcctttcatgagatggattttcaaatttgtttaagataacagcaaatcaagaggctgtggtggctgattattagtctatataagtagttagtggacattggcctccttggttgatttgatgatttcataacttggagttggaaattgtgaattcatttttggcttttcaacttgtggtggccataatggtacaaaggataaattactttggaagctattggaggatatttgcttgtctatcaaatcttattttagtgcttaagttcaaatccttgaagatggtataaaggtctttgactcctttagagattggttcttttgcttagaaaacaaattcgacaatcaattttttttccccctcaatcaacttataagaagaggaagaattttagttccttgtttgcactttgtgttaattgggtttttaattactacatcttgaaaagatggagtttagccaaaaattgattggatggattaaatggtgcatatctacggtagattttttttgtgttaattaatggcacccatttgggcttcttccaaagctatagtgatttgagaaagggggataccctttcaagggggtggggggtgggtgtggttgctaatgtggatgagttgtctcttgtgctaaattgtaaggttagggagctttgatcttcctttaagtttatgctactttgggatgggttggaagaaggttatagtaaatgtcgaccacatggaaaagataatatgtttcgaaaaggaggaaggtttactttgattaaaacaatcttatccaaattgtctatctttttcatgtccttgtttagtattcctaggatgatcagattgaggtttaagaagatttgaggagacttcctctaaggaggcagacttagagaaaaagttgcatttagtgaagtgttcaattttctacatggataagagttaaggggtttaggcattagacgcctttctttgcttaataaggctctccttagaaagtaaagttggatatgcatatgtgaagaagaagcactatggaacaagttgtagataggaagtatggggaggaagaagtgggttggtgttcttgtgaagtaagagttggatatgaggttggtttatggaaagctattaagaagggattgaactttttcaatggtagagcctcctttgtagtggataatgagaagagaggtgaggtttgaaaggataggtggggtgggaataggcctttttttttttttctttcccttattgcatgtgatagccttgacaaaggaggcctaggtgttggattatggaactagttaggtgcatggatgaaaattttgctatatattgtgtaaacgatattgggtgaagaaatattgactagaggaaattttgggaaaaatcaccaagaattggcgaaatttcagggctgtcaaatgtggtcaacatggcagttaaacttggtcaaagctccaaaaattttaagctttctgttgatagggggactcgaacaccaaacaaaaggctcatattgcatctaggccaaccactggggcaacttcgccctttgttaaatatgatgcaccaaatatatatatttaaaagtaatcatataaacaaaatagaaaatgaatattttaaagaacaaattaattataattattttataataaaatgaaaaaatttcatttaattgattaccaaaaatataaaaattatcatgataatttttttcatagtatttttaatatcattaatatattaattaaatattaaaaaaatatacatatatcataatttattttatatcatttaatacaattgaattaaatggatcataattttaatattaaatatctttttaaaattagacatattataattaaatgtcacaatattgttgtggaataatatttgatgtaatttaataataaatgtacactaataaaatccatattttttatcgacgcatatgatattattatcaaatatgataaattatatcatacatatatcaaattcatgaacaaaacaactttaaaatgtctattatacttctaattacatttctataaggtttttcttacattttcataagttttgatcaattttaggcttactgatattttttttccaaaatatacgccgatatatccccaatatattcgtaaaattgaagtaccaatatatccctaattatcgatattttcatccttggttaggtgtgggaggtcattggaatccttgtttctcctaacatttgaacgatttggagttagataatgtagagacatttttttcaaaattgcaagaaaaagtcaatgaatagggaagaagaggatagggtggcttggattgattcaaggaatgaaatattttccatcaagccattttattttatcttggagtttgggagaacggtatctttcctcatgggcataatttggaaagtcatggattttcttctagaatggacttttttgcttgggatatcaataagggaaaggtatgactttagatcaactttagaagaaatagtgaatgttggcaaatagatactttctcttaaaaggagaagaggaatcaattaatcacattttccttcattgtgtaaaataatggttttatggtagtttctcttgtctttgttcaacatagattaggtgctaccttccacagtcaaggagcctcttttaggctgacatgattcttttgtaggaagaaagtataagaagttttgaagagtcactcctttgtgcatttttgggatgatgcggaaggaaaggaattgaacatggtttaaaaatgaggagcaagctaatcaaactctaaaatacacatttcttagtaaccttttaatgtgggttaggttgtatatagaagaagatttaatgtttttaattgacttgttaactgttgggattcttgctaagggagggagtcatttttcgtgctctctctttttaacctagccttttggagccctttgtatatacctttgtaccttggtgtgttgtttcttctgcattgtctataaaattttttattttgcttatcaaagaattttagttccctggtgttgtatgtgcaaatgggaaaagggatcaactagtcacttattcatccattgtagggtggtccatggtatatggttgttgttgttctccacttttggggcttcttggatgttgcttttggtggtaaaggatattttagtagttggtatggaaggcttatatgtaggaaaaagtatggagaatagctcagctgtggttattttggtgttaatggagaaactggaatcaagaactatttgaaggtcagaagagttttagagttacaattgaaaattttattcctgaactccatttatatggttggataattccttgggtagtggaaaccttcctttttagaattctttcctattggccttaacctaaagttggtggagaggatgtttttatctttcattttgttttttggtgagccttgtatatttccagagtagtttggttgctgtctcttttaggtgctagttaatatattacttttttcgtataaaaaaaatgttcaaatctagtctttctcggaagtcatggattactcagaataataggccatgccctaattttcttttgtttaaaagtttccctgactgcttctagcgttttgtgtttagcatactgtggtgcttagactgttggactatatgatgcctgccaaattatttttttcatttcagcaccttgtttcaatttgattggtaagtcatattatggaagattatgtggccattatttccatgaaagtaccaataccaataccatgggctttcactaacagccataataactgttaatcaagttcttagctatttcagaatctcgatgcatagcataatttaatttttatgcttgttagacaatctggatccagtaaagtttcttattgccatccaactctcatgtttataattttgtctgaattaggttgaaaatcgtactgggtaattatttcgactgtttggagcacatatatcatggcatttataactaccattcaatgtctgaccgtggctattgaatcttgaggttgtgttagggagctgacacttggtctaccttttcctattaccgtaggatgtatttgtctattcataaagagaacctttacctaaggatggagttgctaatgcctatgcctaaagagtagttgcccctataattgtagttaaagttagaaggatatagtgccaaaagtaatggtccttttagtgtataatgcgagtcagggtctgacccctactaataaagagacttggcaacataaagcaagatgtgttatcatatgcttcctagtatttttatacacactagagaagatcccatgagtatgaccatcatgtcacaacctgctccaaatgaccctccctagagcttatatagggagcaagaagcttttggaacctttttggagtcatctacactagtggaagagtgagaaaggttctagagaagcctagaaatgtccacacatctctaccactaaggcggaagacaatggaagagtatggagctatctagagagttccagaggtctcttataaatacttgtacatagcctttgtctaggagcttctagagaattcctgattggtaaggaaccatccaatgtttcagagagttcctaagatgcctataaataggtggggcctcatttggcaaaggcaccaagcaagtgagagcttccaagcattgttaggatccttgtgcaatacaagcttccttaaagtgttgccttcagttcttatcctagcttccaaatcatgtgcccaacttagcctaactagctaagtacgaagggaaggctaacatagcaatgtcaagtgtcttgagttgtttaaatgctgcacatgagcttagaaaaagcctaagttcatgacaatctaatggtgaattctaaggttcaaagatagggctaattcataactacaaaagcctggcatggctctaaatatgcattggattcaagatttgatctgtttactgagacaaagacataataatcagaaagattatgaagtttctttttttagcacttaacttttttcttggattccattgttcaaaaatgcccgcaaagcatggtgagatgatgatggtgcaaggccaaagcttgatgagtaacacagttaaatggtgctttattctatggtttgctaaaatgcctcataaaaatgattgaccctattatgttattttgagccctaataagttttaatattagtttcactatcttataatgagcatataaataatgcattggagatatttgtaagtgtagagagatgatgaatttacttgttatggcctcttacaataaaacaataaaactccaccaatttatcctgttattctggccaatttaaacatgctgagtgtactatattttacattgctgcaatttgtttttttatttctatatttgcttttttttttcatgtaatttgataccgtctggtttcccatacttaattgagtctaatttcttggacattcaccattctgcttgtgtagaatttctcctggaatag

SEQ ID NO: 12376 - DNA, 4778 bp, Vitis vinifera
  Intron number 1 from transcript GSVIVT01034975001 (locus G SVIVG01034975001) derived from phytozome v7.0 (chr-ID chr5 ; pos 603022 to 607799)
tggtgcaaagatctagagaacagatccagttggtatgcttaaaactttaatccttaaccttctgtttggtttctgagaagtggacggaaatgaaaaaaaccaaaattataaatcttttttttggtgaaaattttgagagtcgacttaatgaagcgaaattcgttgttcgagtggatttttctttttcttcttttttatttttttgtttcatacggtcccaaatttgacttacacattatcataggagacctaacggaacctagagcaattactaactaggtttgttgtgaagcttggcataagattttcttcttcttcttcttctctttttttttttgatagaatttgatttgcatgttctccatgtttgtttgaaagttatttatttattttttcattatttatattttccattgcactctaaaatcgttcatgagcagctcaatgatccatttaattgtgaaatcaatgattttgcacgaaacttgtttgagcttttaaaaatttggagcaataaggatcgcaatttgacagcattaggtaccattttcgggcacctagtaaggttttgttcttcaggcatttgattaatgggcattatatatctattgtccatccagtctacctacatctaactgagcattgtatttcattcataaaaaaatgtcgtacttctagttttaggtgacttcaactccctaaaaatagttttttttcagataatgtggtgccttgaacttgaatcagcactaataggctggagttttggatttgaaactcaccccaacaaagccttctactaactagtttctgatttgggacaaaaatactgcattgcttcttctattgaagatttgaattttgatataaacttcccccactataattagtcagaatagcttctcaaatttccttcactgttataggtactatactctaaattttctttctttcttatggaggatcctgtattattttggagagtacttggcgcatgaaactgttttccatgaggtttttgtgaccacatcatctttgtcagacatgattgcagctcaagtttggtattcagggtgtgggtggtttgacatgatcttctgaactttccttgtcgatttggaaactcataggaatcctccttcttcaaaatgatttataggtgtttcttcaatcagtttcaggatccctggttatttaacggcaaattttgctttctgataataacaaaaattttgaattctcagtctagcattatcagattctggattgtaatcttcatgtttagacaacaactgaatatatcatgttgaagcaaataaactaaatgagcagaatgtcagtgagcagtgaaatactgtctgcatcatgggtgtaaacgctttataggatataatgcttttatgcattctccgtgaaattgaaaagcttgacaatgccttggacctacctaattgtcaagggaaagaagaaggggcaagctttccaattaacattatgttcttgttaatttgacatcaatgagtatctataggaatttcaagattgttattaaaattctaatatttttggatcttgaagtgagaattgatatgaattttttttctccatgggcatgtagaaaaaccagtaatgtttattggattagtgaccacattacaaattctccttccaatgaattagtttttggctagaaatcttttattataaatagtgtttgtcaattgttaaaaacttacaaaacacgatatgatacaatgatatatttttttatggaaattgagataaatcatacttgtatcttgtctttagtgtatcttaagacacacatatgatacatgatacaaagatgcatataccttcaattatttttcatattttttaagaaaaatcaaattcaatttttttttttttttttttttttccgtttaaaagaatcattttattaattgtttaaaatgtacataaaggttggaaattgatcatgaaaggaagaaagaggtgaaataatcttatataaaagttacacttttgttgtcaaagtttagagcataagttaagtaaatttattcttataataaatattggataattttcatttgaatggttggaattttgacattgaaaatgatggtgatcaatgaataaaaacttttaccttatatattacttttttaaaaaaaatttatttttggtggggaatgaatgataagcatgtaaagttgaaatcaaggagatgataaaagaaatatatcagcagaacatgtaaagaaacatgtctagttggaatttgtaattaaaaatcaaatctaaaaaatttaaaagatttatttttgtgcattttgtgatgaacctatacattaaattgatattttgttaaattgatatttcaaactctagtattcaatgtgttaatatggtaagatgtagtttaactctttaaatcctattatcttttatcaaattggttatatattgttctatacttcatgcttttaatatatatgatcatgtgtgtatattttttctatttaattttcattatattacaatacatgataagttttacaagctaacaactatgatagtggtaatcgataactcatattgatcatttattgtcctacttacagttatagtataactgtgattgtgaatctaattagtgaagtatgttagttagcttcaagttatagctatttagggtgagagaggtatggagtgggagtttggaaggcaatcagaaatggttgggaggatttcaaagttagaatgtgtttcaaggttggaatgccgttgagggaggcttcccaaaaccttttttctatagcttcctctaaagatgcttggatggttgatgtttgggatggtggtagctagaatcctaggtttattagacagtggaatgattaggagctggatgagatagacaacttctttgagaggctgcatgatcattctctttctatggagtctgaggattcagtggagtgggttgatacaaagagtggtattttttctattaagtctttctactccttcttggctagtagggaagtggatcctttccctcaaggtatggtttggaactcttgggcccctgttagagtcaacttctttgcttggggggaaacttgggccaagattttgactttggatcagctcaaaaagagggggcgaaagatgcctaatagatactacatgtgcaaagaggaagaagaaacaagtgatcatattcttcttcattgcctgaaagcttgtattttgtggcaactaatttttgctttatttggtgtatagtgggtaatgcactcttcggtgagaggtttactcttgagttagggagactttcttgtcggtagaaaaaggaaaaaggcttggaaggttactctgttatgccttttttggtccatttggagggaaagaaataggagagcctttgagaattgtgaatgttcaaatcattcttttaaaagttattttttgtatctattttgggattgggtaagattgtatattggggatggctccttgttgacttttgattttgtagattggttaggagttccgtaggatgtggttgttttttgtgtgtccgtgcctttttgtatttggtttcttgtatacatcatgtatacttttctttttaatacaattaattttaaccatcgaaaaaaaaaagttatagctattcatccatgtctataaattttcagagtaatgcagaggtggtgtgaaaacatcatgtgggttgaggcgtttgttatgaacttggtagcagcagcattgacatggcatggcaaggtgatggtgttggtacagattgaatgctatgaatgtagtcttactaatgtggtggttaaggtgataatagtgacaaaagttgtggtattatggtactggtggttgccatgttattattggagttggtgattgggatgtgggagccaatgatgaaagtggctgcagcaatgacaggcttgacagcaatggggagagttggagggatggtgggggaagtggcactgtaagttcgtatagattggtcaattaatgtggtggttgtggtgttgaaagaaggttgatgtttaatggattggttgatcaaatgaaggactaaattctaagcaggttgtagatgttctggctctattctagctggtgcaaattgtagtttttggttacacatttagttgaatgtcatgcatgcccccatgcatttacattacaaagaaaaatcatatattaatatggtgaatccaaacataaaactaacttggcttgccaaggctgatggaaaaggagaagagaagtgtgacagtgttctattctatggattctgatcttgtcaaacaattttctttgcaacagtgatgaaatgtaaaagtgagatatggctagaggcttccctctgttgatttagctggttggtgtatcagtttgtgtgactttttaaccaatcaagttgaatttgaaaagaaaattttccattttaagtaaagatggatgaacttcaaaattctttttccctttaataataggtgtacagtcatgggtgttgatcatgaaaaccttggaaactcaaaatattgtgtaattatgccagaattacgcgtagtctatatgccagtaagatccttgcaattataatggattctgtgtaggtgctacctcactttagtaatattagttttcttgttctttcacttattaaattctattttttcattccaatttgatgcatatttttcaggaagaaactgtggaggaatttggagaaa

SEQ ID NO: 12377 - DNA, 734 bp, Vitis vinifera
  Intron number 16 from transcript GSVIVT01034779001 (locus GSVIVG01034779001) derived from phytozome v7.0 (chr-ID chr 18; pos 21299166 to 21299899 reverse strand)
aaccacacaatacaggaagtgtgcacagtgccagccaactagggttgtaaataaatggaaattacaagtaaaagaataacaaccttcaaaacttctttattttcagttccctttaaactgccacctaatagcttcatgaaggtctacatagttgtaagcttcaattggtctttttttgactcaattctgtattgtatttgaaaaagattcaaattccattaatttcatctagcaatatgtactgctttttcactcaatatctacatatcaaaactattaaaagattctgcttatgttattatgatgaacgtttttcaaacatgataaaatccatcaactttaaggcaccattgcttcatttttgcaatgcttcagcttcctttagatgactttattttctttctgatgattcaactcagtacgatcactgatttggacaaatcttaaaaattaagttaattttcctgcagcattaatcattcctcacactgtcttaatctgataatgacttcatcatcaccagcatgggactttgtttccaatgttctatagagatgatatttttgttatttgtaaattttgtttacttctgataattgatacatggaaatgtagtaagttttaagtttattgctgttttatatttaaccatgattttttctattctggggaatgtgacgactacatatgtggatgcagaagcaaacaatccacaaaattcaagagtaatcatt

SEQ ID NO: 12378 - DNA, 11604 bp, Vitis vinifera
  Intron number 8 from transcript GSVIVT01013851001 (locus G SVIVG01013851001) derived from phytozome v7.0 (chr-ID chr1 6; pos 5207570 to 5219173 reverse strand)
gacagttcaagggtttcggatctggacagcctcctgtcttttaagagatccctcataagatgacagcaagtgtaacaaatggcttctgcaatttcgtttacttctatgtctctagtttcccagtcatgtaagtctgtgatctgccttcatggattctatctaccagggtttccagggagggaagagagagaaacagatgttaaaggggaaaactctcaagtggtttgatgggggtgatatctgaagaatagtatatatagaaattcatcacatctctttgtagtattcatattgttttagagcctgatcaattagtggacattaagacatagatgaagcctggcaccatgttgactaaagactttgaactaaccttgaaaactaattgctagcctccaaatcattatctttatcatttgttctctttcctgttgaaagttagaaggcatacaaaagaaggcaacattataaacttagttcttgccatttccatggagccattcatttgcttttgtgtgagagcagcattacattagactggtactactgatgaactgctcaaggcttttcaagtcaattcaccaccttaagcaagcataattcaattgggcttgcagatagttggggtaagtttcatgcagttcactgtgaagatactaaaagataggtcaaaacataataaaactaggcatgaaaaggaataaagattttcgatcatataaattatgcatttttgtagtggtagaaagtctttcaaagtcaaatgactagaacattatgccaaattaacaatcttggttaggatcatgatgatcaacttcaacgagctaacgttggatgggaaaacacaatttaagctcgaatagcttagccagcttgtatacaatatagatgtagtgaatctatacattttgaaattttctagtgattctaagaggctagttgatgcaagatggtagagagaaaagaatatagaggagtgagacaaaattagaagagagaaattctaaataattgtgaatattgttgaagtttaaattgtttaatatcacaacctatatatagatttctatatttacacttgatggtaagtacataatttaacatattcatctccattgtttcctcatgatagaacacaactccactttggtgaattataccatagatattactctaaaagataaggatcaagtcaacggaaatcctcattgataatccaagtatcatcaatagatggagaatcctttcattgaacaaggaagacaattgtcaaatgctgaacatattaatctaccaatacatccacaatcacatcaattggcatcgataaagcaaagaaagcatgtattggaacagattatagtgagaagaaggcaaaaatagaggctcaataaggaaataaatccatcacattgaaaattagacgtataattatgtgtaatagcaaatctagcaaatatgcactaaattgaaaccttcaaaggatagggaatggaccaagtgagtggatatgaagtatcttgttggaatttttatgcctgtaatgtgcatcaaggcaaatgcaaacaataacataatcactcttttctatgcctaaaatgtgcatcaacaataagtttataatctatactacttaaagaaattttttgttgtatctcaacatgtaagacatgaatatagttagcaaaggtaaagaaacaagattaatggtttaacaaggtgaaagaccattaacaaattcaaaaggaattttttctcatggatagatgaaccaagttgtaagcaaactataattaaaataggctccaaattaccaagtttctcactaacaaggcactcatgcaagttacgtagactacaattaaaaacttttgtctaattgtttgtttgaggattaaaactacaagaataattcaaagtggttctaaataattttctaagtatcttccaaaagtaattaacaaacttgacattcacattaaacactacggtagagggtaaattttacaatttcatccaataaaaacttaaccgcatgtgaaacattaatggtattagaacaagggataaaatgggtcatcctagagaagctatccatgaccatctaaaagaaatcatgacctttggtggtcttggacaactctaggacaaagtccacctaaagatcatgccaagttgtatgtggaataagtgtataaacaaacttgtgttttgtttcttaccttaccaaactgacaagtacaacattgggacactattctctagcaacatcccctatcaacaaaggcactagactgtgatcttatccttacaaaaatgtcctactagacttccaacatgtaattttcatactaagaatgcttcaagtatgaaaatgcacaatttaacttgaaaagataaccaccttgaataagaaatttggcatgatatgtattatgactttttacaccgatccttggttgacttgaaaccttccattttagtattcatagagtagaggatagtggcgacacaactaaagttattaaccaccttattttctactttttaagaataaaagtgtatttttagaggaattcaacccattgaacatctcttttacttatcttacactatgaactaaggtatctaagggcttgacgattagaataaaggaaaaactcctctggtacactacaaaaaataggtttttaatgatgaacctttagtcacggccacaaatttcgtgaccaaagatattattttgtcacggccagagtaaaattgtgactatatatgttaatcgtggaaaaaaacatgtttagtcacgaagattttatgaaccgtcaccaaaaggattgatgagagggtattttagtgacggatttatttgaatccgtgattgtttgtaaatttagggaaggaaattttggcgtcaatacttttagtcacggtaattttatcattcgtgataaaaagtgaaacaaatgatgttttagtcaaggttttttgtgaaaccgtcactatatatttttttgtgtgacttttagtcacgctattgattgaccgtgattgtatgggaacttatagtcacaaatttcacattgaccgtgaccaaatgcatagaggaatattttgaacctatggtcacggggttcacacaatcgtgaccaaagtttattatttattttaaaccatttttgggttacctattataattttttagataatattatatatatatatatcatagaaattatcattaatagtaataataatagttcttattaattataaaaagtttaaatttatattattattattatttttaagttaagaaacaaattagtgtgttatctttagttaaaattatttaatttccttgttatgattaatgttttaatgagaagtaaaataaagtttaatatattagtttaaaaatatgatggttcaatttgatattatttgataaaaagtttaaatgcaagtgacatttactccccaagactatgagtttaactttaaaaaaccaaagccaaaatctcaactcaatctgagaaggtgggggagggggaggggcctaatctctacttagttgcatttgacctaacttttggattggaaatgtagaggataatattgcccgtggcccatttctttcccattaaataaaattgccatgttttggtgaacgacccaatgccaaaataaatattattattattattattatttgcttcattttccaatctaggtaaacttcggccacctcaccaacccttcaactttaatcccttcaagcaaattgtagcataacccttaactccgacccttcatcaattaccctctttaagctcaaatctcttgttaaaagaagattttgtttcatggtgattttatggaacatttttaatttaaaaagtattttttataaaatattagtactatgtttgatttagaagaattggaagaaaaaatgagaaaaaagaaaatagagaaaaaaaagcgaataattttttttttaatttgataaattattttacacgtttctttaaactcatttcacttatatgataatgatttaatatctattaaaaaataaaataagactaaaaatttattttacaatgattttaaaaagcgtttctaatttaaaaagtatttgataaaattttaaaaatacttttaaaaaatattaaaatataatattaaaaaatcacttataatgtttttactcgaaaagcacctccaataaaaagattttgaatagaaacactcctgaatgtgctctaattaaattaaaatataatattaaaaaattttaaaatataatattaaaaaatcacttataatgttttttaaaaaaatgcttttacttgaaaagcacctccagtaaaaagattttgaatagaaacactccagtaaaaatatcatgtgcttttcttaccatctaatcgtcgtttcaccgtcacagatgctccggcaccgtcccaaccacgccttttttctttctccggtagggttctacaaccgagtatcactcgctgaagctactgatctgttaacggcagaagtttggcgatcgattatttgcttgatttggtttttgggtaagatctcgatatttcgtttctgtctccgagttttttagatctagaaattacttgtgtctgttcagttttagcgtgaactagagccattttcccgtgaaatttatattttattaatcttttctattttcgattcatgaaaaggttgtttcctatttcaagggttctctcaaattatttgtttgttttttattttaaattctcaaattatattagaaggtcctagatacttccccaaacacactcaaatagcgaaatttcacaatcaggaggctattgacacgttcattagcgtcaccggcgcttctgaggacgttgccgttaggaaactccaggtatttcgcttacctctcaaggaattcctgctctgtcattatctctgagggttcgattgaatggttggtaaattgagcttttttttcttcagttagggtttcttgttgaggaattgtttttccataacagaattgaggttaaaaatctagtccaattttcatctgaaagtgcaatttctggccatcaattaaggagcgttgtgaacttgtgtgattattgcaattgcctaccataagctttcattttggaagggggttaaaaacaatttttaatcttcaaaaagaaaaaaagttcttcaatttttaaaatcacattggaagaattttgtgctgaaaatagtgtttttttaacccaagaatcaacatattataatatatatatatatatatatatatatatatatatatatatatctctgaaacaaaataaaattttaaaaataaatttaaagtatctaaaatatttttttatggtattttaagaaataattaaaaatacaatgaatagatggagaatattgggaatagggttgacaatgagatgggatttttcgggtatctcaaccttcaataatatttcactttcctattatgataaatcatagtaactaagatatttttcatattgaaaataataattatataatataatttatatttccaatatgtatcttaaaatgtgataggtttgtaatataacaagttctttatttttttaatccttatttgttaattttttaaaaaacttatcaatacctcttattattattgctatttatcttaattttgtaaaagataattatttaaaataaagcctataattttttttttaaatcttaatctcctttttcaaatataatattgcatatattgtgatttaattaatcatttacgttgttttagccattgtttttattttttttttagagataataaaaatagggaaattttgttatgttgtgggaaattataaatgagaagccttgatattaaattctctcttggagtgcaacttgatattagagttataatattgcaatagttaatcttgtgattcttctcctaagtacaaccgtaaaaagtatgaattatgaattgtcttagattctcaattgattgcatccattgttatgattctttctttctttcttttttattttttattttttattttctaatcaccattagttttactcttagataatactaaaaatttattttaaaaaaacactttcaataataacatgcttactccttttttcttatccttatcttctcctaagctcggggaagtgcttttggggtacgtacaaatgatcttttatgtcattagatttatcgaaaaagtatcttaaatcgctttttttaattaagaaaaacaaattttttaaaactttgtttctaataatatatttgaatttatttttaaaaattattgttgaagataaaatattatagataaatgttatttttaataaatataaaaaataaatttttatttaaaatattatttttttaaaattattctaatttttttttttagtcacggttagggacattgaccgtgaccatagacatacatttagtcacgatttattacatgactgtgactaaatcaacttaataagtagcaaagtattcttaacttttggtcacagattttgtatggccgtcacaataaaagaaatcatatggtcacgatcacttaggaaaccgtgaccaatacttttagctacgccttgtattgtgacgcttggtcactgtttcataagacagtgacaataggttttggtcacggatatataagatttgacaaaaatcctatttcttgtagtggtaactgatagcattgcaaatgatgaagagattgcatcactccataaaattctttatcataggtatattattattattattattattattttgtcttattgagttttttactaaagtaggctacaaaatgaccatcttgacttataacatcacctacacctactctagaagcatcacaagctacttcagaaaccttagaaagcttaaggcatctcaaaagaggagcctcaatcatatatatatatatatatatatatatatatatatatatatatatatatatattttaatcgccaagaaaggttcaaactaatctattataatcttaaccttgttatggctagtgcaaatcccttgagtaggatagaataaaacctaaaaaaaacatttgagtttgcatgatagagcaattcttaaggttagcatcaaagtttttaaaggcgtttgtggggcgcgcctctgaggcgaggcgtggcgaaaacgccctgaggcgttaaaaataaaacgaaacgcctgaaagacgtacgctttttcggtgaggcgtgattgaggcgcgctttgatcgtgcctttcatgctccaagaaaaaggcgtacgcttcgtcggatctgatgtggcaatgaacagaaacttaaaaaaaaaccctaagtaatccctaaaacccgactctcgactgaaaacaaacccaaaacgaaaccctacttccaacgactcaagtggcgacggagtgctcaccctcggcggcaaccaatcgcaatgcgtcttctccagcggcgatccctctcgttcatctccaggtatgttgcgaactccctcttccatggtttctccctcttcgtttccctcttcgcaatctacacgggcttcgtcgggtcttcatccaattttttttttatttctttattttatcaaatcagttatgtatatctatttcctatttaaattttaaacccctttctctttctctctctctctctctctctctctctctctctctctctctctctctctctctctctctttctctcttcgggcaatccacacttccggcagtccacacttttctctctctcacagtaggcttttcattttttttttttataaagataattatttgttaattttgaattttttatttgtggtttaattttaattttcacctcaattttctttatttcattattaaattccaattaaaatttatgtgtataatttttaaattcctttaaaaaaaaaattggttttttttaatttaaaccaattaaattttgtatttcatttttaaattcctttcaattatgctttgttattattttttagtcaattatattgttatatggaaatttgaatattattattgttgattttttttagaatgagttcctccgattcgaaaaattcaagaaaagttttgtgtggaagtatgtgattgaagtttctggggagcaatatttaagatgtaaattttgcaattaaagatgtacgggaggggtgaatagattaaagcatcacttagccggaactcatcatggtatgaaaccatgcaacaaagttagtgaagatgctagattggaatgcaaagaggaattggccaattttaaggataaaaaaacaaagagaaatgaattgctccaagaaattggtatgggtccaacttcaatgtatgagagtgtcttgtctaaaacaatagggacattagggagtgagagtgggagtgagagtgtaagtgggagtggggaacctattcctaggggacccatggataaatttactacttcacaacctagacaaagtactttgaattcaaagtggaagcaagaaggaaggaaggaagtgtgtagaaaaattggtaggtttatatattcaaaaggtctcccattcaacactgtgaatgatccttattggtttcctatgatagatgctgttgcaaactttgggcccaggtttaagcctccatctatgcacgaattgaggacatggattcttaaagaagatgtgaatgacctaagtatcattatggaagatcacaaaaaagcttggaaacaatatggatgttcaattatgttagatggttggacaaatggaaaaagtaggtgtcttatcaattttttggtgaatagtcctactggcacttggtttatgaaatcaatagatgcttttgatacaataaaaaatggggaattgatgttcaaatatcttgatgaggtggttgaagaaattggagaggagaatgttgtgcaagtcatcactgataatgcctctaattatgtaaatgttggaatgaggcttatggaaaaaaggagtagattatggtggactccttatgctgctcattgcattgatttgatgttggaggatattggaaagctaaatgttcatgctactacactttctcgagctaggcaagttgtgaagttaatatatgggcatacttgggttcttaacttgatgagaacatttacaaaaaatcatgaacttattcgtccagcaattacacggtttgctactgcatttcttactctccaaagtctttataagcaaaagcaaactcttatagcaatgttctcctcagaaaaatggtgttcaagcacatgggctaaaaaggtagaaggtgtgaaaactcgaagtacagtgttgtttgatccaaatttttggcctcatgttgctttttgcataaaaaccactgttccattagttagtgtattgagagaggttgattcagaggaaagaccagccaagggttatatttatgagttgatggattcagctaaggagaaaattgaatttaattgtcgaggcatggagagaaaatatggcccaatttggagaaaaattgatgcaagatggactccgcaacttcatcgacctttacatgcagcaggctattatcttaatcctcaattgcggtatggagataagttctctaatgttgatgaggtgaggaagggattatttgaatgcatggataggatgttggattatcaagaacgtttaaaagctgacattcagttggactcatatgaccaagcaatgggtgaatttgggagttgtattgcaattgattctcgaacattaagaagtcctacaagttggtggatgcattttgggggttcaacaccggagttgcaaaagtttgctattcgagtccttagccttacttgtagtgcttcgggatgtgaaagaaattggagcacatgtgaatcggtaatacttctatttttgtaaatttttatacatatatttctatttcaatgttagagaactttatttcattttaacacataaaattgtttcttttattatttgtagatccatacaaaaaaaaaagacttgaacatcaaaggttgaatgctctagtgtatgtaaggtacaacactagattgagagagcgaagtctacaaaggaaacaaaatgttgatccaatcttggtagaggagattgattccgatgatgaatggattgcggagaaagacgatcccctcctcccccttgatctttgttggcttcaagataatgaattattcaatgttgatgtcattagagttgtgtcatccaactcccaagagacgcaagcatcatcggatcatatggtttcttcacattcctacaaaaggaaacataatgaagtaccaagtaagtactcaaaaattgaaatcataaatttgattaaattaaataaaaaaaacttttaatatttacacataattaatactttatgctaggtacaagtggaggcaaaggcaaagagaaggaattgaatttggcaccaattgatgaagatgaagatttagatgaaatggggatacatgatagtggacattttcctactattgatacattggatgaggatgatgatgaccttggagaggaggatttaagttgaaacaatttactctagttgttatttcatgacttagttatggattttttgtaaaagtttagaactattattatggttgactctattttctatttcatgacttagttatggctttttgttaaagtttgaaactattagtatagttgaatctataatctattttatgaatttgttatggttttttatgaaagtagggaactagtatgtttttttttatgattctaatgaattgttttcatgtttttatttatgctattttattttatatattttaaaatattaattaattatataatgtgaagctcaaaaagcttacgcctcaacgcctcgaggcttacgcctcgcctcacgaacacaaaaacgcctcgctttatgctttcgcctttaaaaactttggttagcatacatttctcatatctaagggtatagaaaacttgcctaagacgatttacatgtttcctcttagattagctatggatgaaaataccatcaaaataggcactaaggaattttatgaagaatggtctcaagacatgtgtgatcattctcatgaaactattaggagcattaaagattcaaaaagactttattaacaacacatataatccatcttgaatctcaaaggttgtctcccattcttctccaagtctaatcctaatctaatgatatctactacataagtttatctttgaaaaccaataaaaaccaactagctcatccaacatgtcttccgatcaagaatagaaaatctatactgaactatgagaaaaacaggagcaacacaaacaccaaggctatcacaaataaaacctttaactagaagaccagttattcaaaatcttagtgaaacactggatttgttatctcatgtttgtttttcgtgaaaaaaataccaattgaagtggaaggtttcttcaaacaacaagaagttgggtcaactattcaatcagatgatattgagc

SEQ ID NO: 12379 - DNA, 5188 bp, Vitis vinifera
  Intron number 12 from transcript GSVIVT01025116001 (locus GSVIVG01025116001) derived from phytozome v7.0 (chr-ID chr 6; pos 4308847 to 4314034)
ctacctgcaggtatatgttgttattccatccttttttccttagcaaaagcatagtagtatggtcttggctgtgagcatgcctgatttctaatctgtcatccaatggtttttgtttttgttaatcttggttagacattgacaattgttaaagtggaaatgtaattttcaaccatttttctgggcctagccttatgcagcatcatatacttttgtatcttcctgatctgtgcatcctatttctgtatagaactgtactttgtaggttggattggtgttaatatgtgaaatgtcagattatgtatcactaacaattatgtcagtgatggtgtgatgtggtgtgtaatgctttctggatggcagagacgacagtaattgcagtttcttgttagatattactaattgtgaccaaatttaaacttttctttttctctgtttggaaactctgtactagctttgtcactatagttcttttttcttttcaaattattgcaacattgtagcatggttggggatcgtttgatcttttttttttgatagattaaaagaaatgtattcaacgaaaagaggaagcaccgaaaacagtgccctcaaagtatacagggagtatacaaaagcaacccaaaggctcgaaactcctatttagagcctagccaatccaaaaaactaacaagagaagaagggcacaaaactatagacaccctaacccaagaccaaagattacatacaaaagaatatttcaatttatgaagtgaaagctcctcattcccaaaagctaacaagttcctttccttctagactgaccaaaaaatacataagggggccatttgccaagcctttttatgagttttccccacaaaagctccatgtcacccaagaagagtttccttcactgaacacgaaagaacccaagccataccaaatagggagaaaacgagattccacaaaacccgcgtctttacacaatgaagtaaaaggtgatccattgtctctacttcagagagacatagaaaacacctttttgccatagagtaccccctcctttgaacttgctccaaagttaagattttatcccaagaggcctcccaagcaaagaaggctaccttaggaggtgccttcactctccaaatactattacaagggaacaaatgagagtctccgggctccaatatagaatacagcgacttgactgagaaatcaccactttttgaagccgtccaaaccactctatcttcatcctttctctgcagcctaaaagcttggatcttgagcataaaacgttccaccatctcaatctcccaatcattgaacgcccttgagaaaagaggggtccaaccctccccatcactgtttgggttccaaacatccgacacccaagcatctttagacaggaagatggaatataaagaggggaatgactcacaaagaggcttatctccacaccacttgtccttccaaaatttcactctccgcccattacccacttggtaggctagtctactcttcagaaacaaccactcatttctgattgcttttcaaagcccaacaccatacctctcacttacggctcgagtgcaccaatctcccttctccacaccatatttctgactgataacttgcttccaaaaagcctctctttcattggcatagcgccaattccacttacttaagagagctctattcatcaaagctaaatttctcactcccaacccacctttctttttttccaagcaaaccagattccacctaacaaagtgtggcctctgcacaagagctcccccccctccccacagaaaatccctctaaatcttctccaatctcaacctaacttttttgggcaaataaaagagagacatgaaatatataggcatgctagagagaatgctcctgattagagtgagtctccctcctttagaaatatactgtctcttccacattgccagtctttttcgaaaccgctcttcaacaacatcctaaacagtcgttgatttgaaggaggcccccaaaggtagacccaaataacaagaaaggagaccacccactctacagcccaactccaaagccaaatcctctatatcatgtaccctccccaccgggaccaactcgctcttctccaaattgattctcaaccctgaacaagccttaaaccacatgagaagccaacttaaaaaagtcatctggtcttgggactccacacaaaacaccaaagtatcatccgcaaataacaagtgtgagatcagaactctctcaccactcctacctctcaccttccacccagataaaaaaaccccattaataacccttctcaacaaacaagtaaacacctccatgactatcacaaacaaataaggggataggggacctcttgtctcaatcccctcaaactttggaaaaaactggaaggagagccatttattagaactggaaatttcacagtagaaatgcaccattctatccactttaaacatttctccccaaagcccattttttaagtactaccaacaagaacttccagcttacatgatcataagccttctctataaccaacttacacagcacacccccttgattgcttttcaactttgaatctactgcctcatttgcaatcaaaactgcatctagaatttgcctactctccacaaaggcattttgaaactccgaaatcactttccccataaccttcttaattctatttggcaacaccttggccaacaacttgtaaaggcttcccacaaggctaattggcctgaaatctttcaaatcttctgcccttcccttctttaggactaaaactaggaaagtagcattcaaagactttacaaatctacccctctcatggaaatctttaaaaaaacccataagctcaaccttcaccacatcccaacaaaatgaccaaaaagccatggtgaatccatctggaccgagggctttatccttgcctaaatctgatagagctgcaaagacctcttcttccgaaaaaggaatctccagcccctcagcctctcttttgtttaaccccaacaaagacaacccttcaatacttggacgccacccctcttcttctgaatagagcttttgaaacgcccccaccacactattttttaaattaatctcctccgaatgccaacaaccatctactttcaacttggacaaccattttcttctactatgagcgttcgtcatcctatgaaaaaatctggtattattgtacccctccttcaaccataattccctagacttctgcctctaggaaatttattccctcaacacccaagacttataagactctctcgcctcttttcttgcttcacactcttctagatttaaagctgagcatttctctttttcatcccaaaacacgacctatctgagagcttttccctttttattctcaatgagaccaaacacttctttattccaattcttcaaaatatcttttaaggctctcaattttgcgtctaaattaaagctggaggtccctgtaaacttacccccctaccacgtcttcatcttgtctttgaaaccctcctcctccaaccacatgttctcaaatctgaaaggggaaggtcccctaatcagacctccgccttctagaagaactggaaagtgatcagagacaagtctaggaagaactccctgcacatccccattgaaaagactatcccagttgtctgtccctaaaaaccggccaagcctagagtgggattggttatttaaactgcctctctaggtaaaaggaccccccttcaaagggatatccctcaactctaagtcctctaccacttcagaaaatctcctcattgatcttgaatttagttcagtcaaacttgtttgtaaatggtgtttttttagcttctttagggcatgctaatatgcaggttaagaacatggtataggatatagaaatcttattcccctttttggttgataattggataagataagtgagtggaataatttatcctacatttttttatgtcccttttacgtgggactaataatcgctaattggataagtgagtggaattacttatcctacatttttttttcatgtagtttttttagcttctttagggcatgctaatatgcaggttaagaacatggtataggatatagaaatcttattcccctttttggttgataattggataagtgagtggaataacttatcctacatttttttcatgttccttttacatggactaataattgccttgggagatggaatattatccatgcatcataaatcttattttctctcctattttcctccattcttctacttcttcaagctttcatttttcccccttatgcttatattttgtgattttttattttattttattattatttttttgtggatggattttgtgattaaaaaaattttagaccaagaaattaaatttctgatccaaaaacgaaaatagttagagaaaatacttttatgtatcatataatctaataataatattaaaatttaaaatattttaattaatattattaaaaaagaaataaaaagtcatctatgaaatatatgttgtattttttaaaatatcgaacacatgagttctgtttttgaatctgatttttatccaaaaccaaacagtagcataggatattatatcacacggaagatagtatctctgggtatgtatatcctgtctggactgctaatccagtgtaccaaacatggccttaatgctatattatctgttttgtgaatctttatggaaggaaatggaattaggattctggatatctatctactatttcttcattatgattctgaattgttgcaaaagtcgtgattagatggtgttgatacattgtttggttctctatagaggttgtgtagatatcttagtttttagtttttatttttacttttttctttaaaggaaataagatcaatactatcttattctaatgcaattgtatcttgatccttcttataattttgaccaaactttagttagtctaacgagttatgggcatctcctgcacactatcattctaccttttcctcctcaataatcccatccttttctaatctcaatatcttttgttcaattctaaaatgaaaactttggaattgtttctacattttgtttttagctttgtgatatatctaaatcaaattttggtgctttggtcagtaattcgaacacggttggtttaatcaaataccaag

SEQ ID NO: 12380 - DNA, 4481 bp, Vitis vinifera
  Intron number 1 from transcript GSVIVT01021729001 (locus G SVIVG01021729001) derived from phytozome v7.0 (chr-ID chr1 0; pos 10190944 to 10195424)
ggtattttgtttggttttcccttgacagccttttggtaggatgaaatcttaaggctttcaatcctccaatttcactttccaagaagctaaccatttctctcatctgttgaatcttgatactttttgaagcactttcatcctcaagattctcacacactctagtaagctcatgcaccttattttcaaacagaacttcacggacagaggaagcctgaagatcaaagtagaatgttgtagcttcagcctcccatagttcaaagtcattgcttctttcatgaagctctgaattcaacttctctcatctgattctatattcttcaatttcttcatgtaacatatccaattcagactccaagttcccattcatcttgcgaagacattcaatttccctgttctgacttgtgttttcttcagatagttcaagaatctgcttctttgaattttctcttagaagttctgatttttcacattccctcttcaattcctcaacagtgccaaataattctgcagtcaagtcctgtgcagctttgagcttttgttttgcttctgaaagatccttttccttctggcttagcaaatcttttccaactgaaagttgattgttcaactgatcacttaaatttgtaacttcatgcagctccttgtccaacttctcaacaagccctttcagatgtaaattttcagtttcttgcagtcccaatttctctgtcaaaattcccacctcctccccaaggtcactgttaaccccatggatattgccaaaatcttcagcaagtgcttttagttcccctaccttctcagaccagaagttgttcaaaaccaaagacaggttactgagggcaacagtttcatggagaataacactgttttccttttctaacatgcacttctcctccttcacatctgataatttttaaaacagatatctattttcttcaatctccttcgaattttcttccttcaattctacgttggctctctgaaagtctaccagcttcttacataaactctccacatcacactttactccctccaggtggtctctcttgctcacttctagccccaactaccggttcatctctagaagctcatgtttctcgttttgcagcaccaaaagctactgtgctgtgatcttcaattcctgatcaagtgttttattctctaactcaacttctgcaccatctactctcagttgctgaagtacagttaacagaaagtggcagataaggacttcaaatttagtgcttagtcatgccaaattctcatgaatttcaatagttggttcaatatatatatatatacatattttacttgatccttgcattattcccttgcttctttctcaccaggattacttatccagcaccaaatggttgtttaatttgcatatcagttctttatcatgtgaagtatgaggttgtgaatgtgcaattggacattttttatgttctctataggcaaatttattttctactggttatatgaaagtttaattttgtttgactctagaaatgcattgaggaattctgcattcttgttgcttccatattatgatagcacaaaaacttaggtggatctaaaggaagagataatcttgaaaaattagaatttatttgcatggcctcatgataatttgtataatgattcttggaatgttttgttttgttttctggttattactttttagaatattctttgtttgcttttgtttgttttgttttctgtttttttttttattttcttcttattttcttctcacttgctgtggtctgtccatataaactgcatgtgtctttcagttgcactgccctcgatgcttttctattacatttattttcctattaatggaaactttgttgacatcttgcaattcttggaggttaacctaaatacaatcttgccttttaaacccttgcttcaagccctacccaagctttaggttattaatttaggtttgaatgttttacttatagactttattttatattaagaaaaatgacatcagaagaaggggaaaacttttccatgccaagtgcgggttcaactccaattacaggcagtacttcaactactgatggaaccttgatatctaaaagaagaaagttgacttcggttgtttggaatgattttgataaaatcatagaagatggacaagattatgctatttgtaagcactgtaagggaaagcttaaggccgatagcaagaatgggacaaaacacttacatgtacacatagataggtgcatgaaacgaagaaatgttgatattaggcaacaattattggcagtagagagaaaaggtcatggaaaagttcaaattggtggttttacctttgatcaagaaatctcaagagagaagcttgcacgtgcaattatattgcatgagtacccactttcaatcattgaccatgtggggtttagagaatttgctactagtctccaacccttgtttaagatggtttcccgcaatacgattaagggtgatataatgaagatttatgaggtttagaaagataagatgattagctacttagagaaacttcaaagtagagttgctatcacaactgatatgtggacatcaaatcaaaagaaaggctacatggctatcactgtacattacattgatgagtcctggttattacaccatcatattgtaaggttagttatgttatttttttttaacttgcaaagtgtttttttatttgatcctttaatgatattgtttgtgttaatgatattttttattcttaatttaggtttgtttatgtgcctcctccacacacaaaagaagttctttcagatgtattaatggatttcttgttggattggaatatggatagaaaagtttctacagtcactgtggataattgctcaagtaatgacggaatgatcaatatcttggtggagaaattatctttgagcgattcactcttattgaatggaaaaattttccacatgcgatgtgcagcacatgtgttgaacttaattgttaaggaaggtttggatgtcattgaagtagaaattgaaaaaattcgtgagagtgttgcatattggtcagcaaccccatcaagaatggaaaagtttgaagatgcagctcgccaattgcgtattccatgcaataagaagttaagtcttgattgtaagacacgatggaattccacatacttgatgttatcaattgctataacatataaagatgtgttcccacgtttgaagcaacgtgaaaaatactacatggttgtgccatcagaggaagaatggaatatggcaaaggaaatatgtggaagattgaaattgttttacaacataacaaagttgttctcaggacgaaattatcccactgcaaatactttcttcatcaaagtgtgcgagatcaaagaggcattgtatgattggttgatatgctcaaatgatgttgtgaaaacgatggcatcaagtatgttgcaaaagtttgacaagtattggagtgggtgtcatattgtgatggcaatagcagctatatttgacccaagatacaagataaagattttagagttttactttccactaatgtatgggtctgaagcttcaaatgagatagaaaaaatccgtggaatgtgttatgagttgctgtctgagtatcaatcaaagtctaatttggggcaaaaaacttcatcctatggtacttcatcaggttcaactcttttggagttaaactatgatgaacaagatcctctttcaaagtttgacttatttgttcatagtaccactggagaaagtcatacgaagtcggagttagattattacttagaggagtctattctgccaaggaattcaaattttgatgttttaagttggtggaagacaaatggtataaagtatccgactttgcagatgattgttcgtgatatctatgctattccggtatctatagttgcatctgagtcagcctttagcacgggtggtagggtggtatcaaaacatcgcagtaggcttcatccagatactttggaggccttaatgtgtgctcaaagttggttatggaaggaaaaagaaggtaaccgatttacataattatcaattttatgaattgttttttattaaaatatttagtaaaattttctaatattttttttggtgtttttttttttactaggtgattcatcaattcatgactcacaaccccaactcacaatgatggatgaaaaggatgatttacttgtgctttagattttttacttaagatgatgttagagacattttttctttcttttttgctaacaatttctttgtaatgtctttttttatttattttttttcaatgttgttaagcttatggatatattttaattttggatattatattttggcatgtcttctatgatgttaattaccatggttgtaactaagaaccacattctttacaatcaagttcaagacttgcaaggtagagtccttgtaaggaaatgtgggtgcaggaacatatgctaattgaagccaaca

SEQ ID NO: 12381 - DNA, 8095 bp, Vitis vinifera
  Intron number 3 from transcript GSVIVT01020935001 (locus G SVIVG01020935001) derived from phytozome v7.0 (chr-ID chr5 ; pos 16918106 to 16926200 reverse strand)
gccctgaggtatgttgcttgtcccatttgattttattcataataacatttgactgtgtcttaagttctttctatttttcaaatttacttcaaagaacaaggaaccatcatgatcatgaaatagctttctgcttagtaagcgaattctggatattaacacttattctgctggatatgacaagatcactagatgactaatgtaatcataagactttttaaagatgtgacttgatcactagaagactaatttaatcaaaaagttttttaaaccatcttgagattgtagggttttggcatttcccctgcaggtttagtagatgaaatatgtgtaatatactatttacctccttttagttggtaaactacatatgtgctacttaaaataatagcctataatgttatagcatgctgttgctgtagagtcatactgtcataggttataatcaactaggagtttgactgtggttatggttggagttgcatggtcctggcattgtatctacatggactgaattgatgatgtgatgaatatgagatctcacatttcattggggttagtatggctctatgaaagagtgggagtcaggtagcttttcttatctgtctaatgaattatggtaggaaagatatgaagaaacgtcatgagaaggagaggaggctctttagacttggctcaagtggcagggagtttggatcaggatgtgggagttccaggtccaatttccaataggggccaagaaaaaaatgttacctttgagggaggagggggggatggattggcaaagagagtgatgggcaacatgaagctgagaataatctgttggaatttgattgggggtgcagcagagaaggcagtgggagacatgaagctgagaactgtctcttgtaattgatgggggctaaagggagacagaagtggagatggggcatattccttgttgtgttagtttaggaatgtggacaaactgaacaggcatgtgtctatgctgagttttgcaaggagttgcaacaattaaggtcttatgggaggaccatgggtatctgaagggagacttttattagttcattttccttatgagagatggttgtgtgaaaggacattgaccaatgaggagattctcaaattttattagagtaacaacttgacggattaccaagatatacattggtatgaccatagttgtgaaaggcgcgcctaggctcggggcgacacgacaccaccctccggcgcctcgcctgaaggcaggcgacgccccttcaggaaggcgccgcttaggcgcgcaaggcgctcgcctccgacaaggcgtgaggcgctcgcctaagtcgccttcgacggtccgaccaggtacgcacccctctttctccttctccttctccttcttcttcttcttcttcttcttcttcttcctcccgtcgggttgcagaactctacaccctcaaccctaattttttttttttaatttgtgggaccaaacggcgtcgttttggccctatttaatttaaaaggaagggtccaaaacgacgtcgttttggaccctgttcctttaaaaaaaaaaaacaggccaaaacaacgccgttttggcctgttcctccattccagcccccttttctggtctttctcaacccgagaccactcccaatcgtgccctagcctcagccgtgctggagaagtgaagaagaagaagaaaaaaatatatatataggggaaaataggagaaaatatataagtaaattagggtgcacctcacttcactaaagcccgcgccttaggtgcgccttgcgcctcaggctccaggactactttgcgccttggtgcgccttgagccttttaaaactatgggtatgacactatgttacatggattggagtacaagtgtcaattgctagtaatcatgttctaaaaattaggaataaattttagaacatggttgcatgaacaagcaatctcatttctctttttttcttcattctatcctcaagaacaaattgaagtgtatgactaagatagaatatcaaatctgagcctaaggttatttacaacaaaatagggatttattcttctttctttgttgaatgcacctctaggtacatatttgaccaataggtatgttagacacttatcctacactgacccattataatagatgtgtcactgatgcaccatattgtgagatacatcgcattatttcatgtgatacagtagatcaacgctatttttgcttttactttttctttttactacaagatagaagagaaggtgcctgtgtgatctcttgctgttattgcactagggtctagtgcatttttgtttgtttttgtgtttttttttttttttttccaacttttgagaacgaagtagcaagaattgttgggagcttgaagaatatattgcaggtctggtaccctccgctgtgcaattgttggtgccgtacagttgtcaatgttgtgcaattgtcatgattgcaaaatttgtttgaatacaacacttaacaaatggatgtgtgaatacaacacttcaaaaatgcaattttgaagtctgcttgctaatcatgctgcaagttgcttagcaaaatcaagagccaaatggcaggttttgtttgtggaggattttctaaagccccatgagttgtgtggagtttctctaacttgttttgttatatctttcatctatatggctgttttgctcttcttttcaagttcccttttcttcctccctcttttttttttaaatcaagtcatgtatatttaggaaggatttcttgttcatcacttttagttacaaattcatatcaatgatgtatttgttcttgataaaaaacttggagtgttctatttcaaaactccacgtttgtttgggtttactatcttaaaagcccaagggtgcggacccagaaaaaggaatatggttaaccccaaagttcatttgcatgttagcaatcactttgcttgcctcatcaatgtgcttgtttgaaggagtgggagaaagaaaataaagttctgaaaaagaataaaggaaaggaaagaaatatatgcttgacttgcttatcaaaaaaaaaaaaaaaaaaaattgaaatatatgcttgagttagaaattagtttgcaaagtttgaaattgggaggcaataataaactagtagaacctgtttcaaaatttttgttttatgtatttctaaggtaaattatgtatgtatgtatgtatgtatccgtcctagacttatcttgatttaggattttgaaagaataattacattaggaacttagatacttatcttgatttaagattttgaaagaataaatacattaggaacttaaatgcatggcgcggtgcatgtatatatgtatgtattttgaaagaataattacattaggaacttagatgcgatgcgtggcatggcgtggcgtggtgtgtgtgtgtgtatgatgaggatgaatcttcaagatatatatcaagaaagggaattagtattagttgtaattaaagtaggattaatattacttggaattatattaggattaatatttgttggaatcaaattaggattagctagttgagttaaaatataattagaatttgagtcatgataggttattagagtcttagtagactttggatgttataattagaattagaatcataataggttattagagtcctagtggactttggatttcttagagaagcctataaataggctaatcaatgtaaatcaaagggatgaattaatatgaataatattatattttctttcattgcaagcttgcaaccctcaatggtgagactccatggattttcttctaggtgagactcctagaaggccttagtgagactttaaggttttccatcttttcttcattatttcttctttctctctatttcttatcttataattttctctaccataaaatttattcctgttcctctccttacaccctaaaaataaaaccctagcccacctatccttgagtgtaggcaaccatcctagggttgtcctacatcagtgtattttgaaagaataattacattaggaacttagtaggaacttagatgtgtggcatggtgtgtgtgtatcctagacttatcttgatttaagattttgaaagaataattgcattagtgtggaccctcacccgatccaccggatcgacgcgactcgcttttaaaagaaaagaaagaaatgaaaaagttggtgttttccagttttgaaaaacccgcccctggtgaggaacggtgttgtatggagtcgccacttactttttatttttatttttaaaatggggaaaattaagtaagaacaaaaacccctaatgacccaagtatggaaaaaacggtctgcaaaaattagattctgggtccgggaatcaggttacccattgggaaggtacctcatgcgaggtagcacccctctaggcccgaaactcggtctctactaatgaattgggtatgtgggagcatatgggtcaaagatcaaatgaaaccttaagccaaatagatgtcatgaatcacacaatcctagttggtatttggcatgcatatgaattcaaccaaccaaaataatgagtgcatacctgtggtccctagccaagcgctgcataaaaggtcgataaacacctaacaaacattcaagattaagcaccatgcatgcatatgattcaacaatcaaaaccaacgatgtgtacctgcagtccctagccatgtgctacagcagagggtgagtcagccacgcaacatgtattcagaatcaagcatcaaagtttgtgccaaaaaggaagaaagctggttgaaatgaggtaagggactccccaattgtcatacaaatcaaactagactcatctagaccacaccatccataacttcaaaattggcccacactaactgaaattaaacccggacttaaaccttcaagatggctcacaagtgccccattgcaaatggatacgggctcgaaaaatgccaaaatcgagggctacccaaagtcctcttgcagaacaggttgaaccagttctcaactggtacaacctgttgagaaaaattcccaaatttttttaaaagactcctaaatgagtaaagaatcaaacaaaagcaacgacactcaattctgagcccggacgagtgagaaccaaacaaagaaatatcaggtattcctcatgactgacagagtcagccagccatagtgctgaaccggttgaaccggttcccaactggttcattcggttgataaaaaatcccagatttggcctgaaagttcctaaatgattaaggaagcaaacaaaagaaacggttctcaattccgagcccggatgagtgagaaccagacaaagaaaggcaggtgttcctcatggctgacagaggcaaccagttatggtgctgaaccggttcccaatcggttcagctggttgataaaaaatctcaaattcggtcagaaaattcctaagtgattaaggaagcaaacaaaagaaacggttctcaattccgagcccggatgagtgagaaccggacaaagaaaggcaggtgttcctcatggctgacagaagcagccagttatggtgctgaaccggttgaaccggttcccaaccagttcagccggttgataaaaaatcccaaattcggtcagaaagttcctaaatgattaaggaagcaaacaaaagaaacggttctcaattccgagcccggatgagtaagaaccagacaaagaaaggcaggtgttcttcatggctgacagaggcagccagctattgtgctgaactggttgaaccggttcccaaccggttcagccggttgataaaaaatcccaaatttggtcagaaagttcctaagtgattaaggaagcaaagaaaagaaatggttctcaatttcgagcccggatgagtgagaaccagacaaagaaaggcaggtgttcttcatggctgacaaaggcagccagctatggtgctgatccggttgaaccggttcccaaccggttcagccggttgataaaaaaaaatcccaaattcggtcagaaagttcctaagtgattaaggaagcaaacaaaagaaacggttctcaattccgagcccggctgagtgagaacaggataaagaaaggcaggtgttcctcatggctaacagaggcagccagctatggtgctgaaccggttgaaccggttcccaaccggttcagccgattgataaaaaatcccaaattcggtcagaaagttcctaaaccattcataaccaatcaacaacaatcatgtgtggcctttattatccacacccaagcaatacaatcttcatatcaatgggaagaaaagatgatgaggaaggagaaaaaacatatgaagacgaggaagataaactgtaggtaaaaaaaaattcagcatgcttacctcagaatctccaccaaatatgatccgtgtatgccgatgatgacttccaaaactgagatgctgtcactctcctcttcaaaaaaaccacagtgctgaagctttcccccacgctctcaactcagaagatgctactgaccttttgtttttctcaccagcaaaatttcccctctctaaaatgtcaaaaggtcctttgctctcctatcctctcaccttttatactcatacccctcttagcatttgagcctcctgggttccttccctttcagcatcgaaatccccttcatcagcatgggaatcacacccctcattacttctcttaaacttacgaggtcagctcactccctttagttttcagcttgcttcaccaccaagaatccatatggattcgtggtgggctacaaggaacccaaaccaaggcctaaaatggacccacaacattgcccaaaaccgatctggagcttacgggcctgagccatgtaggatttaggccccaaaattactagaattagtgttttacctcaactgactcaatgaaccggctgaactggccgaaccggatggcaaccggttgaaccgatggcaaaaaattttgaaaatttgacagaatgttcctagaagagtaaggaatccatgaaaaaaacggtgcgtgattccgagttcggaagagggagatatgatcaaaacaattaccaaaaatcagtgttctacaccggctgactcgatgaaccggctgaaccggctgccaactagccgaccggttgcaaaaaattttgaaaatttgacaaaatgttcctggaagaataaggaatccataaaaagaaacggttcttgattccgagtttggatgagggagatacgatcaaaacaagcccgagtgctccgaacctcaacatgcccctataaactccaactaagctaaaacatcgggatgaccccacttccttcctatagcgtgatgtgaacgactaggaaaatggccatggtgaccctccaaaatgaaccacatatgcaccacaatggaccacagacaaacccacacgaggctcgaacaccgactaagcccaaaaagggccctagtggtgccatatgcgagcgatgggtggatgtgacacccgaaggataaatgccagtgttgagggacaaaattgagggtctacaattaggaacttatatgcatggttaaaataaaaataaaacaaaatataaacaataaaacctacacactctgaggaacctctcttttgtgaatatatgggctaaaatatcaaaaaaggaactattgtgttttctgctgctgaaattttattgtgagttgaaacatttaattgcataaaaaatgtgacaatgcatcaatttttgctaaggtacatcaatgcatcaattttctccaaggtatatgaatgcatttttttttttgataagtaaggtatgtcaaggcatttgctagtatgttactaatttgtatcctcttatgtaaatgtatgaaatgagaaacaggcaacctgaagtttcctaattgaggtattgttacatcactaatttatcatagataagaactaaaggtatggctattacttggtctttataattaatatacatgaccattttactagagtagatttgactatgaggaatttaaatcaacctgatggtaacaagttgctatttaatcatagttgttataacttacatcctggtgttgttgcataattatttttcttttaccaggtgaca

SEQ ID NO: 12382 - DNA, 12246 bp, Vitis vinifera
  Intron number 21 from transcript GSVIVT01031064001 (locus GSVIVG01031064001) derived from phytozome v7.0 (chr-ID chr 14; pos 21662486 to 21674731 reverse strand)
gtgtttgggagagtgaagtttctagttttcctcaggtggggaattatacttttcattttttgtcattttgaaattagattccgttactatcaaccatctttttgagatggttgggatgattatctatagttaatttcagatggtatgaggtccatttgcaatatatctacttttcttcctgcaatagtgaagtaactgcagtcactctgtgctgtgtactttgtcggaaccattgttatcatctagttgcaaacctctcaaaggccttatgtctatgacctggtagcaaaatgtttttgagacttttgggtggagaagggctcctttaaaaggataaagacattaaaaataaaaaagagccatgaaagtcatgaaagcgtatctaccctaaggttgctgtggaaggtgttacgctttattaggagaattgtgaattaggagattggtgtgacatttgcaaaaattggagaacatgagaaactaccaaaaaaggttttgaagaggttgatgttgaaaacatgcgggctgatctttgtccacatgttgaaaatatgctggttgatatttctccatatgttgaaaatatccaggctgatgtgtaggcttatagttctttcctaattatattattgttgtaaatatattggctgtaaactctcctagaatggtgggtagactgatttgatagttccctagaatgatttcatagagctgtatatatttccctgttgtaatctcaatatttgtatgaacgaaattcaaaattttccacatggtatcagagcatattagagttctgctcttcatttttttcctttttgccctggtctattcgttactggaatctggtggccttcattgctctgttactttgccatcattctgaagactttattttcttttctttgcactgccttatctatattttctcttttaaaaacttggcctcaattgcctagtatctctctcagatttgtggtttttgttacccagaaattttttgttccacaccaatttgttgttgtttatctccttgtccacaattgtggccatttcatcttcttcccaaaccagtctccacccttacttttcctactgaaaagcctaattgataaccaggagagttctcctttttgtgttatgttattaaatctgaattatatgagtacagggcttaatatatatatatattataaaaataaggaagttgaaaaaataagtaactaccctaaattagattcctataaatcaggaatatactagtttttcaaatctctcctaaatcgacttataaccaaatacagctgtacatggtttccttataaaaaataaggacgttgtccaacagtccccctcaagttgatgaatggatgttttccattcccagcttgccaactatcgtctgaaatgttgcagtagacagtccctttgttagaacatcagctagttgtcttttagtggacaaaaatggggtacaaattagtccattgtccaacttttcttttatgaagtgtctagcaacctcattgtgtttggtacgatcatgttgtatagggttatgtgctatattgatagcggacttgttatcgcaataaagcctcataggtgtctcccatgtgatcttcaagtcttctaggattatctttagccacaacaattaacaaattccaagcaccatggacctaaacttagcttctgcacttgatctagccataacattttgttttttacttctccatgtcactagattatgacccaagtacgtgctatagcctgaaattgatctcttgtccaccacaaaccttgcataatttgcgtcagtataagcttcaagggtcaacttctcttccttcttaaataaaattccttttcctggagttcctttcaagtactgtaggatctggtacatggcttgaagatgaatttccttaggatgatgaataagttggttcaccacgctaaccgcataggctatgttaggtctcatgtgggagaagtaaatgagccttcctacaagcctttaataattacctttgtctaccattgtatcttctaatgcctctcaaggtctatgattttgctctattggagtcttaattggtttacatcccaatttgtctgtctcctttaataagtccaactcatatttttgttgagagataaaaattccataacgagaataagcaacttcaatacggagaaaatacttcaatttgccaagatccttaatttcaaattctttcatgaggcacttcttcgaggctttttttctttttgtatcgtttctagtcataattatgtcatccgcatacatgagcaatgctgtcactttccctaaacctgaatgtttgacaaataaggtatggtcaccttgtctttgcttgtacctcatagagagcataaccttggtaaacctcccaaactaggcccatgatgactgtttcagaccatatagagccttcttcaatttatacacttttctatttcccagttgtaagccaaaaccaagagtatatatatatatatatatatatatatatatatatatatatatatatttcctcttcaagatcactgtgtaagaaggcattttgaacatcaaattgttgtaaactctaatcaaggttagtcatcaatgacaacaacaccagaactgtattcattttcataacaagagcaaatttctcaaggtagtcaatctcaaaagtttgggtatagccctttgctactaatcttgccttgtatctttcaagtgatccatccgccttgtatttgattttgaagacccatctacaacctgctggagtcttccatcttggcaattccatcaaatcccaggtggcattcttctcaagaggatccatttcaactctcatagtttccctccatttttcatgaccaagtgccttagataatgttttgggtatagacactatgtttaggtgagtgaggaaggctttatgtgcagtagacactttactataggacaaagataggcatatggggtgttgggtgcatgtctttgttccttttcgaagagttatgggtaaatcatggtcatttgtgtcaggtataaatttctatggcaacttaggattagaaatagtaaggggagaaacggttacttcattactagaaaccggttcaaagacttgagcatgaataggttgaatgatggaagctttccttcttgagtaaacctgcagaggacaaggtgtacacgattcaaactcatttagaaatggggcaagaggttttgaaaaagattcggtgattgaaacttgacttggggacagatttgtcacagtacatgactcacaaacagtcgaagaatgatgtctagaagacataggggacataggaagatcaagaaagattgagtccctatccttatcttccacaactattttctccccttgaagataaggatcagggaaatagttatctttctcggcaaaggtgacatgtataaagatagaattttcttatggaaggatgataacacttgtatcctttttgagtaaaaaaaaataccccacaaagacacggtaaagagcccttgggtctaatttacccttattttgagaatgaatgtggagaaaggcaacacaaccaaagattctggggacaagattggttgaagtgttgaaatttggaaagaatgtagacaagacttgcatggggcttttaaagtcgagcactgaggaaggcaatctgctgataatatgtgtagtagttaaaacaacctctccataggaatttttaggaacattttttttgaaaaagaaaggctcttgtggctgctaaaagatggcaatttttcctctttgcaaccccattatgttggggtgtgttgacaaaggatgattcatggattatgccttcctattggaagaatggagacaaaaattgattaaagtaatcccttgcattatctgatcaaaaccttctgatttcaacccttaactgatctttaaccatattgaaagagataggaatgactaaacacacatctgatttgttttttaaaagataaatctatgtcacatgagtacaatcatcaataaatgaaacaaaccaacgagtcccataaatatttggaattgttgaaggatcccaaatgtcactatgaattagagagaaaggaaatccggttcttttattgcttatttgaaaagaagcacgttggtattttgccaattcacaaacactatgatgaaaatgttcgacacttatttctttgaacaataaaggaaatgtgactttaagaacaccaaacgaaggatgaccaagatgatggtgataaagccaaatcttgtctttatttaacatgggggactcagaaagtaatgagaaagataaactgttctcttttctagattgtccactcttcaagatagtaaagtccatctttctacttaacatgtcgaatcctcttccccatatccttatcttgaaatacacaataggaagggtaaaataccacagagcaattcaaattctttgtaagtttctatattaacacaagatttgcattcaacttagtcacgtgaaggacatttttgatagtgagatattgattaacatgaatatcaccttggccaactgtggttgttgaagttccattgactatgatgatttttttgtcactaggattcaaggtgtaggagataaatttttgggagttataggtcatgtggtcggtagcccctaaatcaatgatccaagaactagggtcgattttatttgagacatttagtgcataagatggaatcttacctgagagtgccaaagaacaagtatcagtagctctgggcttctccaatgttcctaagaagtttctcaactttcctacttcctccttgttcaactcagcttgttcttgaggattgccttcacaatcgggttgagcttgagatacatgagcctgtcctttgatgatccaccccttttgacccagtttctattattttgctgttgtgtggccttccatgaagctttcgacacttttctttagtatgtcgaggctttttatagtatgtgcaccacagagagtccttattaatggctctggacaagtctgattgaccattttctcccccagactgttgatcgggtgccatcatcttgcattatttgtcaccaaagccgagctcttagtccctggagtctcaatccttactccacgtctgccttcttttgcccttattagagcaatagtcttgtttagtgaaggaaagtcttcttttcccaatatctacacttgaacatgattaaattccatattcagcccaataagaaaatcataaattctatcattctcaacaaatcttttcaggagagatgcatcatcactgcacttcatttgtatgttttgataaatgtccatctcctagcacagtcccttcaaatgatttaagtactctgtgacagaacaagtaccctgttttgcgcttgacatctttgttttgatctcataaattgtgcgacatcatttacctttgaaaatgtctcatgaacataatcccaaacttccttggcttgtcaagaaacatacaggtatcgctgatctccaatgccatgttgttccacaagtaggacatcaccattgaattttcttcatcccatgcctcaaatttaggatctttttgacttggtttagtacaatttggattactcaacttgcctcttcatttgaagaacgtatgtactagttgagactgttggcgccttagatctaagcaatggaagcaataccatttttttttttttttaaattaatctttttagggttaaagtactaacctttaggtttggatgttcctaaacctcaaaatccaagtgttgaagacgaccttgaagttgttggaagtctcctaaacccatgatcttccgcctaatgactcaaccttattcttggcatacttccgatggggaggaaaggagggtggtgactatgactctctttccttctatatgatggaagacaaaaattatgaaaaccctaacccctaaggggtatttatagggttcctaagtgggcttaactgacttgagcccacatgggcttgggtcacttaatgtagctccaaatgggttctaattgattaattaacctaatagggcctactaattaatcaatcagcctaatccagagagcttgttcacttacccttatgcaaccttgcttaattaccaaaacacctttatgcacaaaagtgaacctagagtcaatccaactcttataatccgtgctagcaaggtatatgagctcagaacggggaccattgggacccataggaatactggctccctcataatctaattataaagttgattcaacattccactacgaagaatcaattgaactctagtatcctatgtaaataacaacaagacatcaagtgttcgggtctgtgatttgttatccattgtgttcaatctccgcatgaactggtgtccgtagtctaaccaggtgaaaactatcagcctttcaagattacctctgccatccttaagttatagattttcctattgtgtgttcaattgacatatcttagctctcaaaaagcatatgtcaagttctacttaagaaactattatgaccatagttttcataaacacacctccttagaaccacccaaggggacacattgtcttaatcccaagagatatcgtggtgcctctattgagaatacctattgctaccagtttccatcaacgatgacccaatccatagggattatatgattagcctatgatctcatccgcaagtcaaagtcattactaactttagcacaaactcaatattctctcaagattgagagacaatgcaatgaagtagcttggtaaggtcatgactatttgataaccttaagtcatgactcaccgtaatttctatccaatttgtaaccatacacactagtgcacataccatgggaaacccatcccagtagccaagaccagccatccctctaattaggatgtggtacactacaacctctaatgggttgcctaggcccatgaattgattgtgaacaagtcatctatttgcaaagaacccatgacttagattttccatgcaactcttaatgcacccaagtcacgtataatgcaaaagatgcagactggaatgcttttaaaaaggatagataaaagtgacctgaaactttattaaataaataataaaaaacaagagtctattacatcaggtcatgcttttaagggctttatcctaatagagaccactttagataattcttaccattcaatcgataggtagcttggatgtttggtgtatgtctcatagaatggttggatgtttgttctattatgtttgtcaaagatactagtgatttaggtggtttctaacatatcttctatgaagagaaggaaattgagggagaagaggtgggatcaaaaaacatagattgatttctaagggaacatgggccaatccaagaacaaaaaaggttcaaacaaaacacgatgacaagaagcttcgcattgttctcttctactcttattgtaacacaaaccctagggtttccaaattggaccatagatgaaactgagggagaagaggtgggatcgaagaacatagatcgatttctatggcaacatgggccaatccaagaacgaaaaaaaggttcaaacaaaaaatgatgacaaaaatcttcacaccgttctctttttactcgtactgtcacataaaccttaaggtttccaaaccagaccagatggagggtctcttggaggtgtttcttgaaatttccgattattttgcattctttctctatctctccttcgagaggcttctcgattttagggcttgtgattccaatcataactctttgatcaattatgcgctctgattggctcaacattgcttgaagttggtagaagattttcttggaggtgcactttgatccataacttgctaactgggctctaattccatgataaccaggagagttttctcctttttgtgttatattattaaatctgaatcatgagtacatggcttaatatatgtatatatatatatatatatattaaggaagctgaaaaacaaaaaaaaactagctaccctaagtcagattcctataaatcaggaatatactagttatccaaatctctcctaaatctacttataacccaatacagctgtacatggtttccttataaaaaataaggatgttttccaacaccaatcacaatcagccaactcaatggccacaatctgccaagttattcatcaaaagcatgaggaagattggctatttgtgaagaaaagttttcattcctaaggatgatgttcccaagtttgagaagagaagttgaaaattccatggtcatgtcttggctgcttcgttctttgtaaccggaaattagcaaaccacttctcttcctttcaacaactaaggagatttgggatgttgtgactcattcatattccaaggtggggataaagggtcaagtttatacttgaagaattagattcattctacaaagcaatggccacaaagtattacagtactatagaagggctattgctagaattggacaaccatcaacaattcacacaatccattgctaatgttattcggctgctgaagatgactgaagaagataggagttttgccttcctagtttaaatctttaactagatcaagtaagggttcaagttctaggaaaagaacctttcccctcattgatagaggtgtttacctatgtatgtgcaaaagagagttgtcagattgtgatgttggaaaaaccatctgtggagaatttggcttttgcaattccaaatccaataattaatctacagctgagaagcaagaagaaaggggatcgactgcaaaggatacaaagtggtgttatttttgtgacaaaccttgacacacgagagatctattggaagcttcatggaatccctgttccattgggaaaaatggtgggcaaggagagaagtctgaccaaaaacaattgggggattcattgaggaacaattggaaaaatttaaagaccttactcgactaaatgtacactctcacatctatgtgctcctattatcaacaaggtgatacctataagagttaattagtttttcaaattgtaattttggcccttggatcattggttcaggggcctcaaacaatctgaccagatcttcattttatttctccaactatataccatgtgtaggaaataaaaaaggtttggcaattgaccataatgagtgaacaatcgctagtgaaggattgattccctatactaaagccatatcattaaattttgccctaattgtttcttgtaatctagtttcaatagcaaagctcaccaaatatcatcgaacaattgctagtcaaggaattgttcttttattgtgaagtttgtgaaagggctaaatatcatcgaaccactttccagtcaataaatgaaagatctttgatgcctttaagtctcattcatactgatttgtggggcaaatatagaattcctaacatctttgttgcaagatggtttatgccatttataggtgaggaggctttctcccttataggcttcctagagtgggtaacatccatttaaagggaggtgattctttttgtctttgttttttgaggccctagccgccttgtatactccctgtatgctttgtggcgttctgcctctcttttaatgcatatcctttacttataaaaaaaaaagatggtttatgccatttattgatgatcgtactagggtgatatatgggtttatcctttcaaacacaaatatgaggttaatacaaactttccccatttttcataagatgatttgcgatcaaatagcctcaaagattgagaagttgcaaagggattttctttggtctagggcgggggaagggaagaaagatcatcttatcagatgggatgttgttagtagatcaacggagttgggaggtttgggttttgggaaaacttctctgagaaacattgctctcttagggaaatggctttggaggtttcctagagaaaggagtggtctttggcataaggttattgcgagtatttatgggacacatcctaatggatgggacgccaacatggtggttagatggtcacacagatgtccttggaaggtaattgctcaagtttttcaggatttttccccttttgtccgcctagtggtggcgaatggggagagaattcgtttttgggaagatcattggtggggtaaccaagatttatgctctcaattggctggtctttatcgagttatgtatgtgaaaaacctcattgtctcaaatgtccttggcaattccttttcattgtcttgaaattttaattttcgctacaatctcactgattcagaaattgatctccttcagaatttaatgtcttcccttagttcaatgcttttctctcctgctttggcagattcaagagagtggtctttgtcatcatcatgcctgttttcaatgaaatcttttttcttggccttgtcaaaagtctcaaatcctatcttgttccttccggccaagttcttgtggagttcaaaagccccctcaaaggttaaggcccttgcttggttagtagcacatgggaaggtaaacacctatgccaagttgcaattgagaagaccttacaaatccctctgtcctcaatggtgcattttttgcaaaggaaatggagaatcaatagaccacctttttcttcattgccctgttaccattggactttggcacaagttgttcaatctagcagggttggcttgggttcctccaaggagtattgaggacatgttggttattgcttttaaaggcttggggaactctttaagaggcaagacacttaggcaaattgcttgccttactttgttatggatggtatggcaagagagaagcaataggatctttgaggataaggggagaacggaagagatgttatgggacttgattctgttcttttcctctctttgggcctcgtgtattgtagcttttagaggagttcctctaagtgttttacaactcaactggactgtggtttgcgcttcaaaagtttgaaagtgttgggttttttctgtgtttttagttttctttagttgggtgttttctcttttgttcagtttttgttttgtgggaaggacctctcatccttcttttggtttcttctctttctcttgtatctcttctttctcttgtatcttttcctctattaatatatttttcttcgtttttgataaaaaaataaaataaaaataaatatgcagctgatatttctctatatgttgaaaatacacaggctctaatatgtaggctgtaagttctcctaaaatggtggctagactaatttgatagttttctacaataattccatagaggtgtatatatatccctgttgtaatcgcaatatttgtgtgaatgaaattccaatttctccacaccaacaatgctcgcataacatttaagaatatttctcaccataaaaagtaaaaaagatggattattgtactagacatcaagcaatagtacttacatcatatgggcacaacgagcgatgtaatatttggattaacagctctctggagtgggtaccatagtgcagtaatgtaccagtgtagtgtgggaataaagatgcagttaaggttttgtgtgactaaggttaaattgtttctcattcattgtttctttagtgggaaattgtaaacatatgaggcctggcaaatcatttgggggcatcaatatactaacttatgtttccagaggtgatcatgtcatatttgacttaaaaatagacatccatctcatatctgcaatgccttaaactctcgagacaattgcttcttcactttcttaaagtgggagtaaaccactttcttgtctatttatcttttttatacctgtttggaggctccatatttatttttccatctctctcacccccccctctctctctctctctaaaattaacctcaacccagagatgaagtttatttagacttatctaataatcatgcctgacttccctgccttatatcatttttctgatttcttctattcattaaagcatacctttaaaattttctcttatcttggtggtttaaatacttgcagatgaatgcattttattacgattttatatttcttatgcttttccattcatatctatatgtttttcttgtctcattttatttcaaacactgatatgttactatgatcatgaagccggacactataaggaacttgttggtgaaccagat

SEQ ID NO: 12383 - DNA, 9805 bp, Vitis vinifera
  Intron number 11 from transcript GSVIVT01022591001 (locus GSVIVG01022591001) derived from phytozome v7.0 (chr-ID chr 8; pos 5633302 to 5643106)
catttaatacttacttggtatgtatgctttttcttgctaaaattgtaaaggtttctctcagttgatcttgtgcctctataatacatctctctaaattgctaacataccccccatccaatctcaatccttggatggttgagggctaatcgcaccagtaaattgataaaagaaaatattttgaagtattcattttatatgtgtccttttttcattggctggaagaagagggtatggtacgattactaatttggtaccatagaatgaaaaaagtgtatttttcattttaagtattgaattcaaaatcgagaagtgtggggttaccaatcagtttaaaaatataataatgtcttgtaatgaattaaaattatgctttgttttgatagacagttataaataaattaaagggcacctaacaaatagtggagcacctaaataattttgtttggaaatctcaagtccctcttaaggttaagtcctttgcttggttagtgacacacaagaaggtgaacaccaacaacatgctacaactgaggagatcctacaaagccctcagtcttgatatttgtatgttgtgtatggagcgtggagaatcggtagatcaactttttttacattgctctttgaccatagggttgtgacacgaattatttggattggataagttggactgggttattttaccaagggataggagttggggagaagtgtgagaatggtaaggacgttgaaggtctttgtggagaggaagaccttcttggttaggttcgaaggtgaagccgagggaaaatggtgttcgtttatagagcacagtagaggctttgttttcgccttaggctttgagaaggaagaggttggttggatgatagaacatttgacgaaggccattgagatgatgaatttcatgggtttcaacaaaaaattcagaggaaaaactagagtccatttaatggaggtttgcttcaacaatcatggtaggtttataaggctctcagagtttgcttccaacagaaagtcaactttcctggtaatacctgagggagagaatggtaggggatgggaacatctaaagattgcgttgtcttcaacgttggtggtcccttcctcgagtattgttgaaaaaggaaggcagtgcagggaggaaaggacttttcacaaacatgtgggtcctttgtaccaatccttcgcgaatgtagtcaaataagaaggaccgaggaggggaggccttgttctagtcgggagatgggcgagagctgtagcgtgcgaatgtcatgctggttctgttaactgggttgaggtcggtcgggctttggcgaaaagattagggcataaaggtgtggtgactattgtccccttctccggtggaaaaggtttattttttgtggaaaccacagaggaagctttatcactccacgatttaaggtttatcaggattaagggtgggcttacagtcttgttgagaagatggtcgccaaaggaaaatttagaagtagaggggaaattcagaggaggttggatagaattacggggtttgccatttcatttatggtctgaggtacatctaaagaaaattatggagtagtgggggacggtgatagagattgattggtgaacgatgaaactgtttgattttagcgaggcaagggtgagagttttaatgaaggaatgatcaattctcccagctttgatcgaggtgttagatgggggatgggagttcacagtttcagtttcagttgcagtggctggagaggaagacgttaggcgaggtagagaaatgagtgagtcaactcggcagaagtttgagcctcactcgtggataggtggcagaaagtgggttgaggaggctagatcaacggttgcaggtaggtcttctgatggggcagttggcagaatgaaggagggaagcggttgtcaaaaggctaaaattgctgctgtggggacacgcggcaagagaagaccgacagtggggaacaactggtcccaaccttccctatctttcagtttgaattcaaattttatgagaactgggtttgtcgggccaaggcaggatggagaagtatgggctggaggcgacaaagcccaatcaactgatgaggaagggctttgggcctccaaacaagtgagaaaggcccaatcttctcttaagcccagtccataggttgaagctgacttgggccggaagaggggagattccttaaatggccgattttcgttgttgggccaagaattgggaggcgaacaacccatctctacgaagggctctttacgcagagatgacccctctgcaaaaggaaaggggaaggtaggctctggggcttttgaagatcaattgaggggttccgcgttgaagtgtggttcaaagaagctgtggaatgctctgttaccttcaagttctggatgccgacaagggggccgaagttgaagcgagcctttaatgcttgaaagaccgtcatcagttagcgatgctcttccaaaggaagatgctttcgaagcaagaacacagctggaacgaagctttagtgcaagtccaagtcgttcgttagggtttcgaaaatggtgttctggggaaggcatgtcgccgtcgagtggagacgcggatcaaaggtctgttcttaaggctccttttctttcaaaggggaaggagaaactgcgcaaattctctaaaggtgaagacagagcaggttgtaagggttttgcgggttttcctcatcgtggctcatcagtcgcggtttttccttcttttccagtaaccagagaaaaagggctcaactctatggggtcttgtggattgatggtagtggaaaacctcgaggtatcttcttatcaacattctcagtcatctctgtcttttctttcccttccctctggcttggctcttcctcacctgagtccttctgttcccgttcttcccaattcagccattcagtctcagtattctacgaaaccttgagttatatctgaaattttttccaaaaaagatgacgatggagctttttgtcttgggtctattggcaatcctaaccgagatgttgtggtgtcccagttatctagtctgaaccaattgttcgagagttttaaatcttttaagaccaaacccaatatgcttacaattagccagggtgatgcggaattccccctgatgggtgggttctaaatagaaggcctttcccccagcaaaatggtcgaagtttgtgaggtcttaagttctctggatattaaggtgtattcaaggcggaagaacagtaattgagacctgttggcattggtttggaggtttatttatgaaaatcatcagttggaatactaggggtttgggatctaggaaaaaacgaagggtggttaaggattttttgaggcttgagaatctagatgtagtgatgtttcaggaaacaaaaagagaggtgtgcgacaaaaggtttgtaggtagcgtttggttggttaggaataaggagtgggctgctcttccggcatgcggggcttcaagagggattttgatcatttgggactcaaagaaattgagcagtgaggaggtggtaattagatctttttctgtctcaatcaagtttttattggatggatgcagacccttgtggttgtccgcagtttatggcccaaacaatcccttactcatgaaggatttttgggtggagctattagacatttttggcctttcttttcctttatggtgtgtgggcggtgattttaatgttataaggagaagttcagaaaaattgggtggctctagtttcacttctagcatgagggattttgatggttttataagagattgtgaattacttgatccccccttacggaatgcccctttcacttggtcaaacatgcaagagttaccggtgtgcaagaaattggatcggtttctttattcaaatgagtgggagctattattccctcaaagccttcaagaagttcttcctagatggacattggatcattggttgattgttttggataccaatcctttcaagtggggcccaccaccttttaggtttgagaatatgtggctacaacatccaagtttcaaagagtgctttagtagttggtggagagaatttgaaggaaatggttgggaaggtcacaagttcatgaggaagttacaatttgttaaggcaaaattgaaagattggaataagaatacttttggaatgctaaaggaaaggaaaaaaagcatcttggatgaaatagctaacattgatgccattgagcaagaaggggttctatcttctgatctttctgctcaaagagttttaagaaaaggggagctagaggaattaattttgagggaagaaattcattgaagtcaaaaagctaaggtgaaatgggttaaagacgagcattgcaattcaaagttttttcataaagtggctaacaatggatgaaattggaatttcatcaagtttttggagaatgaaagaggtttgatgttggataattctgagagcatcacagaggagatcttactatattttaaaaagccctactcgagttctcctggagagtttttgagagtagaaggcatagattggtccccaatctcagaagagagtgcttctaggttggattccccattctccgaagaagagatctttaatgccatttttcagttagatagggataaggcgtcggggcctgatggttttaccattgcagtatttcaggattgttgggatgtgatcaaggaagacttagtgagggtgtttgcagagtttcacagtagtgggattattaatcaaagcaccaatgcctccttcatagttcttttgcccaaaaaaagtcagacagaagatttcagatttagacctattagcttgatcacttgtctctataaggtaatagccaaagttttatcagggcgattaagaggagtactacacgaaactatccactctactcaaggtgcttttgttcaagggagataaattttggatgcagttcttatagccaatgagatagtggatgagaaaaggcgattagaggaggaaggagttgtcttcaaaattgactttgaaaaggcttatgaccatgtgaattgggattttttggatcacgtgttggagaagaaggggtttagtcctaaatggaggaattggatgagaggttgtctgtcttccgtctcttatgctattttagtgaatggaaatgctaaagggtgggtcaaggcatctagaggattaaggcaaagtgaccctttatccccttttttgttcactattgtcgcagatgtgttgaacagaatgatattgagagctgaggaaagaagtatgttggagggttttagggtaggtaggaatagaactagggtgtcccatttgcaattcgcagatgatactatcttcttttctaactcttgtgcggaagagttgaaaactctcaagagtttattgttagtgtttgggcaaatttttgggcttaaggtcaatcttgacaaaaggaatctttttggcatcaaccttgatcagaattatctctctaggttagccttgttgcttgactacaaggcttctgattggcctatactctacttgggtcttcctttgggagggaatccaattgcttgcagattctgggatccagtgattgagagaatctcaaggagattagacgggtggcaaaaggcttacttatctttcggtggtaggataactcttatccactcttgcctttcccacattcttagctactttctctctctgtttaagattcccgctttagtggctgcaaaaattgagagattgcaaagggatttcctttggtcaggggttggggaaggtaagagagatcatcttgttagttgtgatgcagtgtgtaagccaagggtaaaagggggtttggggtttaggaagatttctttaaggaatctcgctcttttagggaaatggttgtgggggtatcctagggagagtacaactctgtggcatcaggtcattttaagcatttatgagacacattcaaatggttgggatgctaacactttagtcagatggtcacatcgttgtccttggaaggctattgcacaagtctttcaggatttttcaaagtatactcggtttgtggtaggagatggggaaagaattcacttttgggaagatttgtggtggggggaccagccttttgaaatcccaatatccaagactatttagagtagtcacagataaaaatcttcctatatcttcaactctcggttctgctcgccatttctcttggaactttaatttccatcataatctatccgattccgagatagaagatctaggatgcctcatgcgatctcttgattgtacgcatttatccacttcggcttcagatgcgagatcttagtctttatcttcttcaggattgtttacagtcaagttcttctttatagccttgtcccaaatgcccgatttatctccacttttccctactaagtttgtatggaattctcaagtccctttcaaagtcaagtcctttgtctggttagtggcacacaagaaggtaaatactaatgacttgctacaattgagaagaccttacaaagctcttagtcctgacatttgtaagttgtgcatgaagtaaggagaatcagcagatcatcttttcctacattgttctttgtcgatggggttgtgacacagattatttcagctagccaagatggattgggttcctccaagaagcatttcaaacatgatgtccatcaattataaaggttttggcacttccaagagagggatagttttgtggcaaaatgcgtgcattgctttaatttaggttgtgtggcgggaaagaaatgctaggatatttgaggacaaagctaggaattcagagaatctatgagattccattcacttccttgcttttctttgggctttttgttccgtggtttttaagggcattccccttaacgtgttacaaatagattgactagcagtgtgtagttccaatgggatggtctagccaagagagcttgttcgtagttttcatagtgtagtttcttgatcttttattgtgttgtttagttttatctttggtgggaggattcctcatccttcttttgtacttctttttctatcattatatatttttgttgtttcctataaaataaaaaaataaaaaagttggactgggttcctcctaggagtatttgtgatatgatgactattgcatataagggattgggaaactccaatagagtattgttattgtggaaaaatgcttgtatgactttgatttgggttgtgcgacatgaaagaaatgctagaattttttaggattaggcgaggactttagaggttctttaggataccattcatttccttgcttccttttgggcatcttgcaccacaactttcaaggattttccctttcatatgatccaacttgattggttgttggtgtgtaagtacaaaggtgtgggctagtaaggagaggttatatttagtattttggaggtgccatttgtttagttctttgtttttttggaggatttctcatccttcctttgtatcttttaatcattatttaatatattactgtgttgtttctcattaaaaaaaaaaaagaaaaaaaggtgggtggtccaacccatgaacacaagaagcatagcaccaaaaggaaaagaacagtcatgaacactttctagccctagcttaagtggacaatgaatgttgcaagagcaattcatcatcccaacagaactttaaagtactccaatagggtcttctgaatccatgaaaagcacttcaagctttaattggagcattccttctttctagattactgtctgctccactttctccaaatgcaccaatacgtggagagacgagctattccccacgctgcttctcttcctcttatccaagccctaagcatgttacctgagaaaagatccttttgttttctcctggaagaacccactgcaactctatagttgtgactaaaatatcccacaaggactccaatgtccctgacaccacttaatcgcccataaatctgccacttttgcatttttgttgtcttgttacaaaactataaaaagaagaaagaatatcttccaaaggatgatcccttttttcctttttagttttattttactgtataaaattttactgtgagttggaaatacttattaatttttttcatggttattttatttttatttttattttttatttgttggttttccccccaaaattgtgacttgtaatgaaaatccagaatttcttgctaattttcaaaattttcaatcctttcaatgaaaattttcctattacgccttgcttgtatcttacatttagctccatgttgttttatgaaaacaaaaaagggaaaaaagagaaaaaaggttgtctccgtattcttggagttatgcactttttccttgtaaagatgaattatggaacttattcttttttatccagataagtttatgtgttctggacatataatctcaaatctagcttcagctttcagagtacagtttaccaatttgatatatacatattaggtccttatttggatgagaaaatgttgttgtgttattgttatttttttaataattaacctgtattttactcttagagtatttatgtaaaatttggataagttagcactgttgcttatgggtttcttgtttggtgggtaagattttctgtacactatatgctctcaattcttattttctgatctgaaggacactgccatttgaggtagtaaggtcaatttttgtccaatattaaaaacttgtcttcttgattgttgaaaaatgtcttaaatcctttttttggcctatttctaaatatttgatattttcctatttggataaaattttgttaggagttttcctatttgtaatattgtgatactttcttgtgtaaataggttttccctctataagatattcctacaaaattagaaaataatatgggaagagattttgatctaaagaggtccttttggatgtaactaggactttgatttgagagttttaggattgtaaccttacctttgagtatagttaattgatctctcctctccccatggatgtgacgcattgtcaaaccatgttaaatcttgttttctcttgtgattgctttcttatttgttttttgttcgcttgctttagcataagatttatctatcatagtcccattctagtttggtaattcaacgcttaagcaaccaatggcagagggaaaagatatatgtccttatttcttcatcttccttcagttgtactattttctatgttgtcatcattgaatattgaatcctaactttaagtaggcctattgaggaaattttttggtttttaacatattcaaaatctggatggagcattttcttctccttgtgattagtacaaaagtatacatgttttatgattttatgttctttttgatacttggtcttcctcctaatcagataaggcaaatgttaatgagaacattgcagcatattgtattcaattgggcttctgaaaaatgtttagcagttgcttgtagtgcttggttgttcattaagataacagggattcattgtcaagccatgcgatttgtcagttttggatgacagatagcttatgaactcatcattttcttgggagatagcgtcaatatgagtttactcatctctggtgcaaaataataaataaaaggaaaatccataccatgaggcctcatagcttatattttacatcaccttgatctggaagattcttttcaaattcagtgaatcacttggtaaaattagtactcagtactgtgatctgaaatgatgttcatgcagaaaattgggtcatcaggtcagcaaa

SEQ ID NO: 12384 - DNA, 5302 bp, Vitis vinifera
  Intron number 3 from transcript GSVIVT01035235001 (locus G SVIVG01035235001) derived from phytozome v7.0 (chr-ID chr4 ; pos 10914307 to 10919608 reverse strand)
cttgacttccgccaggttttttcctgggtttctaggtaaaaattttgttctagttctttcatattgagggctcttttgcttttcctttttggttatttcttcctcaaccattttgtatgaatactgagtagtcacattacatgtattctatatgagaaactaggaaattctcagccagttctgatgtgaacagaatgcaaagttctgttaagagtacttgattcttgccttgtagttcagtttcatagcaagcaccttgagatcctgttgactcactttgattttatactggaaaatactgtggttgtatagcattctttcaaagtgatttgtttattgtttaatgctctctcttggattttagtttgatatcaagaaatccaatgttgcattcaagaattaaaagaaaagcaaatagtcacttcttttatgcacaaaaatctcctacttgtatagtataataaattttgtcctcattttgtttggattgctgagatatatatctaacaaaagaaaagcattgataaggtatattcaaatgattctataatggtttctaactcctttaatgggattattttgagacccctatttaataatagttcattgtgatatcttcattatgaggattatgagaatcttcctttgtttctccttaccacaaacagtagtgtttaatggaggttgtcacaggccactgaattggtctggagtttctagatgtaaattggccatgcttatatgattgatagtcaatgtttaattaggttaccctaatagaattcaacatataccttaagttaccatcccagttataaaattttctttcaagaatttgtttgacaagtcttctattttggcctctggagatttgagtgacttgggtctgctgcattattttcaactgcaactccaccaccattcttgtggttatcttaccctattgattgattgtacagaatctttgattagttgttggcatcaatagtttcagcttagcatgttggagatgattcagcactgccttgataaattatttatagattttaaaagggaaaaaggaagaagtgaaaaataattgaaaaaatgtctatttccaatggtttgaagtagttttatttacttatgagtgttctatggtgatttttgtggaatagggaaggagggagaaagggaggagggagggagtgttttcatgtgtgtagtgtgctttcgtgcatgcctttgtgtgtggtgtgctttcatgtgtgtgtgtgtgtgtaggttcacagattggatttgttgaaacttggaaacacattttcttctatttttataattatatatttttctttagagaaagagaaagtgagtgtgtgttcataggttggcacattttctcgtcattttaattattattttttaagagtttgtgtgtgaatgtggttgtgcatctatgggtgtataggcatttagtgatttgattagttaagctttgaaaacacatttggttctatttcttttaattattcttttttgaagagtgtgcatgtctgtgtgtgcacgtgtgtgttcacaatctgattagttaaactttaaaaacacatttttcttttgtttttaattatcaatttttaagagatagatagacacgtagagagagagggggggcggagagagagagagagagatgaagctcaacatcgatctccttcaagctctttggtggatgttcctataccttctatcttagtttccgcagttgttaatgaaccatagcttcctattgtacctagtaaagataatcacaattgtaatcatcatcctcttactcactatatatctttggatataacctttcctttactcttaaatatgtatatatttttttttgataggtaactttttgtcccgattgagccaagtctcaagggctcctttactcttaaatattttgtttgtgccttgtcttctatttcattcctaaatcttattaggaaactctaaatcacctagggtaaaagaagacaatggaaaaagatatgcatgctctctctaacaaagatacatgggaacttgttaatttaactaaggaaggatgttattggttgtcaatgggttttttccatcaagtatcatctagatgggactatagaatgattgaaggcccaattagttgccaaggggtttgtaatcaaacttattatgtgaattattttcagaccttctcttcccaacatgtctttagttaaactcatttattaaatagttactagacttgtgattaccttttttgttagtacaatgggtcaagttcatagaagcacccaagaagattaattgggaaacattatgtagtatcctagggtataggtatctcaaaggtaccataagtatgaatgtgctctacaaaaaaaaggtgattctatctgtgattttctgagcttcttagatgcaaattgggctgatcctcaactaataggaggtccacataggtattatacctttgttttagtaacctagttacttgaaggagtaaaaataaaatttagttgcaagatctagtgtcgaaatatataataaagggctatggctaatatattgtgtgagctaatgtggatctagaattttccataggagtttggattttctcttgaagaggttgtgactatgtattgtgataatcaggttgttgttcacattggcaatcagcctatgcttcatgtgagaaagtgagcatatttaggttcactatcattttgttaaaaatgttgtgatgagaaagaaagtgataataccgtgtatcaaatataacaatcaggtggaaaatgtttttctaacctctaaaaagattttttattttattttattttctatgtttcaagccaagtcttacaaatatatatgccccaatttaagaggtagtattaaaggattattagttacaattttatttagccagagttgctttagtcttttatggtattttgaagaccatgttgttgatgaatcagaccaagaaagggaaaaacttattttccctttatttgctcctcaaattatttgaacttttttttttttgtattttgttttcttaggttcataactttgtgtaaaatctgttacccagttgtgggagcagatttctcttttagtttcctattttttattgtaaagcattatataaatccctcatacagattattcaaatcagtatacagtaattgtatcctattcacatggtattacaacctttggctttatttggtaactgtttttaaaaacagttcttgaaaatagtttttaaaaactattctttgatgttttgtagaataaatctctatttgaaaacttgaaatgtttttaatctattttctatattttaaaaataacttttatatatggtgcttatttttagctattctctatatttgtataattattttttaaaatagcaaaacaagtgaaaataattaaaaataactaaaagatgttatctgaaaatatactgttatctatttttaataataaaaaactgttttccatttttaataacagaaaatggttttgtttttttattatgaaacatgttttcatgtttttttttttttttctgaagaacaaaaactattttctagaagagttaccaaacaggtccttatgctctttccttatgatttcagccagtttttttctcagccctaattgccagaattgcatgacattcattgctggcagaatcattaccaaaccatatccagtattttcattctctttaatagaaaatatcagaagcctccgaaccaaacaggtccttatggtctttccttatgatttcaaccagttttttctcagccctaattgccagaattgcatgacattcattgctggcagaatcattaccaaaccatacccagtattttcattctctttaatagaaaatatcagaagcctccgaaatcactacaaccaatgctgattccaatattgttcccacccaaaattcatctggaaaataccagaatctacaagcctcatttagactcaatggcgcatttatttgatttggtcagagcttgtgaaaacattcctgaatggaagggaaagctgagtcatttaataggctctgcacccagtgaatatgatccaagatttacagtttgggatgaggaggttccatgatcatctcttggttgtggtattcaaagcaactggaaataagcagaacatgtatgtttcttacaacagtaagggaaatctgggaggctgttagacagacctattccaaggtccaagatgttgtccaaacatatgaaataaagactaaaatcatagccaccaagcaaggtaatatgtctgttacagaatattacaatatgatgaagggtttgtgggatttaagtgcagcgaagatgctgcaatgatacaacagtttgttgaaagagaaaggatttttgagttccttgttggccttaatggggagtatgaccaagagagagtgcatgtacttggcaaaaggtctgccatcattgaatgaatttttttcaatcataagggtggacgaagaaaggaggattgcgatgcttgattcccctaccacagagaactcagcctttgtcaccataaaatcaaatggcagcgtaccatattcaggaagtggagcatcaaacaagaccagaaggaatgagcaaaccaatcaagacaatctatggtgtgcttactgcaaaagccaagacataccaaggagaattgtggaaaacctaatggaaaactgccacagttctttggaagagattgtggtaaccgaaatgctcaatctggacaacagaatggacaagtcaacattgtgcattctgaatacaaccctcacccggaaaacacaactcccactacactagaaattaatggattcaatagagaagagattgagcagcttgggagtctacttacctcactagaaaatccgaaattttcttgctctttagcactatcaggcaagtattctctatttcattcttttagtgcctcaaaagattgtttttctagtacttgcgtgatcaactcaagtgcaatagaccacaagacaacttcatccaattgattcactgcctatgatccttgctctgtaaatcaaagattagccaatggaatacaggcttccgtggctggtcaaggataaattatcttaacatcctctctcacattaaatgttccaaacttatctctttatcttttgtcagttcaccaaataacaaaagatcttaattgttgcgtgacattcgtcctaactcatcatgtgtttcaggaacaagttacagggaga

SEQ ID NO: 12385 - DNA, 6333 bp, Vitis vinifera
  Intron number 2 from transcript GSVIVT01018374001 (locus G SVIVG01018374001) derived from phytozome v7.0 (chr-ID chr1 5; pos 10180056 to 10186388 reverse strand)
ctctttcaccaggcatgcatttctatgctacttgtcttgtatatatttgtactgtgttgtatgctatcctcataaatttgttgtgtttttggcctcattttagtctcattttttaataatatttattattctcttgtctttctattttctgttttcaatcataaactagcagatttcaatttgggagaccttaggctttgttcttaaatggttacactatattttaccaagcaataagatcctggaattggctacaaagtggcaaataaagtgcacatttgggcagcatggatggtgagtccacaaagcatctaaaccaggaagcttctcagaaatggcaagctgacagaattgggaaccagggggcagctctggaacacttctaatcagctaaagttcatatggctcagaaattggaattggctagtttggcaccataattgtgagtggatcatgtgtgataaagtagtcaacagcggttgtgagtaatgcaattgtttagtgaggcaatgcataaaggagagtagaaggtttcccaaccttcttcaaacaatatcaaaccttaatccctgcaaatcacttatcctaggagtaggagcaatccttgcaaatcacttatactaggagtaggagtagacatagcccatagcgatagttctagcttctagttctcataatcacttgttcattgataatgccttgtttattcaacccttcatactgcctttggattggtggaatcatgggttaattgagcttgctcttttttttttctttttctttttttaaataggaaaacaaaaatacattaaaagcgcctgaaaaaacacgcaacaaagtacacaggttgtatataatgtatgctaagaggtaaagcaaaaaagtaaggggcttaaaaaacagaagtcttttcaaaagtccccaactgttcaataaaatctatcatggttagaggtctctatatacatcttcacccactacataaggttcccttgaaaattgaacttaagggattgatgagacatttctttgctttcaaatgctctgaaaaagaccaaaataatgctcaaaggcataatcctccgcattctcttttgcttcttttctgtaaaataattgtcatattgggaggaacttttttaccgaacttaactacacttaagcaatcccgaataaggaaaacactaaattccataacactttagctttagcacaatgtagaaggatgtgattccccaataggcttcccatgcaaaaaaaaaaccttactttggttgacgccatcgcattccaaataaaacacttttgatatttcctgcctaagaaaattgtataaagacttgattgaaaattttcccttctttgcatccatccaatccatcttgtcttcctactcacaaccttgccttgaagccttcaaagcaaggcttcaaccttttccatcctccaatcttttaaattccttgagaagcaatggtccaaatgtccactctcaccttgttgatccgatacatcagccacctaatcatcctttgtcccaactatggaataatacaaagaaaggaaagactctcttagagatgaatcatcacaccatttgtttttccaaaacttcactcttctactattactcgcatcaaatgaggttttgtgattaaaatatttccaaactctcctaatggccttccacaatccaaatctaaaactacccttactttccttcaaacaccaatccccttcctccctatacttttcaacaataacccgtttccattgggaatcattttttgagacaaacctctaatttcattttactagtaaagccctctcgagaataaggtttttagtgccaaggccttcattatctttcttcctacaagtgatctttcatcacaccgggtgaggttttttcttaccccataaaaaatctctttgaatcttctcaatcctcccattcactttcatgggcatgaaaaaaagagacatatggtaaatgggcaagttttacaaagtgctcttgatgcgagtgagtctcatatccttagataggtattgtccatagttttaaaaggtacaaggcgcacctaaggcacaaaattctcttacagcttaggtgtaaggggcaacataatgtgtgagtctgtgccgaagcaaagtgaaatgtgacctaggataattttataaaatatgatccaaaatccaatcaaattaataaaaaatttaagattccaaacatttaaaaaaaaatattaaaagaaagtaatgaaatcatataaatttcaatatgcaaataaaaatttcaagaataaaagttcttaaaaatgaaaaataaagtagatgctctctccaacaagatgcacgtcttggcaattgaggcaccataactaaggatatgcgcattgagcctaaagcatgttttaagtgtgcctttaaaaactatgatattatcgtttccacatagctagccctttgtggatactctcttccaccaaatgctaaccaacccttgacttatagggggctctcaagggaagatccaaatatatagtgaggggatccttctttctacaacacaacttagccactaattcctcaacattagtgacactatccacaagaattgattcactcttgtccaaattcttcaaacccatgttgcatgggtttgagtatgagtgttagatgtatgtgtttaggtgtctaatttctcacaactcaaattttagaatacggggacttagctaagaaggatctaaaaaacgggcatgggttctaggatatgacataataaaagaaaaatcaattaaaaataaataggaagtgaagatatcatttgtaaaggctcttatcttttccctctaatcacttttttttcttcttatccttgaatattcttacaaaagttcacttttcagctaattcttgtttttctctaatgtaattattattaagaaagttgaaagaataaaaggatatcagtgaaaaaaatcaaacaaccacacccaaaggcaagtaggagtgcctgactaggatcacttacccacacccatgtcatgtcatgttgatatgggtacattgggtgaaattgatggatccgggtatcatagcttcaaaccacatgaaggtccaacttagatgtaatattgctcatgactagcttcatagagaataagcatgtcatatgcaaataagagatgagacacctctgcgcctttgcctcctcttccacttaccttaaaacctgaaatataatctccttgccttgccttctttaaaaggcaactgagcacctctatagataaaacaaacaagttgaaaagggggtcccccccttgtctcaatcccttctagctctaaaagaagccaacagaggttttgttcactagctctgaaaatcttgttgtagaaattcaccatttgacccgaatgagcttactctttgtcattctcttctcttgttttagatattctttctgatgctaagtggatttgaaagtactcctagtaaaggttattcttcatcaataaatcattgttcaatcatgtttcacttcagcacaaactggtagtagttgacgactgttaagcccagaagtctgattacttttccgaatgtaaaacaatttctcccttgtactcagagcatgaaattacttgagctatactgattttgatgtattccctagctaatgattgtgctgaaacagttactttttttaatttatttttttataggcatgctgaaacagtttcttatattctttttgttgtatttgatagttacaagatgccaatttcactaatcagaccaatcaaatgttacaacaccttggattggcaaatcttagggagcacaattcacgtgggtacacaattatgatctagagaccctgattggacattgaaaggaaagttactaacaattgccccctacttatatgattaggataagaaatgttatgaatgatcccaaaaggatgttagagtttgttctttttttttttctaagtagttggatgctatgcttaaacctgtttaatgcatccttcttctccttttggcttgctcttagccacacacaagaacgcacacgcacacacacacacacacacatttttttttatgggtaaacacacacatatttatgtacacaagttaaaatattaagtagaacacttactatataattcatagaggtaaactctctgataaagaaaaccaaatgtcttgtttcatgctttgctaaggcatctgctgcatgattgcctaaacacatccactgcatgattgcctaagcgagggacttaacaaaaggaacatctcaactctgaagaaatataaataatttggcatgcctacacatcaaactcctacaatcctttatcattcttagtcagccatgatataaagtgtatggtactttccctatttctttaataggatttttcttaggggaactaatgtgtatgcatcccttaaattttgaactcaatgcccaacaataatctatggttgatcttatggatccaaacctttcattcaattaatgggatgtactcttacttaaattgatgatacaagatccttaaatttctggttctattgatgtcttatttcttgtaaaatgagatgaaagaggtctaggaagacaaaagtaaagaaaaatataaatcacagctagagttctgaagcaatctcactaataagaaggcattcatatctttaaaagaagttaggtgtctactaaaactctcatttcataaatgaaatgaatcctaatttatatatatatatatataaaccgtcagctaaaactagggcttgctagtgtagtcatgccaataatatgaaaattactaaactacccttgatgattctcttttcctctttctttcataagactgaagggttgcttccaatgttgttctacatcaattgaaggtgaaagttttagtatccatgcataattcttatacagtaattcttatacaggactgtgatttgtttcagatgagaacatttatctccatgtactttttgttcaaagtaactgaagaattcctccacttggtttcagtaaaaatgcttgcgaaattaaaattcaatttttttccaaactttgttatgaattttgaaggtcaactaataaagattgactttcaaatgacaacactgattcaacatcttctttgcctgaaaaatttcttgtgacaaaactaacaaaaagcattgagagcagtaaaagaacttttgattccaagtgaaactaaagtcattgcaaggagaggatgctgttgctgatacaaggaatatgtaaataagagctatttggatgccttatatcattgccttaagaataccatacaataattatgtagttaaatttattgtgttgaagggatgattctgtcaattcacctgaatttgtatgctgcaaatgttattttcaggaggttggtattaactgacttctttatccttacagtgtctttgaggccaatgccaagtgggttgctttgttaaacctggtaataaataaataaataaatcaaccaaattcagatttagattgctataattgtcttttttatctaattatttctttcatttaatggccattaaaatatgagatatttgttcccaacaagtagcaatatgtttcaaacagcttggctatttttttgattggaaaacataaatatatattaacaaaatgtgcaccaaagtacacacactgtatacgaaggacactaaaaggcaaagcaaaaaaagaaaaagggtcatcaaaacaaaaaccctttaacttgtcccaacccaatgtacaaaatctatcatggacatggaaccttatggacctcctaactcaccccaatagactacaaaggaacatgaatttgattgcttgttctgacttctttacgttgaaaggacctctgattattttccttccatagtgccaaaacacacacaatggaacaatccttcaaacctgtctgttttttccctaaaaaaagaatcatgcgaccctaagagggtttctctaaccaaagaagacatcactcacacaatccctaacaaagaaaacacaaaatgcaataataccatcattttaacatctgtctctgactcaaaaattcaaattttgtttatttacattaattgttaaaggcttagttcaattttagaaatgctacttgactgctattattgtgcttgttattattgtcattatttttaaatttttatttattttttgtggttgcatcatggtgcacaaaaagtcatttgaagtaggttcctcaaccattcatgtgcatttgcagctaccctttc

SEQ ID NO: 12386 - DNA, 4045 bp, Vitis vinifera
  Intron number 3 from transcript GSVIVT01034068001 (locus G SVIVG01034068001) derived from phytozome v7.0 (chr-ID chr8 ; pos 15426167 to 15430211)
gttcatctgataaacccaccaggtaataaacttagttggtactggatcttgctcttgcaacttctttatactagggaaactaggaacatacttgggaagcactttatacatgatatggtgtggtacatatttcaaagaaaactaccagaaagactggtacatgtcccatcttaagtcccatcttcagtgtatcaatcacgctgtgcaatgtacgggttatattactcatacaatcaagcctgactatttttaaataaaaataatattttattttatttttaaaaaaatattaactttattgtttaaaaggcttttcaatgttaaaaatggatgataaaaggaaaggatgagacacaatgatgtatatggaagtggtaacattaggtaaatgttattgaagttaggcatcaaagattgaagcaagcgtaattgttactccaacaaagagaagatgttatatgaatgagagatatgctattgagatcatttttttttatgggcaaacaagaatatataaaagacgtcaatcaatgactaggggacacaccccaagtatatgggaggtatacaaaggatgccaaaacaaaaaacaaaacacctcaaacaagcacacgaaacacactctcactaacacacactcaaccaatcaataaaatctaatagggaaacaggaccatcttgaatatgttggcaagtccattgggaaaggatacaaataagaaagtcctttagtgcgcttgattttagcgttgaattccgtcaaagtattttcaattcctctcttaccaaagaatccaatacaagcaaagaggggctatcctctaaatcttttttctatttttgctaacaaaactcccctgccatctcttaagcaattctttcataagaaaagggaggacccaaaataagtcaaagagagaaaacaacaaatgctaaggaccccttagtttttcacaatggattaacatgtgattagttgattcttttgaactcatacacaaaaataatggttagccaacacctaacctcttatcttaagttgatttgaggttaggaacctttcctaaacaacctcccaagtaaaaaaaaaaaaccctacttttaaaggtgcccaagatccccacactaccttcgagagaaaggacactcctacatttgactctgagaaagaatagaaagattttgctaagaagttcccattcgtactaactttctgaatcaacttgttttcatcctcactacacttcctaagcacttgaagcctcctaagtaacttcctcaattcattctcccaatcttgaaactgtgttgtgaaacttgggttccacacaacatgcctactaacgacctcccaagcattcgcacctaggcatctttattagaagcaaaagataaaatagtactttaaaggagcattcccatgccaaacatcatgctaaaattttgttcttcttccattgctaaccataaaacttatcctgtccttacagtcttcccaacctcctctcatcaccttctagaagccaacaccatatccctccatccctacaagagatcaccattctccaggttcttacccaaactttcccactataacctatttccaaagctattcccttttcaaagcaaatctccaacaccatttttcaagcaacgctttattgagagaggacaagaccctaatactaaccctccctgtttttttatctttgtagatggaagaccaattgactaggtgaggtcggtcttttctcgagggctcctccccccaacaagtagtcccgttgaattttttccaatcttaaagccaccactttaggaatgacaagaagaggcataaaatagataggcaagctgtaaaaagtacttgtaagcaaagtgagtctaccaccctttgagagatggtcttttttgagcggctaactttttatgtaacttcttctcaaccacatccgacatagatggggacttgaacggggcacccaaaagcaagcctaaataaatagtttgaagtttccccactttgcaacccaacaatgaggcaagctcctcaaaattagggacctccctcacctaaaccggttcgcttttatcaagaattttatctttaaaattaatttaattaattacttttaaaaataaaactaattttcttttctattctttttttctttttaagatacataataaatagcaacttttaatttttttaattataaaaaattctataaatatccaaaaggattattaattttcgaagacaaacttaaaaatggaagaataaaattatcctttcaattaaaatttaatttcttatctatcaattgatttgtaaatatatataaaaataaataaatttaaaatttaaaatattttaattgatttttaaaataaaatttaaaggctcacaaaattgcagggtatcatccgtgaataggaggtgagaaatcttcactccctctctattctacctcctacctggaagcctgaaaagaagtgtccctgttgttttcaaaagaatattgagagcctccatcactagcacaaacagataaggggatagaggatccccgttgaatgttgaccataaggaggatgatgaaagacaaatgaaaagtgaagttttgcttgacatactgttttttcctttttgaatgattgtgcactttctcattatttacctatcggaaatgaatgtattgtgaaagaagtgaccacttccccaattacttcctttccgatgtgcatgaatctttgctgtcaacttgtaattttttttataggtactgtcaacttgtacatattcctaagtaaaatttatatgtggagtttttgaagctgatctagtcctcttctcatttgatctaatacaaggaatgcatcattagtacgtagatgcatgtaatttgtttagaacacttgtaatctttcctttcagtaccccaacttatggttccaaaatgccatcattaacccatctagccttgggaccttattgcctgttaaatcttagagctgactccacttccttttcaatgctctgtcaatcaaacactatgtcttgcattaatagaactaaactgttaaccatctaaccttgctctcccgcttccttctctgttgggttcctactgtgaatcttttcttccattgtcttctaaactctgtctgcaaagtacccatgtgattaaacaccaataaacaagagccagccattggaagaactttttattttgatcctgctcctacctaagtgccctagtttcttattcttccatttccaccgatctatgctatccatctttctttcaattctcattcctacctcttccactgataactcccaagttatctactttatttacctgttcattcatttttttttcctaaatctcattcctttctaagtgatattccaaaacccatgacttttgttctgtcacttggggtgtgatagaggtgaattcgcatggatattgattttgaattaattttcttatcatatcttttgatgtacctttttaggttgcagaatataaatcttggacaagttacttccattttggaaaagaaatgaagaacaattcttttttggattgttttcaattgtttaagtgcttgcatgtctgaaaatgcaaaaacaagattttgatattttttaacaatgatgaattacaaggaaatttttttagagacagtttttcataatttgctacaggccatgttttccagagcattttcatttttctgttcttgaaaaaaaaaaaaaaagttctcatttttgctattaaacatgaaataagcctttctcttttttggcaaaaaggaaaaccctttttcctcattcagaggtacaaaattttgtgccatgagaaccttgaatttgctttcaactgttttggtggttggttatattgaaccaacttggagacataaaattttgttcagtgaggacaattgtctctcaatttgcttttaactgattattgtgaatgcgtgcgtgtttgcagttcagaaacaagaccaggacagagacagaacctaa

SEQ ID NO: 12387 - DNA, 3026 bp, Vitis vinifera
  Intron number 4 from transcript GSVIVT01031365001 (locus G SVIVG01031365001) derived from phytozome v7.0 (chr-ID chr6 ; pos 19551964 to 19554989)
tataaagaggacctcgatttagtaagctaatattcttccttcaccattagcttttctcctttcatttaaatctttaaagtgccatatgtttgttttgtttgccctgttgacaattaccttgtaacgttttacattctagccttgtccagtctttctctagactacttttggggactttggaaaaagtcaagttgcttgatgagaaagagcaggagccatactttttaaattacaacttctggttaaaaaaatttgtccatataagaagaacattctatgtttcagtattgaaacatttttggtcttttcggaggtggaataaatttcttcttttattttaattctcaaataaagtgctgggcaattgagtgggagtgaaacattttaattctcaattagtgtttaatacccatggggatgaattcattttttgcctgaagttatagcacgttttcattgctagttactcttcttctccaactattattgatcatatttgtaaaggacttgattgcttgtggtagtcaaaatccttcacaaatttatgaactgctctaaaggtttatattgttgttcaccagttgttttatttcagaagtctcatatgcctctcagtcttctaatactaatggtatgccattttctagtaatagttctgaaagatgtgaaattgtttcagtcaattttgataaaactttttctttggagtgtaaatactctctctttctttaatgacatgttttttttgatagactctttctttaatgacatgttgagatctaccaatctcaactaataaaaaagaatatggtgcatgtgtagtgtcgatgctattaaatgaggcatcccttcagagtggtacacatgacttggaagtaactaatatacagtgatttggatgtgctggtcctcaaggatacacaaaaagtttaacatacagcaacaacgaccacaagaatagattatcatccatcccatcttatgcttgaaatatagagaagttgcatctaaactattgtaattttttgcaaagatttcaacaacattacatgctcaaaatttagtgaagttgtatatggactactaaaaatttttgtgtgaagatccagataacctgaaacaggcactagatcatctagcaccacttgctaaattcaagagaggagccagtctggtcccaaaaccaaaaaatgccaaataagaaattcatgattagtcttccatccaggatttctttattatttttaaaaggaaaataattgagttcatacaggtaagtcatatgcaacaaaacttgctgatattggtccgcttggtactggactatgacagcttggcctgtagccatatgtttattgtgatccttagaaggagcattatatgtgccacaatgttgcaagaaacttgggtttgacattttaagaggaccttgatcccaatgcttggcctcatttcttaagcaaaaagaatctagatttcgtacctaggttcatggcagcagggatgatgggaattagggcctttgatttacctctgctcaatttcttttttcctttttgtgggatggataagcaaatgacgcattcctgaaatgaagtatttagattactcagagttgtactgagacaaaaattagcatttgaaaagccaggtgcatcttcgccctttatctaaaataatttgaacaacaaagtgcttacaaaacatatctatcaaaaaaacaaagtgattacaaaacatataaggactttaaattttggttgactttccttttgtgatgcatgacaaaatcattatcttagcaaaaatgctaaattgtataattattgctcaaagttggattccttacttatctgcttcctaactacaacttttctagtgttatacaactcaagcatcaatcatcctatgtgggaataattgtttcctgaatattcttttatatttatgttaccttctaaatgtggctgcccaaaaaagtgccactgtgggggacttatgggaccagaatgctggccaaggtgattggaacctaaggttttttagaagtttcaatgattgggagctggccttggtggacgaattgttgcaaatcctaaggaatcaaagaattaatttggaggaggatttggccgtgtggaaggggggaaaaaatgggaagtttggtgtcaaggatgtgtatggactgttgaccagccatagtacatctctgtttcccaaaaagggcatttgggtggagaatgtgccttccaagttagcgttttttgcatgggaagctacttgggggaggattcttactattgataggcttcaaaagagaggatggcaaatccctaaccggtgttacttatgtggtagtgatgaggaaaatgttagtcatcttcttatacattgtacagtggctagtgtgctgtgggggatggctcttagtatgtttggagcccagtgggtctttccagagactgtaaaggaggtaattaccagctggaagggtccctttgtgggcaaaaagaggaagagaatctggaaatccataccgttgtttattttttggacggtgtggaaggaaaggaatagattagcatttagggggggggagctagctattcagaaaattaagtattcttttgtctgtaatatgtgggggtgggcaaaattgtataatggtgcggagtcccggtcccttataggtttcctagagtggatagcctccagttgagggctggtgggtttttgttgttttgttcctttgttgtttggcctttgtcgcctcgtatactccctgtatgctttgcggcgtttgcctttgctaatatattgatgtttacttatcgaaaaaaaatatgttaccttctaaatgttttcaatatggtttgtcatggcctgtctccatttatttgttttcagcattcccattattggcatcaatgtatttgttcatgccaaacttgcatgattaaacttctcctaaaagggtgttctaattgctttgtatgctcatgacagaaaaaccatttgtctggctt

SEQ ID NO: 12388 - DNA, 14275 bp, Vitis vinifera
  Intron number 1 from transcript GSVIVT01020865001 (locus G SVIVG01020865001) derived from phytozome v7.0 (chr-ID chr1 2; pos 830545 to 844819)
gtcccatcgcagcaaccaggcgtcatcgatattctgtaagtttcgatcacttctggttccgtttgtttctccagaaaaagaaacgacgcgaatattttcccttctcgatggaaatttggatttcttttggctattcaaaacttaattacctgtatcatggcttttagaattttttgtgttgtggaatttcaatcccgggcattatgataagactgatgactttgttttgttttacaaagaaagctataggttttcaaacagtattgaaagtccatgttcttttagctctatttacagctgcccaagtaattaggtttagcttgaaaagtagtaaccattttatagaaatatagaaactgttttatgggtacattcttttaataagctcaattgttcattggacaacaggagaagcaagacagagcactacagttgttttaagttgtcatggacctctttagcgattatatggtcctgcaataggtggagaggaaacttttcctctgggttttgctgcataagaaaacatatgccatcgctggaatttctggccagggcttaataatgggtgattattgtaatcgttaattttttagagtaagatttgtgtttgtgtgggtacaagcatatataatgctactccttgtttgcaccttggaaagtacaagagtaaggggaaaaataaataggaaggaatgtcaaattctttggtttggtttgtcaaaggagaattgcttaaatgttttgtgcatttttcagattcttcattctttataaattggagaaggatcaaagaaaaatttattttggtcaaatttgttttttgttcttttccttcactcttcttttttgcctttccctcatctttaccctcattcttttggttacccaagtaaattctcaatgaatgctaatgcaaaagtaagttgatatgaactaattttctgggctgaggttgaggaacagttatcttttagagctagtagacttggggcccttattgcatgttgcccatggcaaacttctagctttgagttattaggatttttagcttttttgaagtgtagttcatgttttgttcaaatatcaatttgtgacttcagaaattcttttggggattaaagtttttggtttagggttgttaaatagacagtgcagcttatgaaaattgttggtttggtgctttcagaagcttgttcagatgcatacttctgaaattaaccaattttaaaatcttcgattgtagaactagccaacattgatcacaactgagtttattaatgatctaaattattgatagtggttgttaattgttcttgtattcagtgctggttcttttttgtcttggtggctcctcttgtatgcaccttgtgtacgtagggtgtgcctcccctttttgattggtgcttttaatgtatctttttgttttcctgtcaaataaataaataacattgatcacacctggcttgtctcaattaggttgctgaaagattgggctgggtttttgctgtcagtaacataattccttaagatgatttctcaaagcaaacacttttaggcaaaataagtaaaataaagtctgcaagtgatgaaaaagaactgtatcagtttcctgtgcaagcagggtgaggagttgcctaatcatgttctgatgcattgtggaatggcttgcagtttgtagacttaggaatctctttgtttggatggtcaggggtcttttccttattcgtttttttttgataagtaaaggataatattgtattaaaaaaaccgccaaagcagcggcttaaagattacaaagaagaaaacaccccccactccctagctggatgccaaggacggaggtgcagcccgaaccccaccctcaacgggttcccacccaatcaataaaatcaactaaagtcgaaggaccaccttttataaacagttttgtctccgaccaaaggaaatatataaaagaattcttaagtctttggattgacaactcttcttcctaaaaggcaactttgttccttggcttccaaaccgtccaaaaaagacacaatgggcttgctctccaaactcccttcctcttttgtcccacaaaagacccgtcccatcccaaaagcatcgccttaactgtagctggcagcacccactgcaccccaaaaagagagcaaagcaacgcccaaagagtccttgccttggcgtagtggagaagaatgtgatctattgattcttcgtgcctttgacaaaggtagcatctgttcgctaaagaccatcctctcttttgaagttgatccaaggtaagagcctttccccacgttgctttgcacccaaaaaaactcactctaagctgcacgtaaactttcaaaatggtcgatgaagggaaagaggttagggggcctgagactaatgatttgtagagagacttaacaaaaaaatttccacttttagtctctctctaaatcactctatcttccaccgcctgctgaactttctttccattaaggcccaaaaagaacctgcacacctcatccatctcccaatcattaaacggtctggagaagtacgagctccaactctccccaccctcattggaacaccacacatcttttacccaagcatccttgaaaacagctaaagcaaataaagagagaaaagaaacacaaaaaggttcatccccacaccatctatcttttcaaaatttccctcaagaaattcatcatagaagaatagaagaaaatcttttaaacaaagatattcaaatcaaggttgaaaagattaaaaaacaaattgaacaggatttatgttcttctgttcctaatgcattttggaatagaaagaaacataaagtatctttgccctatgtggaaggatttgatgaaactcaattacctatcaaggaaaaacctattcaaatgaatacttagttacttgagaattgcaaagaagaaataaaagatttattgaataaaaatcttattagaaagagtcaatctccttggagctgtgttgctttctatgttcaaaagccttcggaaattgaaagaggtgcccttagacttgttatcaattacaagcctttaaataaggttctcaaatggataaggtatcctatacctaacaaaagagaccttattggccgccttcataatgcttcaattttctcaaaatttgacatgaaatctagattttggcaaattcaacttcatgaaaaagatagatataaaacggcattcattgttccatttgggcattatgaatggaatgtaatgcctttcggtttgaaaaatgctcccttagaatttcaaaatataatgaatgacattttcaatccttatactaacttctccttagtatacattgatgatgttcttatattttcaaattctctggaacaacatttcaaacacttagaaacctttcaaaaaattgtaaaagaaaatggtcttgttatttttgctcctaagatcaaactgttccaaaccaagattagatttctaggatttgaaatctatcagggtactatcaaacctattcaaaggtcaatagaatttggaagtaagttccctgatgaaatcaaggataaaacatagcttcaaaggttcttaggaagtctaaactatgtgtcagacttctaccctaaccttagaaccacaatcaaacctctgttttctaggcttaagaaaatgtcaaagccttggactcaggaacacacagacatagtcaaattggtcaaaattcaggttaagagtctttcctgtttaggaatcctccaccttgatgcctttcctattatagagacagatgcctctaatttaggatatggtggcatacttaaacaagattttcaaaataaaatctccattatccgatttcattctggaatatggagtggtccccaagaaaattattcaactatcaaaaaggagattttggctatagtttcatgcattaaaaaatttcaagaaggtgttttcgtcaagaaatttcttctcagagtggattgtaaaagtgcaaaagaaattctttaaaaggatgttcaaaatattgtttcaaaacacatatttgcaagatggcaagctatcttgtctgtatttgattttgaaattgaatttatcaaaggtgattcaaactctcttcctgattttctctcatgtgagtttttacagggaaaatgagctatcaaaagcccaaagctacaaaaacttcaaagtcctcttatgcaatgccccaaaaccatccagaaaagcccaattctcaaaacccaaataggttccatgttcttggaacttttcctccaattcagcccaaagaaacttttgctcaaaaggcctcttcaagtcaaagccaaccttatgtggataaagtctatactttgaaggtacaggttctcgaaccttttcaaattttaaaatctgggaaaccagatctttcaaaattttttgccaaaaacaaatattttcttcagagtaatccagacaaaactcggaaattttatgagtttattctagttgacactgaatctatagagatttctcacgttctacagatatttgttattcaaaatgcaaaattttcaaagtgcttactcataaaacgtggggtcagtctcctgatactcacaaaatgttttcagaaaattttaggccaaagtcctatgattactctgattatatggacgtctggtactttactttttatttttgtccctttgatcactcatggttcttccattggggggatgaaataaaaaatcaaaatgattttccaaattggtttcaagaatggtggttattctttggagccactcaggacattctttgtcctcaaatcaaggaaggattctcttactttgttgaacatggtagtcatcttcttccagctcctgttcaagagtaatgttctttctttcaaaatttcaaattccatggattctctgttgggactttgttctcatccagatgattcccgttccttttcctgcgcatttggccaggaaattcaaagtcaaatggtggtcaagttttaccccttcaaatgctcaacaacttcccgctatccatcagtggatttctaggaaaaacatttctccaaagccttttgatcttcctccaattccaacagatgttttgcttctttctcgaactgcctttccttatgataaggagtacatcaagcatcttagacttttaaagaaaaaagccttagaaaccttatcccagttctctggttctggttatgatgatgatgatactgcatcctctgcttttttaggggatgtcaatgaagacatgtgtcatggattcccatacacacccttgggttgatgcatccaagacttcatcaaataattccattttcaagtctcttcaaaagcaccagattgggctacctgtcaaaggatcgttgagagactccattcatgataaatgtgctcacgatttttggggttattctcgtcccagcttttcaaagcatcgtcgactgctcaagcatctccaatctagaggaatgggcttgctcacatttcaaacagatgacaatgatgacagttgtatgactgaagttcactacaatgacatgttgatgaacaactcaaatccacagttcaaaccgctcttcaaaactatggatcatttcaatgggcgccgaaaccgcctttcaaaagtaaggacaactgtacaaaaggacaacaaactttcggtggattagaaaagatttcaaatctgcggacttcaaagggtttcaatcccatttcaaagagtctatataaggactccatttctcattgtaaggcatcagaaattttaaagagaattctagtgagagaaatttgtgagatttccctctaagccttgtattgagaagctcaaagttctcaaagtttgtttaaagcttccttcaaagattgtaagttttaaattttcaaagttcttgtatatgttctttcattgaatgaaatttcaaattttaaatttaactgtgcatttgttttcattgtgcatcatattcatcttctctttcatcttctatttgaaagtctaagtactttatagaagttctgtcaaagttatctgggttttaagagagaccattgtgactcctccagatttaactgggagatttcttcaaagttctaattgattttcaaattagagtgtttcttttatgttcattttcttatcatccttgatcccgtgtttatttggtatcagagcagccatttactaagtttattttcaaattgaatttgccatttattttatgaatatttgtttaagttgcaactgcttagcgttggttagcccttgttgtgtgttggtaagccgttgtagccatggtggcgttaggtgttcccgccggtggtcccactaagtagccttcttaaacaaagaaaacataattcaaaatgttaaatttgcttggaaatcttcgtagaagtagctccagtagaagtataaacaggatggaaaatgatctcaaaatggtagaagaaaatacttctaagtttgaaaatcaattgaatgtatcaattgatgctctagaacaatatatcaaaaactgggacatgccttggcaagaaaagcataagatttatcaaagaggaacttttgattttagagcaacttacaaaatcaaagtgtctgaaaatacacattctataggatcagaaactgaaactatagaacttttaaatccaagagacagaaattttaagaaaacaaaatttcaaaatcatacatatagaagccattcaagtggtaatcaaacctttaactcgactagggttaaacaaaccaatttgtgcttgtctcagagatgcaagacacaataactttgatgattccttgttaggagtcataaaatcaaacatggcacatggccctgtttatttcaattgttttcctgacctagagttaagttgtattgatgatttatccatacaaaaggctttaactttaaatgttcaaaccaaaggttatgatatggatcctagagccaaaaacattcgtatagtatatcgaatatactataaggcaatgaccacatcagtaaatgcaaagtgtttgttgaagcctacaaaagggaaaacccttttattccaatccaatgaagaacactctacggtgatggcacccttagagatcccttgggaatctctaacccattcaaatacttggaacttcaaccaattagctcttccaaaacctatcaaaaataggaagcctctttttatcacacaagatgataaagggaatgttgtcatccagtttcctccaaaagaaatgggacagagtagcagaatctttgttcaagactcagtccatgggagtagaatttcttcacctccaagacattcttttgaggtgaattctcgaagaccatctgtcaaactggataatgtagacttttcccctaacattccttatccaaggtatgttaaacaagagtcttctcttccaacttctccaacaccctctcaaatgttacctcccaatgaacctcatcaattaatggttattgatgacgttactaaaccttttcaaatagataaggaatacttgagcaaagagtttcatctttcaaaacatagggaaaaaagagaatggtttttctctacaaagcttaccactcaaactagacataagtttagggaagaatggtataagagtatggaacaaaatggaatcaatattcctatgttcacttacttggagatatacgcttcaaacaataatatagaatatcctttcctagaagtcaatactattcaaaagggacaagtttggaaaactgcgtccaaaaccattgttgcaaatcatcctcctctagaagaagtcaccataactgcttaaaacatggaagtaatagcttctccattcaaaatcataaatcccaaagatgattaaagaagatccgtaactttaaaagattgtaaaaatcttcaacaacaaaataactttacaaatcaaatcttaggaactctttcctcacaaatggatagaattgaggatagattagaagatcatcaagcttcacgacaaatagttacaccccactttctagatagaaatctagataaaaattgtccaattttcaaacgcgcggaggtagggaatcataagcttaaattttcacatcatcaacaggatttacttcaaactttaacaagtaaaattgcacaattagatctctccaataaagcctcatctttgaatacaaaatcaatcaatgtgatagaagaaatcactcctgaaaatgtagatgagatacatacactatttgaggataaggaccctcagataaataggattgctcataagttcaaacagcaaagtaggactaggaatttctattctagacccacacctcctgatcatcaatatgaagaaagaagtcgaatagtccaatcaaagtatgatggagatgacatccatgaatggaagatagatggagttagtgatcatcaggtcttgaatattctccaggaccacaacctacaaatcaagaggaaacctcgatctaacaatctgctttcatttaattgcaggatttattggacaactcaaaggatggtgggataatgctcccacagatgaagaaaggagattcatccaaaagagtgtagatgaaagtggaaaccctaatgcggttcatactttaatctatgtcataaccaaatactttctaggagaccctctttcctttcaatctcgaagttatgagattcttcaaaatttacactgtgacaaattgagtgattacaggtggtataaggaagtatactttgccaaagtacactcaagaacagattgtaaccagccctattggaaagaacgctttctaaatgggttaccaaaggtttttagtcaaaaggttcaaataaggattaaagagatgtacaatggtataatcccttatgattctttgacatatggacagctagcaaattttgttagccatgaagcattaaatctttgttctctgatcaaagtcaatgctaccataaaaaaggacttcaattctgccaagaaagagttaggatcattctgtgcccaatatgggtatgatattcctcttcctccttcggctagacataaaaaatttcatgagtacaagaaaaaagaatcaaacaaaaaacattcaaagtttagagaagagccattttctaggaaatctaaacataagaaacattcaaataaaaaatatcaaaaacattgctctaaaaaggacaatggaaatattaaatgtttcaaatgtggcaaaaaggggcatataactcccaattgcaaagtcaaagaaatcattgttgacctagacataggaaaacgtcttaaaaagcaaatgataaatctcatcaaaacagagtctgattcatctagccagtcttctgggtctagtgataaccagtttcttctacttgaagagatctcttcaagtgatttgtcctcccagtcatcttgtgattgcgtaggaaattgtctatgtcaaatcaaacaggttaatatgatatctagtgaaagtaattttctcatagaaatcatagaaaatattcttgatccaaatcttcaaaagaaatactttaaaaaattcttagaaattcaaaaacaaagtaaccaaaagagtctagaaaataatgactacagcctaaaaactgtgttagataagttttctagtaaacctaagtcagtaggaatacaagatctccaacatgagataagtgaaataaaacttcaaattaatacaatgttagttcaaaatgaagatttagaattaagactaaaagtcttagaaaaaggaaacattcaaattgaggaaacaaaaaaagaagaacaattagaagaaggagaatcttctcaattgtttgtaaacactaacaaaaatgattagacaaaaatggcacatcaaaataagaatttttatcaaacttgatttttcaaaagatataatcgcattagttgattctggtgctgatattaactgtatccaagaaggattgattcctttaggatattttgaaaaaactttacaaagggttgttggtgcaaataaacaagcccttcaagttaaatacaaagtttcaaatgttcatgtttgtaataaaaatatttgttacaaaatatctcttcttcttgtcaaagatatgaacaaagaaatgattttaggaacacctttcttgagccttctatatcctctaactgttgataaagaaggaatcaaaaccatttttgaaaaacaagaaattggtttctattttctaaatgctccagagataaaagaattaaactctatagacaatcaagtaaatttaattcaaaagaaaaaacaacaaatcaaatttctaggaaaagaaattcatcatagaagaatagaagaaaatcttttaaacaaaaattcagcccaaagaaacttttgctcaaaaggcctcttcaagtcaaagccaaccttatgtggataaagtccatactttgaaggtacaagttctcgaaccatttcaaattttaaaatctgggaaaccagatctttcaaaattttttgccaaaaacaaatattttctttagagtaatctagacaaaactcggaaattttatgagtttattctagttgacactgaatctgtagagatttctcactttcagaatgaaagttctacaaatatttgttattcaaaatgcaaaattttcaaagtgcttactcataaaacgtggggttagtctcttgatactcacaaaatgttttcagaaaatttttggccaaagtcctatgattactatgattatatggacgcctgatactttactttttattttcgtccctttgattactcatggttctagaactttgaagaaatctcccagttaaatctggaggagtcacaatggtctctcttaaaacccagataactttgacagaacttctataaagtacttagactttcaaatagaagatgaaagagaagatgaatatgatgcacaatgaaaacaaatgcacagttaaatttgaaatttgaaatttcattcaatgaaagaacatatacaagaactttgaaaatttaaaacttacaatctttgaaggaagctttaaacaaactttgagaactttgagcttctcaatacaaggcttagagggaaatctcacaagtttctctcactagaattctctttaaaatttctgatgccttacaataagaaatggagtccttatatagactctttgaaacgggattaaaaccctttgaagtccgcagatttgaaatcttttctaatccaccgaaagtttgctgtccttttgtacagttgtccttacttttgaaaggcggtttcggcgcccattgaaataatccatagttttgaagagcagtttgaactgtggatttgagttgttcatcaacatgtcattgtagtgaacttcagtcatacaattgtcatcattgtcatctgtttgaaatgtgagcaagcccattcctttggattggagatgcttgagcagttgacgatgctttgaaaagctaggacgagaataaccccaaaaatcgtgagcacatttgtcatgagtggagtctctcaacgatcctttgacaagtagcccaatctggcgcttttgaagagacttgaaaatggaattatttgatgaagtcttggatgcatcaacccaagggtgtgtatgggaatccatgacacatgtcttcattgacatcccttaaaaaagcagaggatgcagtatcatcatcatcataaccggaaccagagaactgggataaggtttctaaggcttttttctttaaaagtctaagatgcttgatgtactctttatcataaggaaaggcaattcgagaaagaagcaaaacatctgttggaattggaggaagatcaaaaggctttggagaaatgtttttcccagaaatccattgatggatagcgggaagctgttgagcatttgaaggggtaaaacttgaccaccatttgactttgaatttcctggccaaatgcgcaggaaaaggagcggaaatcatctggatgagaacaaagtcccaacagagaatccatggaatttgaaattttgaaagaaagaacattactcttgaacaaggagctggaagaagatgactaccatgttcaacaaagtaagagaatccttcattgatttgaggacaaagaatgtcctgagtggctccaaagaataaccaccattcttgaaaccaatttggaaaatcatttcgattttttatttcatccccccaatggaagaaccatgagtgatcaaagggacgaaaataaaaagtaaagtactagacgtccatataatcatagtaatcataggactttggcctaaaattttctgaaaacattttgtgagtatcaggggactgaccccacgttttatgagtaagcactttgaaaattttgcattttgaataacaaatatctgtagaacgtgagaaatctctatagattcagtgtcaactagaataaactcataaaattttcgagttttgtctggattactctgaagaaaatatttgtttttggcaaaaatttttgaaagatcaattgatacattcaattgtgttgaatataatgaatttgtagtgtacaatctttcctttttttaatataggtcatatgtatggtagttaggactcctagccttgtatatatatattttctcaattgtaagtagacattacatgaatgagaatcaaggttttcttctctctctcttaacaaattgattttcaaactttgaagtattttcttctatcattttgagatcattttccatcatgtttatacttcaacgaagatttccaagcaaatttgacattttgaattatgttttctttgtttaagaaggctacttagtgggaccatcgacgggaacacctaacgccaccatggctacaagggctgaccaacgctaagcagttgcaacttaaataaatattcataaaataaatggcaaattcaatttgaaaataaacttagtaaatggctctgatactaaataaacacaggatcgaggatgataagaaaatttttgcaaccccacaccatacccacccctcacttccttagaacaccaacccccaccacaaaatagagggtcttttccttattccttgaaagagttttcacatagttggctggatgttttaggaaaaaggttgtggaggattatgcctctttgcctgatgtgatccatttgaagatagcttgatggaataggcttttggggacttggagtggttggaggtgatgatgaagtctaattttgtgtgctcttcttgcttttggtttactcttgttccaaattgtaagcaccattaattggattggcaacaagatgatgtttgttggaactgacaataataatcctgagccaatcttgggtttgatttaggacaattgtgttttggatccagctggacccaaaaattaaattttggtccatataagttcactatttaaacccaagacctagagaaagtgtgaaaattgagaagaatgatatgaattttttatcttttcataaatgacctttgttgacttaaaaaaaaaagaaagtagaaaaacattaattttatttttattccttttgtaaacttcaatcaaattcaatataatttagtgatttggaaaaaaatacacccttttccaaaaaaataaaaataaattattattattattattatttaaaaatcaaacatcttggaaagtatatatttttaaaattgtgtatataaaaaataactaaaaatatgtcaaatttattttttaaaaatgatatatttttagaatatatattttttttaaaatagttttctaaaaataataaattttagaataattattaaaaaaagatttaagttaaaaaaatttgtcaaacattgtggtagaaaatagttttgaagggtatattgctctctttatattttatatcctcctcatcaattatgcaacttatatggaccaaaacttaatttttggacccaactgggtcaaaaacacaattgtccctttgatttatatgttcaacttgattaataccccaatatgcaattcaatttcatccttgttcttgtctgtgaatttgagtgatgattctgaattttgatagaaaaccaagaaatagaattaatgaacaatagttcatagttaacataaatacattgctgcgttcactctgaactcctttttcttctcgcaaattaattgtttgaattgtgctttgttgcttttacagttaatgactatacttctaatgcagaattttatctcagctatcccag

SEQ ID NO: 12389 - DNA, 2218 bp, Vitis vinifera
  Intron number 1 from transcript GSVIVT01004908001 (locus G SVIVG01004908001) derived from phytozome v7.0 (chr-ID chr2 ; pos 4730329 to 4732546)
ctctccagcagttttagctacatgtcatagttggcaacaaagataatgaattctggttccctttaccacttacaagaatatccgagaaaccaaactatgcagtcctttccctcaaactgatgctgccctgcaaatttggaatgcaagccatcaaaagtcattaatatgtacagaggcttcactaataccgtcacctacttgacagaagctttagcactgtagtagattcctcactcctctctgaggagcagctgaagctgtgaagtataaattaagaagaatgagaaatggcttgtgatgttttagttccaaattatactcgtgcagatttggggaatcttaaagggatgcatagcttcatttgtgtgcgttttaccacttttagatataattgcctgaagtgatgttttcacttatcatggttaattatccttgtaaagtgatgcctatgattcattgatataaatctttgtgaccattaacatgatgaatatgatcccgttgggaccatactactgattcattcaacagtgttctttaatcatgacagggtaactccaaatctgaacatggtttcctgcaaatgctttataagacatccctggatgcaagactgtttgagttactgatattcctctggtttcaccaaaatggtcttttgataatactgcaagatggcattttcttgaaacagggcagccattttgaacagcctcattgaaaaacagatggttttcaaaagtgtggagcattgagtatattttagggataaggattgttccatactgtaaaagttgttgcttctcataagcttatatgaaagatgctcgtgtttgccgttccaacaaaacttcgcatcttttcaattcttatttatttttatttgaaactttttatacatttctcttttactctttaaattaagggggaaaaaaaagggtatataatccatatttgtgtttgacaacctctagaaataaaacttctcaaattctttttatttgatttatcataaattatacaaaaaaatatacaattaaaaatgtatttggtagtgattttataaaatatttttaacctttttaacactttaaaatttttatctttcaagtattaaaaatattagaaacacttcctaaaatcactttcaaacactctaaatttatatatatatatatatatatatatatatatatatatatatatattaatatattgtataaaaaatgaaaaaaaaatggtttatagaataagcgaagcctaattcaaattaaaaaacaatcaacccgagttcaatataacccaaactttaactcgagttcaattcaatcttatttttcaaagtttatgttgagttcaagttgttcaagttagatttgggttggtcgggttagattcaggctagtcaattatataatttaaaatctatgtataatatttgttttttaaagggacaaaattttaagatagtaacaaaagaataaatataaatttgtatatttaaaaaaaaattaaaatatataatataatataatttgatatattttttaaatagacaaaaataaatattattatataggataatatgtatgataaatattataaaaatattagatcagactcttatctcaaactcaactcaaattaagttctagttgaaaaaagtaaaccctaagccaaaacattaaaaatgattgtccaaatccaaacatcaggttggattgggtcaatttgtccaaactacacacaagcaatattgctaagtataaatatatcaactctgtaaaaattatgtcttaaacaataattttgttatgagttttggccttgtggtgcattataattgagaattaatttatttttagatagataaaacatgagacttataaagatgatattataattggcaattaatttatttttagatatgtatagagataaacttttaatgcaaaaaaaatcattaaattaaaattattttttattcttcttttatttattgcattacttttatttttataattttctattttggaaaaaatcctatgatgtaaccccctcacattttctaaagcatctaaggttcgaaggatggcacgcgtcgctcaaatataggagtgtcctaaaaaatcgcgtaggcgccagaaagttctataagctacctctatctctctctgcattagagtcggtgaagatacacgtaattcagggttagggt

SEQ ID NO: 12390 - DNA, 4640 bp, Vitis vinifera
  Intron number 10 from transcript GSVIVT01026457001 (locus GSVIVG01026457001) derived from phytozome v7.0 (chr-ID chr 4; pos 23272861 to 23277500)
cctaagttaaccccactacgcgttatgctcactcctcgccttccttctcacctctattagtgctcacacttgcatgtgtgtgtgtaaccggctgctcaaggtataaaccagccactagtctcgtagatacttctattaatatgatggtgtgatataatttttaatgtaatatttcatatgctataatttataaaataactgatcatatatgatactttaaaacttcaagataaatattattatttatgtacatttattttgtgtgatgaataccaattgattttaagatatctctatcttagtaggagtaacaaaataaaaacaaagaattgattttaagataccaattgtttttcgaaaatttgaaaaacatgctttttcgacccctctttacaatttctcccatttctttatttttaatccatctccaccactttcaattaagctacaaagcttggtccaagtgcatttcctcttcctcttcatccacattgtgtaccctcctccattccattttccatttgtcactccatgcttcaaaaatcaccttaaaatatctccaaaactcaacaaagaaccattagtatctcttgcaagggtagcaatgtgttacttgggcatattaggcataattactactcaaaaagtgtgaaactcatgaaaattagtatctaaaatgtgtggtttttgagtaataatcaggttcttctctctagaatttcataaactaaataaaaagcttgaagtctttaccactaaaataggtttgtataggcttccttgtggacttaagtgacttaagcccaaaatgggtttgggtcacctaatctagcctacttgattcataaataattaattagcccttatgagttccaattaattaactagcctaatctaaaaagaccattcataagatctaatacaaccttacgtttttaagaaaatgcttgtatgcactcttatgaattacaaaaaaaacccttaaaacatgtgtaaccatgaactaagaactcgagtagggatcactaaaacatatagaaaaattctggttccctcaaaatccaattttgaagttgattgaacacttcacttaaaaaagtcaattgcactttagtattttatcaaattataacaagacaaaccttaagttcatggtcaactattcattgcatatggactccaaatgaattggtgttcataacttaacagcatagttctatcaacccatcaagattacctttcaaatcattaagttacaaatcttcctattatgtgaacaaccaacatataactaaagtattgaattattttctattcctaaatcctctttgtttctattatacttattggttgttatatgtaaaatttaaaagttttgtattctcttttatctttattcaaaggaaattggtttaccaaaaaaagagaaatcattataaggaagtgatactgaaaatcatgaatatgatatcatttaaatcattaggaggttgaacaaggcttttatagattatggtttctttttatggtcattgcactagtatttgttcttatgttgaaggatttaaaaattctcattgaaatattttgctctaatgaacatatttatatgtaatttgtataaaagtcgttacaataattgttcaaactaaggtattgtatattaatcaatgtattcaaaatcgaatttgtcattaaacaaaaaaagttatagattcatagtttattagttgaaccagcgatcgaagtgcaatcaaattggtgatgtcataaatatataatttatatattattaaaattaaaattcattgtaaaaaataaaaataataatttatatattatttaaaaatcaaaattttatttgaaatcaaaaaattaatctcaaataaaaaatttaaattaaaatcacaattttaatttaaaattagaagttttaaaatttatttttaaataaaaaaactcatttataatataaaataaatgttcaccttcaaacatatatttgacaaattttttactaaaataattctttgagaatttatttttaaaattagatgattttttaaaaatagatttaaagtatttttacctttctttttaccaaaactaatgaaacacacacacacacacaaaataataataataataataattgtcagaatacatttcattgtttttcataaggtctttcttcgaaatactaagaatgagttcttaaatggaattttatttttaacaactattttcaaaagttattttcaaagatgtttatttgcattgaaaatataagaggaaaatagcaaaaatggtccttaagaatccccacccgcattgggataacacagtcaagagatctctattgtgtgcatacaagatcaacttagttgcatgcatcatgcatgcaatcattgtttcaaggaaactcattcctattcgttgaaatttcaagccttcccatgaatgccaaagcgaaaatggagagtgatattagattcgatcgggagcttttttttttcaatcatacaatacgatgaccattgtcacctggcaactttgtcattattattaaatatgcatattatctatacataaataaaagattaaaataaaattttgtagataaattcattttaatcaccttattttcatattttatttaatagattatttaaaatataaaaaccatcattgataattttgttaatgaaacgagttttttatatcttttttataataattaaatgcaaaaaatataaatttgtaaataaaattataaatactttatatatcattatttcttttatatccttaaatgtatttaaattaaataaatcatcattttaattagtattaaatatattttcaaattctactattgttatctaatattataaattttgtcatatctccaaccactaacattttaatgcttacatgcaaccacaatgttagtgatgagaatatgtcaggttttgttgggttagcttcttaccccgtccctaataggacgagtttgaaattctaataaataagtttgagatattttaaaaaacccaaaatgggtttaaggcgggtttggatattaccttgtcctgtcccaattatatataaaattaattacaaaaaataatttaatttaatttttattttcctatttttaatatatagataataataataaaatactcataaataaaataaggtataaaaattataatattttaattatttataaaatatatttattttaatctaattaaaaattttaaaataattttttttaaaaaaaaaaaaaaaagttaaatggggcgggatgggacaagtatgagaatttctcatacccgcctcacccccaccctatttaatatttttaatggggggaggatgaaaattatttccattaaacgggcggggttgggatgggggtgacatctctcaaacttaccgtgttgtcatccctacgtaagagtgtcatccctacacaacatccttgccttgcattccatgatactatgaacatgcggtgatactatgaacatgtacatatacaaatttacaagggctcatactaaaatttaggtacaatcataaagagtcacccatgtgactacaattatttgagttagctctatgcctcactccatgatattaattttgttattaaatcaatggttgtaaaacttattttaattcattaattaattaggttataatattaaactataacattatagttgtttaaatagagttataataaaaatgattaaatctaactataaaagtatataaagtcttaaattagacttaaaaagaaggggaggaaaagaaaagcttaactataagagaatcattaccatatgaagaacgtacatgtatgagcaagttaaattttcctactatattaaagaagggcaacaaatcatgagtaatcatgttacctctatcttatttctttatatttaagatctcatttaattgtacgtggctcccattaatttaaatttaaatataatttttttattttatatcttggtttaactaccaaatttaataagacttacattaaaaatcgaatttaatatccatatctttttatttaaagatctagtttagttgtcaattgacccattatttcaatctaaatatatatttgatagcttggttcaactacctaagtttaatcagacttacattaaaagtcaaattttatatccatatctttgaatttagagatctcgttcagtcatcaattcatcacattaattttatctaaatgtaaatttttttattttatatcttggtttaactaactaaatttaattggacttatattaaaagtcaatttgatcccattaattcaatctaagtataattttttatttcatatgttggtttaactacctaaatttgattggacttacgttaaaagttgaatttaatatccatagttttgtatttaaaagtctcgtttagtcatcacttgatcccattaattcaatctaaatatgagttttaattttatatcttggtttgactatctagatttaatcaaacttacattaaaagtcaaatttaatatccatatttttgtatttaaagatctcgtttagtcgtcaatcaatcccattaattcaatctaa

SEQ ID NO: 12391 - DNA, 3039 bp, Vitis vinifera
  Intron number 1 from transcript GSVIVT01032432001 (locus G SVIVG01032432001) derived from phytozome v7.0 (chr-ID chr1 4; pos 27343319 to 27346357 reverse strand)
cctttggagtttgaactaggttttggggcctttgggtaaccactgttcccattttattttattttcttttttgattactttacctataatgctgctaagttcaggattcttttagaatcattgtgatatagtagtttttttaaagcaatgggtgtggatttctttgttgatttaataggctttgatcataaaattccacctgattttgtcagtttgagatttgactttgtttgctttcctccatgtttattgggtttgcctattttagttggctcccatgggtactgtgttgtttgcaaatttctttgaactgggtggaggtagtggtttgcacgttgattgatgatactgatgatgaaatcacatattttggagtccttaggttttattttcaggtgctataagttggtcaggtttcacatttgttgattgttttggttagttggggttttgtgaaccctgtttatgacttttcagcaagctgctattgtttctggagtcgatattattgacttcatgttttagtctagcctctttggctgctagaatggcatccccatttgttagttttgaaggaaataaaccatttgcttattgttttgttggttgcatgtattttgagtttctttccggaaattatttgaaacatggagtgacccattttttagatgctgcattttgcaatgttgttaagccttttttgtttttttccaatccaatgtgttggaaagtgtctcaaatccctatttgagaaatattattttggtaacataatattgtatagaatattttatatgtgggtaattccttatggaaataggttctcttgtggaatgggaaagttgtcaggaatagatatgaggaagggtgagagagacacagcagagtaagggctcacagttcagggtatgagaagagaactaaggcaaggctggtgatgtgccatgggatggagggctctgtagttataatttttgggaaacataaaccatgttagggctcattagttatatttttttgggaacataaactatgagagggttcaataattgtaattttttttttgggtcctttataatattttttgtgataaggtagaatgattctttatcatttgtggatgtgggaattattggttagatcactttaaaatatcatctttatatttattactccaattagtcgcattgaagctttcgctagtataacaaatggtattagagtcaaggtcaagatttctagaagagactaggaaaagatttttgaaagagccaaggacaaatgaaacacataagatgaatgtagaagaaattttggttgaaggtggagtcaattgttctctcgtcataatgtgatatatgatttattttgtttttcgaaataagtgtagtttctcttctatacttattgaatcttgcaaggtggaagctatgaaatgactcagtcaatgttcagtaattgttttttaaaacagttatgaaaaatagtttttgaaaaatgttctctaatattttgtagaataatgtatgtttgggaaaactgaaatatctttaacctattttctatgtttttaaatacattttaaaaataatctttacatgtagtgctttatttttaatcattttctatatttatataatcattttttaaaacaatcatcaaaaaacaagtgaacacaactgaatataactaaaagatgttttatgaaaacaacttgtttctgtttttaagtatagaaaaccgatttatgttttttagttgtcatacgtggtttactatttttttgttctaaagagcatatagttgtttttgaatccctagcaatctaccgtaaagtaaacaataagtgtttgtagcataggaggggaccacgatgcataaggggatcatcatgcaagaaatggatgataactgtggtgctaaaaaaagccatggtatggagtaaggatgtggtttagataagttttcatgtggagtacattaggcgactgccttgattctgacgtatcaaagttgtgtgcattgatgaaggcatatgcggaaaagttatgtatgcaatggagatcatgtattgtgggaaagtatgtgtgttcttacaaatatagaaattctagatttacaagaatacatgtattttcccacatgtaccatagagagatggcagattgacttgataaaattattgttggaaattgtttcgaattaatatatattcgttttggtaaaaaattattgtatagaatatttcatatattggtagaaggtaattccttaaggaaatacgtttccttgtaagataaagaaaattgttaggaatatttttatgaatatttggaaaaaattatgagatatggacttataaaaactctaccgcatagagatacaaggaagagtgggtgacacccaatggagcaaggcttccgattcaaaatgtagatataacgagtgggggtcacataaaatgttagaggttaatagttatatttatttatttatttcctattctctctaatattctcaatgttattgtggaatgattttctttcatcgtggatgtaggaatagttagtaaatccatgttaaaacctcatgtacctttgtgtgtgaatgatgttgccttttacctttatgttattgctctaatatgcgacattaaagcttttgcttgcattacacattgggtgtttctattttattttagcattgtagcttagttgttctcttgattcaacttggttttggactgtcaaacagtttatgcatcattctgtctaaaattcaccaattttggtcatgtgtagcctttatgtaattgcttgtagactgttcagattttcattcacaatgcattgctacaaagctactgtggaaaattccatggcggcagtatcattcatcatagttatttagcttgttcaactgatttcctttacttcattgttcatgcttttcttcagttagtttgtattatttttgttcactccctgggtagtgcccttaatctgttgctgacattatattccctctgcagaatcccct

SEQ ID NO: 12392 - DNA, 5239 bp, Vitis vinifera
  Intron number 2 from transcript GSVIVT01013253001 (locus G SVIVG01013253001) derived from phytozome v7.0 (chr-ID chr2 ; pos 6203259 to 6208497)
gggtttctttcaggtataattatttttatatatttggtcgatccttgggatttttggcaaattcatgtcttgggctgcttttatttcttttaatatgtctcttggctcaatgagtacttcattttaactgatattgcatatagagtcctgtaaacaattcttttttgggtttttaagaagggagggattgggttagaatgcatattcatatgcagggctgaaagaaaacaaagtagaacaaagtattttggaagtttggaaatttgttgtgtattcaatctatcaattaagggaagaagatgcatatatacaaagcattggttagcctattctaggaatctatgtgcaaacgtatcagttacaatcaataaaaaataatcttctatatacaatcaaatctcatcctcaaattatgggatccttgattcttttcccataatactccccctcaagttggagcgtgtatgtcaagaacgccaaacttgttgagaagggaatgaaaaattgatgaactgagtggcttagtgaacaaatcaacaagctggcaagacaatggaacatgagcaattattatggcacctgattgaatttattctcgaacaacatggcaatcgatttctatatgcttggtacgttcatggtaaattggattagcagtaatatggagtgctgtttttctatcacagaatagtttggttgcttgcgagtgttctacctgcaagtcatccaacaaatacttgagccatgtaagttcacacgtaatggaagtcattgctcgatattctgattcagctaatgaccttgacactgttgtctgtttcttggttttccatgaaataagagtttctctaagaaaaatgcaatatccaatcacagatcgtcttgtgatcgaacattgagccaaatctgcatcgcaaaatcctcttagtagcaaatttcctttggcaggaaaatataatccttgtttaggtgcacctttatgataccgcagaagatgatgaacaacatccaaatgaggctttcttggttcttgcataaactgacttaaaatgtgaactgaataacttatctctggccttgtaatggtaagataaatgagttgtccgaccaatcttctgtaagtggatggattcttcaataaatctcctaccgtgggcaggagtttattattttcttccataggtgtcgacaatggtttggccccaagcaagcctgcttcatctaagatatcaagagtgtattttcgttgggatatcgaaataccatcattagaacaagcaacttcaatatcaaggaaatatcataattgaccgaggtccttgatgcgaaatttggtgtggagagactccttaagagctgcaattacattctcatcattgtcggtgatgatcatgtcgtctacatagatgagcacaactatgaaagaattaccagagatctttgtgaaaagtgaataatcagcctttgattgatggaaaccatcttgttgaatggtggtagaaaatttctgaaaccaactacgggaggcttttttaagcccatataatgacttgttgagtcgacataccataagtgtctctccctgtcgacaaaaatcgggcggtaattgcatatagacttcttcaagaaaatcaccatggagaaaggcattttgaacatccatttggtgaagtgaccagtgtcggacaacagctatagcaagtaaacatcgaactgtagttaacttagccatagaagaaaaggtctccttatagtcaatcccttcgcgttaagtgaagcctttcaccaccaaccgagctttgtatcgcttaactgtgccatcagagttatatttgatcttatacacccatttgcactcaattggacgatgactggaagggagaggtgtgagtgtccaagtgtgattttgttcaagagcatggagttctacaaccatagcttcctgccattttggatccaatactgtttgttcataagttgtaggttccacaagagtggtgatggcacaaacaaaattctaatattttggtgagagttgtgcataggaaatataccgagtcaaagggtgacgtgtacttgacaaggaagaagattggctggaagcaaccttggttgtgtggtaaagatgaaaattccagagttggacatttggttgcttgatacggttagaacgatgagtaacaggaggtggaggtgacacaatggtgtcaagatcaagtgtacgttcattagaggtagactcaggagatgaaagtaagggtggtggagacaaagattgatcatcggcttggggtttggttgtctttgtggttatgggttcatatgaggtttgtggtaaaggaagaatgaccatatcatattgttcttcttgtggattattgtggaatggaaatatatgttcatgaaagacaacatctcgggaagaaaataatttattagtttcaagatcataaacccgataacccttttgaccaagaggataaccaacaaatgtgcaacgacaagctctttaatcaaatttatgtgtgggtaagagattggtggcataacaaagacatccaaaagttcatagatgatgatatgaagatagcttgttatagagaagttggtatggcgatttgtgagaaagaaggggtataagtaagcgattgattaaatagcaagccatttgaacagtttccccaaaaaattttaacagcaagtttgcttgaaaacgaagagctcttcccacatttaaaaggtgacgatgtttcctctcaaccactccatttttttggggggtgtaagcacatgaatgatggtaattgatccccttagtatccaaatactgcttcatagaggaaattttagtcgcattatcggttcaaagagttttaatgcaacgattaaattgtgtttccacccaagaaatgaatgattacaatattccttgtgtttcatatttaaaactcatgagatgtattcaagtatagcggcgggtatgatcatcaacaattgttaggaaataacgagccttggaatgagaatttattcgatgtggtccccaaatatcacaatgtatcaaatcaaaaggtgcgtgagaagaaatgaaactagatgaaaagaacaaacgagtttgtttggctaaagggcaaatttcataaacatgcttggaatcaaaataaatttcaggattaattttagcaagaacttgaagaggaccggatgatgggtgcccaagacgttgatgccaaagatcagaatgtttgtgaatggtgtaagccaaggctggattttggtcgtgtgcaaggtagtagaggccattatgttgcttacccaggccaatcgtcttcctcgtagtaacgtcttgcacaacacaaaaatcaaaactatacattgtaatgcccgcgttagtttactaactgatagtaaattaacttgaaattgtggaactttgagtacatcatcaagtttaatgtgaggggtaacatgcaatgaaccaattgactcaatatgtgcttgaccaccatctggcaaactaatggtagtggtcctgagcaaatttttcggatctaataattcaattgagtaagttgcatgatccgtggctccactatcaataatccaacacatatttgagtgtggcaatctggagtaattttggatgatggcatatttatacttgtggcatttgcaaaatgttgtgaattaccaccattgtttttacgaatcataaccattaattggttatattcctcaactgtgagccttgatccatcacttgttggaagaaattttgtttctatctccacagccttatttgtttccactttcacattgtttgcatttgagtgacgttgattgggaggcttcaggttcttcccatgaagcttgtggccaattggaaagccatgtaggtagtaacacttctcaatgctgtgataatcacggtcacaataaaagcagtgcagtggagtattttgcttttgaacttggtgtgctaaagttgccttattgtcccgatctgcaagcatggcataacgattcttgttcccatgactgagagaaacttcaacctgtttttcttgttgaaggacaagtgagtaaactcgacgtgtatcaggtagaggttgcatcaataagatttgtctacgaatgacagcataactatcattcaatcccatgagaaactgcataactcttttttttcatccatttccttaagtttctctaatcctccataagagcagaataacacttcatgataggatgaaagtttatcccaaaaagctttaagctttgtgtaataaaccgaaattgattgctgcccctgcttatgttccacaatgtctcgcttgatctaataaattcttgaatcttttccttgtgaaaaacgttcttgtagatctgcccatatttatgttgcagtttcggcataaatcacactgttggctatgtttggatgaatggaattcaataaccatgagatcaccatatcattgcaacgttgccaggaaggaaaactatcatcagtcgaagagggtggcttaatggaacctgtgacaaatccaattttgtctttagcactcaaactgattctcatagcccgactccatgtgctatagttatctccttcaagtaccttggagacaagtaccatacccaggtggtttgagtggtgtagagagaaggggtctaaagcttttgtgatagccttcgatgatgtcaatcctgttttgttgatgtccatggcagtagctgtaacgaagaaataggttgcggaagcgcttggaagaattcagagtcaccaggtttggtgctctgataccatgaaagaaaacagagtagaacagagtattttggaagtttggaaatctgttgtgtattcaatctatcaacttaagggaagaagatgcatatatacaaagcattggttagcctattctaggaatctatgtgcaaacgtatcaattacaatcaatcaaaaataatcttctatatacaatcaaatctcatcctcaaattatgggatccttgattcttttcccataataagggctcatggttttggttaagacttttgtatggaaccccaaaggtagaacatatagagactaccaagatgtaggaattttctaccatacatccatgatatggtgaacttgaagctgagttcgttggatggttttactttatcccttaatgggttgctgtcttattctaaattgagcatatattgtcatcaaacagttaataaatc

SEQ ID NO: 12393 - DNA, 1531 bp, Vitis vinifera
  Intron number 4 from transcript GSVIVT01003843001 (locus G SVIVG01003843001) derived from phytozome v7.0 (chr-ID chr4 ; pos 20617304 to 20618834)
cttctgtctcagcttggtcgccaacaatcaagccagtaagtgaggcgatatttttctctcttgatttggccaaatgaggctaaactcatttgtcccaattcatgtttaaacctatttataactttaagcctattttaatcaatagttctgtacttcttatgttatatcagcagttctctctatcttatatccaaataaatatttattaaaaagcttccaagtacatgataagtataagcacacccaaggccagaaaagaaagaactacaagctaaacaacttcctaactcttttctaaacagtcaataaaaatcaagcaaagatttagagtcaaagtccaaatagacactagaccaatatgagatatcaatagttgtgtaattttacacaatgtatgtgtcaatttttcaagtctttttctacagtctcttctagagcttgaggaatctctttctacggtctcttctagagtggtctcaacagattatggacttggactatctctcttttatgaatttgttgggtgattggagtgttggttaactttgtcctttctaggttttttccctcctttgttgccttgggtttggctttttttgtatactgcctatatacatagggagtgccccctgttttggcgtgttttaatttgttttttctctttgcctatcaaaaattttttttttcaagtcccagggtttggaattctcagtcttttcttttatctcaagtccttttgcgataatagtcatctgatgagagtttacaaaatttaaatgcctatgtttattagtgtatacctccctgcatgctgtatgtataattcttttatagctagtctatttttattttaattaattattatttgttatttacacaattagtactagcgaaacataataaaatattaactaaatgtccatttggatacacttccgtttttttgtttataaaatcagaaataataataatttttatgtaagatatgagaactcatagaaacttgcattggaaaataatgttttaaaagttattttaaaagattgaagtatcaaaaaaattttactacctcaaattttaaaatttttgaaagtgatttttaaatatgtaaggtaaatctatatgtttgtacaagatgttctaattttatatagaagtcttaattgtaaaaaggaaaaatatgaagtgtctccaaacgaacattacagtattatataaaaaaacaatcagtttgtagatttgtgaccagagatgttcatattacaagtagccagtattcaagtataattcgtcttattaatgtagtataattcttttgatgttgagctggcttgggtttatttcctaacatcttccaacttaggaccttagctgcccgggtgtcctgtttactggttcaatgagtcagcctgttacagtttgaagttgtttagttaccagattcatcaatagtttttgtcttagtttccttctaaattcatggtgcactcttgcagggaatcaggtcagactggtggtggcacaggtacaa

SEQ ID NO: 12394 - DNA, 5824 bp, Vitis vinifera
  Intron number 4 from transcript GSVIVT01032920001 (locus G SVIVG01032920001) derived from phytozome v7.0 (chr-ID chr1 4; pos 24138403 to 24144226)
ttattgcccaaataaaacaggtatggaagaaattctcagtgttaattctctcaaaatactgtgcttaatcactaaatagaagttgtaaaccctgatgagaagaaagctgtttaattttatcagtatgtgtcatatatgcaggcgtgatatttggtgggtagagaatgtgatttatcactagtggtcatgtttggctatcctctagaattttccttttcagtagaaacaaagttagaaatgtgtttatcttcttctctgtgctactacctaatttaactgattggatagttaagtgcaaacagttggattacctaaaaaggttagaaatgtgttcatcttctctgtgtttatcctttggagttgaactaaactaaccttaaagtatttggattctctttcagtttactcttctaaactccatttcatgggcattgatcagaaatgtattttttgcctttgagcatggacatcactctcctattgagcaattttgcatgttatatctttcaagatataagtctttagtgtagtctaagaagttgtttcaacctatctacaaagatttcaatcctaattatgaaagtattttttatatataaataagcaagcaaataatatgattctatagacaagcaccaacaagatgacacatcatagtacataggaggtgtagaatgagtgccaagggactgaagcaaaaggagagaacaccaaaagacaactccgaacccaaccaatttataaaatcaattaaagacatagaacctacatttatgtacatcttcacccacaaaaacaaatttctaaggaaagaattcttcaaagagataagtgtacgattgtgtctttttactatgccctttttctgggatgtacttgaccatgaatattgtgcaattattctgtagttgttttactagtaattttagattgtttttctttaatgcaatcaatatatatatatatatatatatagtttttcaaactccaccctttaccaatctcatgagtctttgcttagaaatgtggcctaattttttatgccataacatagatgaactttcttttaagaagtcaagtttcatactaacaataacatttagggctaaaagagattaagtaaacaaagggtttgttaattttatataaaccatcacataaaacccaaaatcaatcaaaaaggaatttctataaatggtgagagattgatttctaaatttgaaggtgaaaaaccgttgttcaacagggtaacacttagagggggctgaatgggtgtgtttaaaaagattacaatataagctttgaataaaatatccaattttaacttgtgagggatcagggataattactataatcaaagtaatcaaatgaataaacaagtatgcaagggatacaagaatttttacatggaaaaccctcacactaaccgtggagataaaaaactacgggatctaagacctcaaatctatatccactatatgagatcaaatcacacaaatttatctggttgctttacgataaagacgtgttctccataccctacaacttgatccatgtctacaacgcaacaatcaccaattgcactagtgaatactcctcagtcttgctgaaaggatgcaggtctttcaacaactcaagattcaacactttgaatccttcttgagagattgggaatggtatgacaagttaggttaactctcttaatgaatgtcccaccgtaaaagggttataatggggtttatataggcctctaggccctaggggatcagtatcctgaattttcaaatatatttttcataattatctaaaaaatattatgtcataatctggtagattctgtaggagtgctcgagtgcacttacccactgctcgagtggtgccccctgcattttcaaaatattaattaaagcattttttattcaataaaaaatatattgatcctcttcaaccctttgagcacctaacttgccacaatccaaacctttttagataaacttgtgactttccggttgagcgaccaacaatcttgaatcttcaatggagagtaagttactatctaaaaagtttcctaagttagaaaataattagaacaaaactaccaacatataatttaaactcattgtcctaatagaaggtatacattgttaaatcaaatttagacaaagatataagatttcttaagatagaaggaacataaaaggaattatggaggtacaaaatatgtgcggtacccaaaactagtctgtaggttcccatagctttgacttcatactttaattgattccccatttctatatatttttctccctcacttagactcttgattgtaaggagtccttacatagaatttgaaacatgaattatgacacttgaatctagccaccatgtattaaagggaacatgaactaaattggttttaaaacacataagtgataagaaatcatcttttttttaaaacccttttttttttttctcattttgatgcaatccttcttcacgtgtcctttctttttataaaaataatactttaaattactttccttctctttaccatctaagtttctagatttcttactattctttgttgtttctctccttttatgggattgatatttattgtctgacgccgtgtgaaccttttgaaatttctaacatttcaatcttccttcttgcacacataaagtaattaactcatgaatggtccatttatccttatgtgtgttatatgaagtattaaaaggaccataatctaaaaagagagagtttgggatgaattgtacaagaaaagattcattccaaaatgctcattttcaaagttttgagttaattggctatattcatctccgttgtttgtcatctaataccatttactccattgtacttcatattggttagtttagacatcaatgtgtttgttagtgccttgtttgatgctatatattgttgttcgatcatcaaataacttgaagataagttgcaagaaaatatccacacatattaatcaaaaccaaaatcatattttatatccatgaaaatttctagtttggtcactttgttaagtaacacacatatattaatcaaataccatgatatatataaataactagtagataagctacaagaaaatataaataatttttcctatgtagcttcaggttacaagagtatataaaatactttggcatagcttcaaactatgaaagttgcaaatagctttcaactgttacaaatcacaaaaccacttttccttgtgagaatttgcaaaagaaagtacacataattttagactatgataatatgcagaaataattcaggttatgaaattcaatttcatttattcacaactttaggttatgagatttgcatatttcttcatttacaacttcaagttatgatatgtacaaattcagttgttcataacttcaagttatgagagtaatattatcatagctttatgctatgaaaaagtacaaataattttatcataacttcatgttatgataatataatttctccatagctttaagcttgaattttttttttttttgatgcaaattattgatataaaaaatatgattaaaactaggaaagagaaacataatgaattctcaactacgctttgataccaaatattagaaaatttcatgatgtttaatactaataaccagttaaaaatctgaatgaaagagtgcatgccttgatccataatgctaaacttttgatagtggaagataaaataaaaaataactttgaagccttgaatcttcactctcttactcacttttatccaattcttagtgatcagttatggacaatgcttggataaggaaaatggtgagtggagagagggaccaagagccttccgtatatcgtgagtttagtaattatgtccagtcctcaataccttctttgttagaggaatacaaccaattagattgtgggtttagtaatttggctatttagaatttggcttctcagactttgctatctggataagcagtgctctcaatggtcttcttgctcttatcttcctgtctctcagaattatcaaacaaggcaataccccattcccaagtttcatttattgtactggaggtttttagtagaggtgatgaattcattcttgcagaagttgatgttttctcttaattgagagatgccattcaatctgccacaccttctgcatgtgaatgactgtctcatcttcatgaaaggggaaagcaggcaagttattgagaattggggtctttggataggtgtgaagaagactcaggtcagttgctagttactaagagcaaaaatattgtagactttcgaattaaaaaccaataacaaggtgcaaaaatcaaaaccgtgacttatatggccatggctcattgtataagaagaagattgcatgttgcagaggaagtctctatctcagtgttctaggtagcagaatggtgcattgtctgggattaatttactgtttgaaatatctcctgaaagtgatggaaacatgattaccaaacagtagcagaaacaagaaacagaaaggtcaaaggaagtaagaaatgatttatgactgaataagaaagctaagggaaaattaataaaaacaacataaatgctaaaatccattttgggatctaaaataatcatgtaattaaaaatgtttatgcatactatggaaaaagccttgagagatgaaaaaaggagatttatagggaccatgtttctaatgcctgggtgtttctgctatgttatctctgtctctctgtctctctctctctatctatatatctcctttaaagtttcctcagtagtttctggaacatcttaaataagtttttgagtttccaaaggtttctgggagaatgggtttcccacctaaaactaagtagcctggaaattatgtttgggaaagtgatgactaatttcatttacaattatcttgaagatagagagaaaatcattaggttaaatggaagaatttttgctattccatttctggaggaggcactaagtttaggtgtttgattgctatttgtgatgctttttcaatgaaactcctacaggatttctaaattggaaaacggtagtgcaaaaaagatacacgaggcatgaatatttaaagcatcttctgcctttgatgaggtcatttccagcttatgattgtggacaacttgaattttcatttagtcctagcccctagggtttctaaaaatattattgcgagaaaagcaatagaatcatcaggacccaaatataagttaaagatgtgctttcttctgatgatcgtatttggtcatgccactgactttgccttctagttgtgatatgctgcacattaatcaagcccaagaaaagtgagggattagtttagttgggtttcaactggaatctttgtttgtttgtcacattgtgcttgttcaagtttctttttttttttttgtttgaaaaaaaagatgatgttccaagttccatgttgtcacatatgtagctaagacaagcatattgttttcttaccaagtcttcattttggaatcataaaaaattttccagtttactttctatttggtccctggaagaatgaaaacaaaaatgccttgcaaatgcttcctttttcttggattttctttcttttttttattattcttttcaagaacaagactgcaaccctctaaaaagtagaaagtggtacatatggtttaaagcatatagaggaaggggtagagataatcctgtagtaaaaattttaaacatgtattgatgcttgttaccatttttttgataattctgttccacaggtcaagcaaaaaacacttgtcatctggggtgagca

SEQ ID NO: 12395 - DNA, 6498 bp, Vitis vinifera
  Intron number 5 from transcript GSVIVT01015995001 (locus G SVIVG01015995001) derived from phytozome v7.0 (chr-ID chr9 ; pos 17009792 to 17016289 reverse strand)
ttgttttggactgcatcgataacattgatacgaaggtacctcaacttgcttaataattttggttacttataacaaacccttttttctttttttttttttcttttttttctttttttaaatttttttttttggctacaatcaaattttcttgatagcatattaatttattactcgcatcgtacaatattttcattttttgcttctttacctggtcagcaatttagagcaaaaaccaggtcctctttaatttctgagatatcatatatgtaaaggatcatgtaataattcaaaggtactgctccttagttggtatctacttaatatggtttagcttagactaacggcaccggttcctggtgctacatcattcctataaattaattcgcctagactgcgtgtgacctttttttgataggcaaaataaacaatgtaactaatagcaaataacgaccttttgttctttgagtctaatgttcttggtataactttgtagaaagaattcttggtcacttctttttacttatctatatggatacatcaataaaaccatgtgtgcatgcatgcatgcttatatgtatctgtctttcgtatggtaatgactaagtgtggaaaagtaaccaagactaacattttgaagctggaaaatttttagaagactagggttttattggtagtgagattttgagaatttctattattttttattaaaacggaggttctatgaattttaggttagaaggttttgatggcaccctctcttggaggggagtgcctcttggttatatgctttttacaatggttttttattaggatttttgggagattttttcataggataatatggcagttttcaaagaatttcacaaacatcttggaggataatgcattttttttggaaagttatactccaagcctccggtcattcttggaggttataaggattggattggattggattggattggattggattggtctcccatttcagcagatagtcttgcatggctaggccgcctttttttagaagaggagatttacaatgctatgtttcaattaaacaaggaaaagggtctcatgcctaatggttttacaattccagtgtattaggacctatataaaaactcattccatagtagcaagagtgttgggatgtgagtaaggaggctcttgtaagagtgttcttggagtttcacaataatgtggtaataaatcaaagtaccaattctacctttattgctcttgtgccaaaaaagagtcaaaccaacaaaatcttagatcttagatctattagcatggtgagtagtttgtacaagatcatggctaaggtcttatcaaggcgtatccgaagagtcctccatgatactatctttatttcccaatttgcatttgttttttttttatgataagtgcgcgcaaatatattaaagtaggcaaaaagccacaaggcatacaggacgtatacatttcccaatttgcatttgttgaggggaggtagttttggatactattctgattatcaatgagttggtggatgagaaaaggagattaggaggggaagtaccagtcttcaaaattgattttgtaaaggcctatcaccatttagattagggttttctggactatatactagagagaaaagggttcaattcgaaacggaggtcttggatgagaggatgcttgtccttagtaagttttgtggtcttagtgaatagaaataccaaagattaaattaaggcaactagaggcttaagagaagtagatcctcattcctcatttctttttgtcattgtagctaatgttttaagtaggatactgttgagagtggaggagagtgatttttagagggcttcctagtagacaaaaataggactagaatgtgtcgtttacaatttgcaaatgacatcatttttttctctagagcttctttggaagaattacaaaatctcaagttaatattgctgatttttaggtgcttattagggcctaggatcaatttagacaagagcactctttttggtatcaacacaaatcaaggcttgaatgtatagtctctaaccttaacatacttgggtcttccattagggggaatccaaaagggaacacattttgagattgagtgattgatagaatcttaaggagattggatgagtgaaaaaaagctttcttgtctctaaggggtagaacaactctaattcaatcttgcttgtctcacattccaactctaatttagttttgcttgtttcacatcttgagctatttttgatctttttcaagattccaacatcagtagcatcaaagattgagaaattgcatagagattttttatagtcggggttgggaggattctaatctccatgtgcttggtttgagagtttcataaagtcagttcgtgaccttggttaaattcaaagtcaatcagaccacataatgttcaacaaacattcaaacagtagaggtatttctattctcattgtttatataaatgaaattatgatgattgacaatgatgttatagagatggagagactaaagtagatcctagccaaagtttttgaaataaaggatcttggttggctaagatacttcttgggcatggagataactggataaaaattgagatctttgtctcacaaaggaagtacaccttaggtttcatgaaagaaacaggaatgcttggttgcaaacctattgatactctaattgatgttaatcacaggttgagattgtcgcaaggagctatagtagatataggaagatatcaaaggttggtaggaaagttgaacttccttgctcatactcaatcgacttggcatttgtagtgagtatggttagccaatttatacattccccttatgaagaacatctaagtggtgtacaagattcttagttatctaaagtccaagtaagggattgttattcaaaaagggagatcatatgagtgttgaagcattaactgatgttgattgggttggattggtgagtgataggaggtcaatttcagagtattgcacctctgtttggggtaatttggtcacatggaggagcaagaagaagttagatgttgctagaagttgtgctaaagcagagttagagcattaacgtttgacatttgtgaactcgtggctaagaagactcctataagaactaaggataccaattgaaactcttatgaagttatattgtgacaataagttagcaatcaatatcattcaaaatcttatatatcatgacaaaaccaagcatgttataatggacaaaaatttcattacgaaaaacataaaaagtagaataatttgttattcataaaaagaagcaattgatagatattcttacaaatggactaatttgtaagccttacattcctgcaaagaagcaattgatagatatgcttacaaatggacttcgaggagattaattccagtcattaacttacaagttgggaatgattgatatcttttgagctaacttgagagagagtggaaaatcctgtcattgatggattttttctcctattttttaggttcaaattttataggataagaatggaaaattagttaggattttatactctatctatacaaatttagttttctattttctagtttaccttttgtaactagtttataaaagggctcatctatatatagaaagatcatgagaaaaagtgaggttttctcaaaggtgccatttttgtttagcacatagttttaaaaggtgcttttaaagagtgcctaggcttaaggcgcagccactccctagccatagtgccttgcttgccaagacatgcgccttgttgaagaggcacactttgtctactttacttttcatttttaaacacttttattctttgaatttctaattgtatattgaaatttatataattttattactttttttgttcaatgcttcttttaaacgtttgaagtcttaaattttgtatcgactggattggattttgaatcatattttataaaattgatatgcatactaggttaggtttcacttcacttaggcacacgctttgtgttgcattttgcacctaagctaaaggatacttttgtgccttaggtgcagcttgtgccttttgaaaccatgcttcagcatgcattcttttgctgaattttttggttaatattttttattaattagaaaaatcaataatttatgaacccatcttgagatctgattagtgaatcactttgaaaccttcattcttctatttgaaccatttgctagtctttttcctcccaccctaaccaaaaaaataaaaaaaataaaaaaatgcttttgttaaattttgattttcacatcatgtcttggtagttttcgtttatctacttaattgcactttaataagaaaatatatatatatatatatatatatatatgtacgtatgtatgtatatacatagtggataatccaatataagatcccattagtctcattagaactctatagaccgcctttgtagtgaccttcaggctgaattttgttttgagttgatcaaatttcgttttgagatggctaggaaaatcaggactgtgtccaacttaaggacattaatgtaagccacctagttcttatatcttaggacaaaaaaggaggaaattcttgtgttagaatgtcttcatgcccaagcctctgatcaacacccactattgcactacttgagaaccttagaggatcataaagggaagtaaagtctaaaatggtacattcaacaatgatctgataaattcaataatgatattaataatagaataagagacctagttgagaatgacctgctcatgctagaacaaagggagggttatcataagcccttttgtcaattattaagcgcatacctttgaaatgtttgctaagccacatgataattcaaaggatataattaagaaggttaatttagatgcccttagttatgatggatggttagagagagcctaagattttctttgattagttagctgatcttaataattactgtgaatgttataatgttttaggcacccaatgtatttgctttatcagaataaaacttcttgttcctgctaagcagcattggcaaagtgttcaatctaacttgaagcatttagtcaaggaaccaatcatcctttgggttgaaatgaaacaacaattgaaacagaaatatctccctatatatcaaaagaagcagttgatagatcagtagattaaccctaagctattattccctagtgtgatcgactacttagcttgctttaaggagctttagttgagatgcaatgtgaaggaggaatcttgggtaatcgtggtggttgttagatcggcggtttaaccttacatatcatacgaggcagttgctagatcagtgggttaaccctaggaaatttcctctagtgtggtagactacttaggtcaccttgaggagctttagttgagatctgatgtgagggcggaatcttggctaaccatggaaaaattcattaatgggttaagatcaggaattagaagagagataaaccttaattctcctgaaactttagatgaagcctatcacaaggctttagagattgggatcctagtaagagacatataacttctcaaactgggagtcttatcattgtcaaggtttctctcatgataggttaggaacaacttgagggctagcagaagtggtaaagccagtcaaattacttcttgtggcagtaacaattccagtcaagggattatatagcatcatgctggccacattgcactctaactagagaataagagtctgaagattcacaaaatggtgaagatagcaatcaaatttatgaacctctagatcatgtgtttgatataggagaggatattgaagaagaatgggctaataatgatatttgtgtaatgataataataatgggctaatgataggagaggatatttgtgtaatgtggtagcttttatttttgtacttactatctttttgatttaagttctcttctttctttcttcctttttcgggcttttcaaataaggaaaagaagtgcacatacatatgtatgcatttgtatatttggtccttaactataataatttgttgtgaagtgataggttgctggtctatagtatccattataagaaatttatccattttatgtttttctaggtttattgttctggtgaatggtattatttaatgaccacatgtgagatattcaattgtagggagcttctctttggtagcttgtactagggtatcagttttcaatttgggaatggttgcactagtaggactatatttaggtgtatcttagaaggattctagtaagttggtattatttgcacatcacttgagtcatggcatgagctaatgaatttgtggagaaaccaaaaggaatttctttcacttaatcccattcatatgtataattcatatatccaagtattgaactatgataagttacattgtttcacctttcaattttaaagtgcttgacctgtcaaatgtactaggtggcacttcttgctgc

SEQ ID NO: 12396 - DNA, 4242 bp, Vitis vinifera
  Intron number 6 from transcript GSVIVT01011087001 (locus G SVIVG01011087001) derived from phytozome v7.0 (chr-ID chr7 ; pos 1696814 to 1701055)
taaagagggtcttcaatctgttcgacattgataatgtatgcattgatctcttctatatccttatctatgatgatgtcatagatagattctcagtgtcaataactgttcaagttcctaggtggttttatattcatgaatgtcatagttaaaatacataccattatgtttattccttatcaagacgttgtagcagaaagttccttggtgttctcactgatttgtgcgactgtacctgttttgctgtttgtgtttgttttaattaatgttcttgagtcatattccttctgggaccatggtttgaaaattcatctgggagagttcaaatccttcataggattgcattaagagaattttcagaatgtatctaaaaaaagtgaaaatttcttgcatgttgtgcccattaagaaagtttggaaacttaaaacaagacctctttcaatgatgtgcaatgaatattttaatgtaaacataaaatattgatttgtaaaatataattgaaacctatttcattaacaaacatcaaaataagttaaattcattacccctcactacaaaaacttagttgattttagataaaactaaaaatttaatattgaagaatgttgattctaagtatcaaatactgattgtgctaatttgctaaatttaaaggtctgtttgtatcatttgaaacctaaatgctgaatttaactcaactatttcacaaggaaaagaaaaaaaaggaaactaaagtttgaatgtgttgaatcaataatttatatgatatgttaatcttgttattataatatattaattttgacataatatacggaagagttttgatgtggttaggaacacaatttcttaatttcttttatgtgtgtgtgtacatgtatgtgtatgctaaatgaaaacaccaataactcatgaaaacatttaaaacttatttagttaatattaaaataggaacaaactaataaggtagaaagagtttctttttgaatgcaatttattttaggaaggattaaatattaataagaatttaaattaaatggtaaaaaaaaaaaaaaaggaattaaaagttgtaaaattttaaaaaccactttatatgttctgttcaaatgtttaatcatgcttttgacttataacattaagtggttgctaaatggaattcaaatttaagtggcgacttatttgtgttattattatttgataggtaaaacaaagaaggattatattgaaagtgcctaccaaaaaggaagtgaaccaagcacacatgttgcatacaagatacacccaaggaagaaaaaacacttgacatcctaacccattcctaatttgtatactaaatcaataatagagagttttatagttcctacttccctattagatcaaaagaacgaggttttaaggaaaaagtactttgctgccataattgacttctcaaaccttcaaagaatcttaggttacatttggttggcaggataggataggataagatatgtatatcctaggatatcatattccattggataagaaatacatatcttaggacatgatttccaatgagatatgatattcttagatattaaatccaatggacatgatagcctaaggtggcatatccaatgggatatgttatgttatgcttatatttagtttataaaatgaaaatatatatatatatatatatatatatatatatatatatatatatatatattattttttcaaagtttaaaataaaaattatattgcatttcaatattttctatttaaaaaaaatgaaatttctcttacatttaacaaatattcatgatttagatatttaaacttcataaatattttttttttattttatgttattcaatatataaaaataatatataaaataattatatattaatattgttttatgatatattttataaagtaatttttttaccttaaatttaattttatgatgaaaaaaaattattttgtaaaataattaatataaaaaataaaagattgataaaataaataaatttatgatacatgagatatgtatatcccatattttaacatattctatgtagaaaggatataaaaaagagggtggataatatattctaccacttattttatctcatgtttggttgaacatagaatgggataagtgatggtataacttatcttttcccatcactaaccaaacatgggatataatatgttatcctctctcttatcctatcctatgccatatccagccaaccaaacatggccttaaagtttttcttctttcaagtatttcaaaacaaacaaagtgggattaatccccaaattattttacggatggatccatcaaaagcacctaaccaactttgtaaaacctccttaactgattgaggcaccacctaagcaacttcaaatcacaagaaaaccaaagactaaagactagacccactaacaatggatcagaatatgggcagccaacttagctgcttgcttgcaaaggcaataacaatcaacaagattccaacttgcttgcataggcaaccacaatcgatgaaggtccaacctctcttcataagtttgttagttgtgagaattttcttccatgctgcctgaagaaactaaccttaaatggtgccttggaacttcaaactgccttagctggaaacaaagaagattccctcacattaaaaaattttgtagtaggatccaacaaagagagagcccttcttggttaatttccacaccagcttatccttcaaagttcaaacccattaactacagatagaggactcagcagctacaacaaagaatccactattccttatgattttccacaaacttgacccataaacatctcctctctctaaaacaccaaccttcttccattttgccttacttatctacaatcactgttctccaaaaattataccattcatttgcaaatctacagagccgctttccaaaaagaccttgttagaaggtccaaaagtcataatacctaagccactaaaatccttattgagcagacaattccctaacctattaggtggattgaagaatctaaaaggcctacacctgaagaaagcccctttggaccttctctaatctcattttgggaatataaaaaatggataagaaatagattgacaaacatgagggagtgttttttacttcctccgaagttgtgctatcctttccaagaagccaacttgcttttgaatctctcctcaactaaggaccacactgagatggatttgaaagaggcacccaaagataagcctaaatactttgagggaagacttcccaccttacaacccaattaatgagtcaaactctcaatattcccccactctcccaactagaatgagctcacttttctccaaattgatcttcaatcccaacactgcctcaaaacgaaggagagtccacctcacatataacaatcgattgtggttggcttcacaaaacaacaaaatgtcatcaataaaccaaaaaaaaggaatcctcaacccttcccctctatttctccaaaccttgaaacctgatataaggcttctttccaccgcactttgaataaaactcctcatttgtgttatcaaacatgcttaaaaaatgagacccacttattttttcacttgttagtgcttattcttttcataaacatcaccttatttcatccaagtaaaaacagagcagaatgatttcatttttcatggaatgtacaactgccctcttacagaaccatttcgttcataaaaaggagtataatcagctgactttctttcatgtgaggaatttgctttttcaagtactaatatgcttaacagatgaagctaagggtttttgaaagtcaaggtccagcttgtaaatagagttatatattttcttccacagtttagccagcttatgattgagattttgtttcctgagtttgatttaagtttcttattctgtttaccctttccatgtgcatagcaattggtctatgggttataattggtttggtactttgtggttaacatgtttcttgctgttatcatgacctgtttttggttgagtagtaaaagatggataatcataccttgcatgttcagagagccattcctccacattgcgccataacaatatgactttaaatttgttgaagcaattgtgtatctgtcatgcatggttgcaaatttccttctgaatccaagctgctgtatcctacgatgctgactaatatggtgatgctttcttattatgtgaaccttcattcttactagg

SEQ ID NO: 12397 - DNA, 5331 bp, Vitis vinifera
  Intron number 14 from transcript GSVIVT01005935001 (locus GSVIVG01005935001) derived from phytozome v7.0 (chr-ID chr Un; pos 22867434 to 22872764)
taacagagaaagcagcttcgactggtccaccccaggttgtgtgtattcattaaaataatcgtaatatggtattgttatgatatgaatttattttgctgagaattgttttttcaccatatcacattagttatataattttgttgttacatttcattcatttctttattacgttatatgttcttgttactgaatccttgttactgaatctctcaatgattttaattcttgtttattgaagagggcagtcataatgtaagtttaacatttatatcatagcccggagttgctgtttttggaacatttggaagttctaggttgaaaggtcttttaaatcgtttttttttcttgataggcattgaaaggtcttttaatcatattctatgctttttgatgtgaatatatcttttgatttggtagcaatatgatgtcactttgactaaaaggttatgaattctaagaccattttaaatacctattaaagtttctagtttccatggtcatagatgttttggctggaagtgaagagccgataactcgcccttccttttggaatccttttacttatgatcactctttttacatttatgaaaaggaagagcccattattaacttgtattccattcccttggtattatagacattgtagcttactatctttgaagccatttcattatctttgttaatattcattatgaatattgatgtagcacacaatcatcattagtttctatttttagcttcctacgtcattagtttctattttagattaatttctattttaggttagtttctattttctacattattagtttctattttagattaatttctattttaggttagtttctattttctacattattagtttctattttaggttcattattagtttcctatttctttcctggttttcctagtttccaattttggtttcctatttcaattatttcctttatttttgcattacaaacattatttaaaggcttattgtaattgttagagagaagttcaatatattttttcagaattattccctaattttcagatcctattgtgatctttgtgtttgttcctgagtgtttttctgtttcattttgaaacaaaccttccactgcaccaaatatatttaattaaatccttgaaatgattattattatgattattattattaatttctgggcagtggtttagggtggggggtatgcaagaagtgtgtaagaaatcccaattcttaaaataatgatttgcatttttgttgcatggtttgcccctcgtatattagaaaaaatcaccttaaagaggaagaatgtgcagttcttcaagcataggagaaaacatgggcccaaatttgttccaaatttgttattgttacatcgacactcctgtgttcattatgcttgattgtaggacatatgtcataagtatgcatatttatttcccatgcacactgagagatttttctctgattgtggtctccccagaccttgcataagcagttgctaagagcttgtttatttcatgtacatatggagtaattttaggttcaatcaatatttttatttattttttaattagattaaccccagtcaagagtaatcagtaagctaactcccaccttagtcctcacctcgtctaatgtagctcccatgatctgccattaggaagtttctggtgttattcttcattgaactagaggctttccgctaattaaggttgtcaaaatgtgtctcatatcacattaaaatttcattaatttgtgcttcaagtattgtcgttccataccagagttccattgtacttttgtaagatatgaatcttgattatcacaattaagtgtacagttaattagctttccccccttttttccttttcttctttttgtttagtagatagaaaggacatgtatgaaagcacctgaaaggaggtaaattcaagtaaatagaaagtatacaagggaacaccctgacacagtgaaaagaaaagaaaagcggaatagcccagtaaagaatgctagttgtacactcaaaccaacacactctatcaacaaaatcaagaagcaccatatcctttcacttagggagtccataggccacaaacatgaagtttaaagaaaacatcttcaaactttaatacaaaagactctttgatccctttcttctggttgtgcgcaaaaatgcattgtagaacagttgtcctgactttcttcttttgtttcccacaaaactactgctccaagacaatgctgaattttttattgaatgagacacaacaataacactacaaacagaaggaacacttcagtccaaagataatgcaccacccccacacactggacatgaatatgattagttgacatgtcatcctatttgcaaaaacaacaccagttctcaagatcacaaccttttgcattaataatgcaaaaggtgcattttttaataggaaaaagaaataatatatattaaaaggtgcctaacaaaaaaggggatgcaacccccacccatagaaggctataaggctcacaagggtgaagaaagaaagcataaaaaacaccacctacaacaacttcctgcataaactatttacaaaattaagcaagcaatggttgactcccatccccaagtggcttaatgaagaaagacatcaaaaagtatcttttaccaccaacaaagcacatccagtgttttcgagatttttctattcatttctttccaaatggtccaaatttcaaaataagcataaaagggtcctcttccatatcaattttcttatttgatccaagagatttggttgccacccaatgagaacatcatggacttctcagaaggaaacatgccacctcccaaaacaaacaaaaaaccaaagatcaactgttggatgactactcaaagtggatgagaatgtggcaaccaattcttcttgattcttgcatgagcaatacctttttattatataatcaccagaatttttccccaagctgcttcccaagcagaggtgctaatcttggaagcctgaggtcctgtttggattggctttttaggagtcatcaacatttttttttctaaagcttagtaagtgcttttggacatgaatatgacttaaaaaagagttttatatggaaattaggaaaatgttgctttttttagaagctctattttcatttatgtaagaagctatttcatgtttaataaaatttttataacacaaatattgtcccttgaatatggttttggttttggcttcggcttcaacttctagctagatcaaatacaaaaagttatcctaaatagggccctaatctctctagcaaggaaggataaaggacatctaggatctagagatttgtagcaggacctaactagggaaaaaaaacctatttttgggagccttccatacaaacttgtctacaatgtttacttgaatgcacatcctgctcagaaattgcaatcaaataagttcctcctaaaccttagattccatgtggtccttgtctttcctcttgcatcccaataatccataacctatgttttctaatggattcctatggcaaactgagtgaggaagcaatcctttagtgttgtctctccgcaacattcttctgtcgaaaattttatcaattggccatgatcaatgcaaatggtaatctttgcttgagattctccacaacatctgttgatggctttccaaaggctacaaccatataagtcttcctgccaatctcaatgcaccaatcccatgccatctcacaatattgcttgcaccagcaaatatcgataaccatttcctaaggaatgccatattcagcactagaagacttctttgcaccatccttcctccatccttctgtgaagacaccacatcctagatattaatataaaaattatttattattttcctgaaaaattgtgtgaaagacaccatttccttcacttataagattgaaagttgggctgtgaagtttgaacaactgaattaaaaaaatatatcattcgcttgtgttggtttatagtgttgactgaattctatgattacatgaagtcatgaaattctctgaaatttcaatgtaaaaaaccaaccattaaaatgtagataaatactgctgtatatctaaattattatatcagtatcatatgttatgtctatgcatcttctaagtttaatttttatgacttcaaagcttgtgaagtggcacctataatggaaaattcatgttcctttaaattgtagtgataaggtggtgtagagtttgtagctgaatttgaaaataaacaaggtcaggttctgagaatcatacattttcctcatagtagaaagaaatgagatgtattaaaaacaataaagagcatgttgatttaccaacaatggaaactatatggattttgaaaatgaaaaaaattggtaatttaccaaaactatgctaattatttatttttataatcagtttaagaaatctattccactgataaatttgttcatctatccatattttttgctttatttctctttgggaaagttaaaatgatctcctttgagatttggtgaaattaatggatttcccttcccaatgctgtttggaataggattgccaaaatgcttctgggatatgtatttaaaactttgtaaaaagtgtgtttccatacacttatgtaaaaataatcacaaaataggaaccctttaaaaataattcaagtttcatacacttaacagttaaaggtaatacctaagatggtcaaaactaatacttatatcattaaaaggtagtacctgaatggttaaaggtagtacctttgaccaaaaaaatgcatgaaatgctaattattttagatagatacttgaaatttgtattttataaacttgggttcctattttgtggtttttttttcgtgtgagtatatgaaaacacacttttccttttaacttttagtcgggcaaaggagtaacagaaaggttggattaaccccctaaagaaccagtgtcacatctttcttaaatataccatttgatgcttttgataattttttagagggttaaacctgttttcctttgttatgtgtttgatttagtagagtacaatagctctaactaaagaattttgtgaatactatttcaaacagagtcattataattttaaaacaggacaggtctctgtaattttccaaatatgaggggagttccttgtaatttcaccagatgtcaagtgaagctagtgtatttttcccatttcacttctcatgaatgccttttctctaatgattttgtatgggacttatagtgatggtgatttcatttacatataattgtgattccagatttcttattttgatgtttttacag

SEQ ID NO: 12398 - DNA, 6707 bp, Vitis vinifera
  Intron number 9 from transcript GSVIVT01029306001 (locus G SVIVG01029306001) derived from phytozome v7.0 (chr-ID chr1 1; pos 17183829 to 17190535)
caagggaacaaaactgaagctgtgaagcattacaggtgacaagccttcatgttctttaacattatgggattggtgagatgcataggagattatgcatcaaactgtttcatgtcaatttgaattgcttgaggggccaccacttatttctgtgcacatgtatggagtttccattatatagattggaaagaacaaaaaactactgtatactgcaagctgcagggccatttgggcgtggacaagaaaatgagttttcattctgataattgaatgctgttcccccacatttttctgtctggaaacacattttttactaatgagaaagaaaaacacttcgggataagaaaactatgaaaaaaggtttggttgtaatctgaaactgttacttggcaaaccattaccaatggagaggtaattggtggctgtttggccctaataccatgacattagcacattcggactgcaagtcaactgcataaactatgacttagaatttaccatcaataataacagcatctcaatttcagtttgtgccatcacagataatgagttctctgtgtttaggctgctgcataatgcacaatgtaataaaatcttatgtattatggccatatgccctctcagccagtcatcactaacatcatgaagaatctgttatgtctatcacaatttgcatgatttaccaactaatgtaaacatttaagcggcaagtctgcctgtagatcaacacataatggcataacacaatatgataaaaattataatccaaaaaaatcagtattagagatggtctaaaatgagtaggtgtctgtacttcaacacaagagtcatgaatagttccaatttaagtaaaggaatggtatgccaaggagggtgtagcttccacagcacacatataggagaagatgggtatggtaatcattatggtggcatgcttgttgaacatcactttggtactgtgcaatgttacagctgtgaatcatgtgttttgcttgcagtctgattttacagtctttcaagtgttaccaagaaaaaaatttcaaaacattaataataataacagaaaattttcctttgaggcctgcctcaagtattgagggactgggttgggggtgtgggaggttttaggtttaaaaaaaaaataaaaaattgtttaatagaattctttctcaattaataaaacagtacatcgttgtaaataatatgtttaggttgtataaacatatcaaatcctatccaaccaagaaactcttatatatcaatacctataattgagggatctgattctatcataataaatacaaaatatacaccatgtacacaactcaatttgttatatagagaatactgagatttccaacactccccctcaagctggtgaatagatattatccattcccaacttgcctactataacatgaaacacggagtcggccgatccctttgtgagaacatttgctagttgattatttgtaggaatatagggcatacaatcaaatcactctctagtttttcctttacgaagtgcctatcaatttcaacgtgcttagttcgatcgtgttgtactggattatgtgcaatactaatgactgacttattatcataatagagcctcataggactatcccatttaattatgagatctccaagaattatctttatccacaacaactcacagatgtcgtgtgccataactctaaattctgcttctgagcttgatcatgccaccgcattttgcttcttacacctccaagtcaccaagattcgtccaagaaaggtataatatcctgttgtagaccttctgtccataatcaatcatgcataatcagcatcggtatagacctccaacctcatttcagggccttttttgaacagaattcccttactcggagtacccttaaggtagtgtaggatgcacttgatagctggaagggattgtgcataaactaaccacactaacggcataaacaatgtttggtcttgtgtgtgaaaggtaaatcaacctcccaactaattgttgatacattcttcgatctatattcttgtcatatgttgcctctcctagcttgtgattctactcaatgggagtttcagctggtttacaaccaacctttccagtttccttgagcaagtctaacacatttttgcagagaaataaatatcccctacttagattatgctacctctattcctaagaaatatttcaacttacccaatacttttatcttggattcatttgccaaaggtctctgaagtctctctttttttcttagatcatacctgtcacaattatatcattaacaaaaccaacatgactgtgactccccctgaagctgaatattttataaacaatgtatgattttcttgactttgcttgtacttgatctccatcactgttttagtaaaccttccaaaccatgcgctaggagattgctttagaccatacaaagctttcttgaacttgcacactttatttttgcctaaacctgtattgaaacttggtaatgctttcatataaatttcttcttcgagatctccatgtaaaaccacattctttacatcaaattattgcaaaccccgaccaaatatggcagctaaagataacaaaattcttacaatattgatcttaaccactggtgcaaatgtttcttaagagtcaaaataccatatgtttgtgtatacccttttgaacaagtcttgccttatatctttcaagtgtaccatctaccttgtacttcactgtgaacacccacttgcaaccaattggtttctttcctcttggtaactccacgatctctgacgtcccatttttctccaatgcctccatctcaattctcatagcttgtttccaattcccatctctaagtgcctcagataaggtttgtggaatggtaatggtgttaagttgggtgaggaaggctcaatgagaaggtgaaaagctgttaaaggtcacaaaattagacaacgaatgttgggtataagaccttgtaacttctttgatagcaatgggtaaatcaaggttagtataaccttgagattcacgtaaagaagaagaggaaacattgattacctcattactaggtaatggattggactcttgaacttgcataggatcaataatggtagctttcctccttgattacacttgcaatggctttgtagttgtaggtttcgaagagtccactcttgttgactctctaagggtttcaagttcgagggacttaggttcaggttcaagagaaacatttactattttaggagtctcaccaaataaggaagaataagatgaagaagagaaaggcagatcaagcaaaaacatacccttatcttccatagatgatgtctcccctcgaagataagggttacaaaaataactctcattttcaacaaaggtcacatctgttgagacaattttttctagttgcaagatgagagcatttataccctttttgagtggaagaatacccaacaaaaatgcatttaatagctctagggtccaacttactaagattataggtatgagcatgaatgaatgatacataaccaaggactagtggagcaagtttgtttgagatataaaagttgggaaaaaaattctaaaaaacattgcattggacttttcattgttgagattctagaaggtacccttatgagatgtgcaatagtaagacttgcttctccccaaaaagattttggaacatttttttgaaacaaaagggctcgggtaacagctaataggtgatcatttttctgctcaacaaccccattttgctagggtgtgtcaacacaagaggactcatgtagaattccttctttttgaaagaagggtgacaaaacttgattgaagtattccttagcattgttggttctaatttttttgagcgcaatcccaaactagttttagatcaatactaaaaatggttggaaaaatagtacttacatcagatgataatgggcttcaaggcccaagctttaatctggcactctctagatgataatgggcttagttgggatcttatataagtcaatatgggttcagcctagaaagtactttcaaaaattaagttatggcttagtcaatggttaaagttgccattttcaatcattattgttatcattttccaacagtctttaatgtggttagtaatcagtccaagtttgccattttcaagttgcatttattgtgtctagttccaaggagttataagtccctagaaaagtcttatatggtagttgattagtcttttggaagtaatcaatcaatgaatgaattttcagcagccagtttttcctttgtgagatgcaaagagtacttgggtgtgaagcctaaggtttctaggagtgattcctaaggtccttgcaattatactctcctttcattttattttttgtactgcatcacataactctaagaatactaaaaggagggtgatcaaaacaaaaatgaaaaagccaaatttggtccttatttgaagattttttagacaaaaatgacataagaacttggttcttactactagtccaaccatttggtgcttcaaggtagtaaagtccattttttctctaacaagtccagtcattgtccccgtagcccagtcctgaaataaacaatttgtagggaaaaaggttacattatggtgtagatcttttgttagttgatggatggaatgttggtagacaattttggaacatggaagacattttttaattttagggcacacttatttctccttgacaagccactgtggccagagatctctgcaattgtaatctttttgttgctaggactgggttataggtagagaatttatgagaggaatgggtcatatggtcagtagctcctgaatccaagagctagaaaaagaaatatcagagtcacttaaagcatgagaaacagaaaccatacctgattctgctgaaaaacacaaactagagggttcttcgagagtctccaatagactcttcaacctgtcattgtcttctttgctaaactgagccttttcaccactaacgaaacctgttttctcgtcagaagaagtctgaccattagataaatgtgcctgtccatgttgtccattcctgaagcctccattccggttttggccttgtgactgattaggatttggcggtctcccatggagtttgtagccggtttccttagtatgtcatggtttttacagtagttacaccatacagtgggttttgaagatttaggtaaatctccacacctactattgttacttactatctgtccaccattgctagatataacttcttttccacttgaattgatagaaatcattgctgagccttctaccaattgtggttcaagcataactatcctcctactttcttccgttcagatgatagatatggtcttgttcatagatggcagctcttcttttccaagaacttggactctaacttgatcaaattcaatgttaagaccaacaagaaaataaaaaaatcttttccctctcaacaaacctttgaagcatggcaatatcttcattgcacttcatttgtatactttgataatgatccatctctagccaaaaactttttagaacattagcatattcagtaactaaatgtaaaccttgttttgtggcagcaatttttgatcctgatctcataaagtaaggtaacatcacgcatcttggagtacatttgtcttaacaagcttccatatttcacaggcagaattcagaaacatgcaggttcctgcaatatctagtttcatgcaattcccaagctaggatataatcatcgagtcttcttcatcccagctagtaaattttggatcgcttaaatctggtcctccagtaatcaaatggctgagtttcccctttcccttcgacaaaagccctcactaattaggaccattgcagattccattcaacctatatgctgcctgtatgttttgaagctcccctgaaggatgattctgctgtgtttctatggtagaacccttcagatttgcttgagacactttagacatcttgaatagaaaaaaaagaaaaaaacaaacaaacaaatacggaaaagggaaaaactgaagagaggaaaataatgatgctaaagggatgaaccctaatcatagaagaaaagaaaaatattattatagaacctgctctgataacataacaaaagaaaatatttaatagaattctttctcatttaataaaaagttacatcttaggaatatatatataaatatatataaaaagtcctattcaactaggaaactcgtatctatcaatccctataattgagggatctgattctatcataataactgcaaaatatacaccctgtacacaactcagttttccttatatagagaataccgagatttccaacaaggttcaagtcttagtagggacaaaaaaaaaacgttacctattataaaaagggaacaattttccattgttaaataaatttgttaaaaaataatcattcttctggtattgaatatctaatgtggcagcacttcatctttttcttcctgaaacacaggcactttgtctcaatcccttgcttcccatgcaactttttgccttaataaataatgctatggtgtgttattattgtgttattctattgaccatgttgagataattgaaaaagaaagtctgataaattgtgggaatttcctgaattattttccttgatgaaattttgagaaagtggattctaaatccagagaa

SEQ ID NO: 12399 - DNA, 10052 bp, Vitis vinifera
  Intron number 5 from transcript GSVIVT01022038001 (locus G SVIVG01022038001) derived from phytozome v7.0 (chr-ID chr1 4; pos 3943486 to 3953537)
gttctggtctttcccttctgtttttctactacgtaagcatatcttgtttcaattttatgcctgtttcatgtgcttgcaaattcccttgtagaagtgcactggttaatatctaacccacattccataatatagttcatatactttcctttggttccactcttctgttaagagtcttttggatgctacaatgatgctttggaatgtgagctgattttattttaattaatgtgatcataacccattactagaagtttgagagggatattaatctaatatgtttctcttattcttttatcttttatggaaaatctaatcctccagtaagctatgtgattgtccaccttgaaacatttaagttttagcttacgagcaaatgatcaataaccccaacaattagtggtctcagaatctgtaggttagcgcaactagatgagtttgaaagtgtgagtttattctgtcccttagatgatagatgttgttaaagaaaacttggatacttttatatcccaagggactatctgtcattatttaacttttgggccctcttttccctgttctgtaaacaattcacccagttgacatccctggttaggtaggaggaagcccccaatttgtagcttctaaaaaaattaaatcataggataccaaaaaatttcttgttgagagagaagtaaaatgatttgatcaccttagttctgttgaaaattaacacggagtaacttcaattattgtgcaaattccttcaaattttattttcttttgaaatggttgaattagatgctgtcattttaaaattttataacaacctacagcccagacaaccaaaatctggacacatttattgctaaatgaaacagttccttgagaggacatatatctgattctgagtggcatcaaatggagtcttgcctggacacagtgataggtaaaaggaaggaattcctgaggggtcacttatcattggaaaaagagcgaagatggtacagagttcaggaaaaaatttgaacttacatctggggtatatttagtctcccttgcctttgtacccaaactagctggcatcttcaagcatatgttatagcatcttagacggaaaatgccatttggtaaggaaacttgatgtgtgttatggactgctttttctaaacaaattacagtgctatagtttattttgttgattaaaaagaagtgtgaacttgtgctaattacaattacagcgtaactttatagcaaaaaaccattaatttattaggcatatgatgaagaatttctgaactccttttattgatttattcagtacacaccatacacatatatatacacaaatgactgaataagaaaatatctatctagcttgattctctcctaaaaaataggaaactgaatcctaaggaaatatcctaaatgatctctccttttttattcctaaaatactttcctaaattaaaaccctaactttgaatgccgaatttcaacactccccctcaagctggagaatatatatcatataatcccagcttgcaagttaagtcttcgaagttaggcctaggtaaagctttggtgaggatgtctgcggtttggtgcttggtaggaacgtagtttaatttaaccgtctcactagtcaccttctctgtgatgaagtgtttgtcaatctcaacgtgcttggtcctgtcatgatgcacgggattctttgctatgcttatagctgcctgattatcacacatcatcagaatcggagatgaactcgtttgtcccagttcactaagaaccctttttatccaaatcccttcacagattccctgtgctagagctctgtactcagcttctgcactacttttggctacaactgattgcttcttactccttcaggtaacaagatttccccaaacaaaagaacagtatccagaagtggaccgcctgtcaatgatgtttcttgcccaatccacatctaagtatacttcagtgtcacgattctttgtctttctgaagaatagacctttccctggtgtcatttttaaatatctaagaatcctgtagactgcttccatgtgttcctcagtggggctgtgcatgaattgacttacagcactcgctgcaaagccaatatctggccgagtgtgtgagagataaatcaagcgcccgacgagtcgctgatatctccccctgtctaccggtgtactctctttctcgataccaagtttcttctgactatccataggagtattaattggtttgcatccaagcataccggtcttcttaagaaggtcgagtatgtattttctttgagagactacaattcccttccttgatctagccacttccataccaaggaaatatttcaaatttccaaggtctttaacttcaaactcttcggacaaatacttcttcaaattctgtaattcctccatatcattcccagatagaataatatcatcgacatagactatcaatatgaccattttcccggcatgagacttcttgacaaatagagtatgatcagcctgaccttgtttgtagcccagcttcaagactgtctttgtgaatctatcaaaccaggcttggggagattgtttaaggccgtacaaggatttttggagtttgcaaacctgattctttgtcatacttcttttgaaaccaggtggtatttccatgtagacttcctcttctaggtcaccatttagaaacgcattttttatgtccagttgttgcaaacaccaatcttgattgacagccaatgagagaagaatcctgatagtgttcagttttgcaacaggagcaaaagtctcctgatagtctatcccataggattgtgtaaaccctctagctaccaaacgagccttgaatctctcgactgatccatctgctttgtattttatggtgaaaatccacttgcaccccacgagcctctttccaaacggcaaatctgtgatagtccatgtcccattcttctcaagtgcatcaatctcatcttgtactgccttcttccattctgaaattttgaatgcctcttgtattgtgttgggaacctgagtatcatcaagagaagtagcaaatgctctgtaagatggtgatagcccttcatatgtaacataattcccaattggatgatctatacatctcctaacacccttcctcaatgcaatcggcagagtagaatcatcaatgctgggaattgacacctctccaaccctatcctcacctatgttctctttaggtagacttgaaatggagtcaatatattggccacatgttggctgtgatccgtgctctaattcctatcttttcctcctcctgatgtatacttgtaagttctcattagcaagttgtggggctataggttgaataggcgtgggagactggatggtcacgagagaaggaacattggtcacgggagaaggaacatttgtgggctgggctggctggattgatgacgacatgggtgtggacaactcagtgggcgcagattggaaaggatttggtgattctgagtgagaaaaaggtacagcctcaagaagagactcccaaacttgatgttcattcatgttctccccctgaacatgagatttgggatagaagaagacatgttcaaagaaagagacgtccatgatggtgtaaaatcttttgtttgttgaagaatagcatttgtaccctttttgggttggagaataccctaggaaaatgcacttattggcttgaggagcaaatttgctacgattctgaggatacacatgaacgaatgtcgtgcaaccaaatactttgagtggtaaatcagaagaggccgcacgggtgtgagggaatttttttaagagaagttgacgtggggattgaaaggtaagcactctggatggcatacggttaatcaaataggtagctgtgagaatggcttccccccagaaatagttcggaacattagaggaaaacataaggcaccgggcaacctccaagagatgtctattcttgcgttcagccaccctattttgttgtggggtgtcaacgcaagaacttatgtggataatgccgtgattttgaagataggtactgagactactagtaaagtattcctttgcattatctgacttgaagacctgaattttggaattgaattgattttgaaccataagattgaaggtttgaaaaatgtgcccgacctctgacttttctttcataaagaaaacccatgttacccgtgtatgatcatcaacgaatgtcacaaaccatcgagtgccagaaatattttttatccgtgagggaccccacacatcactatgtactaaagagaaaacagtcgaaggtttgtatgggatttgaggatatactgttcgagtatgctttgcaaactgacaaatttcacagtgataagatgctggatttttattgataaataatttgggaaacaattttgtaaggtaaacaaagctaggatgaccaaggcgataatgtaacattataatctcactatctttattgaccttagaatttgacacagaattgaaagactctaacagactttgagactgtatgcaacttgcttgagagacttggtttgagaatcggccacatgggaggaggtagagcccggaacacagttcagcactgccaatcatcttccctgatttcaagtcctgaaaaacacacgagtttggataaaatttagtaacacattggagatcacgggccaatttgctaatggacaaaagattacaatccaagtttggaacatggaggacagagtcaagatacaattctttagtaagttttatggaacctgtcccgacaatttttgactttgaaccatcagcaatatggacggatgaatgaccattacttggcttgtaattttgaagaatggcagcatctcctgtcatgtgatcagaagtacctgtgtccactatccacggcttcattcctcctcaattagcagtgaaggctgtcccggtagtactgccactgccaacttggcttaatagtttctgtagcatctctatctgctctttgttgaatggactcggcttaggaacagatgtgctctcagagttggcagccacgtgtgctctgccatctctatcaaaccgtggctttggtttccaatcagctggtttaccatgaagcttccagcaagcctccttataatggcctagtttcttacaataatcacaccaaggcctatcctgtttttgacgatctccaccactattattaaatgaccgagcagcaaaggcagaggcatccaatgttggggcaggttgctctttggatcccatcatcactttctttctactttcttcacgcctaacctctgaaaaagcctccctgagacttggcaagggtttaatgcccatgattcggcctctaacatcatccaattccctgtttagtcctaagaaaaacttgaacagtctcttttgttccacaatctgcctgtatgttgctgcatcatccgaacatttccatgagtgagtctcgaataagtcaagttgctgccaataccttgtgagtgtgttgtaatactgagtaactgactgttctccttggcggaagtcatgtagggctgattcaacctgaaaaagttctaaagtattttcagaactcgagtaagtttctttggctgcatcccatatgtcctttgcagtcccaaacagcaagaaattttcacctatgtcattgttcatggaattgataagccatgacatgatcatgctgttttcaatcttccacttcctgaaacccggttctgtagtttctggcatggctgcttctctagtgaggtactcatcctttcctttaccgcaaatgaacagcaacacagattgtgaccactgtaaatagttatggccatttaatttgtgtcctatgatgagaataggagaggaatcactgccaccaaggtttggaatttcagaactgccccctgattctggtgctgtgacgctggatacttgtgatgatgtcattccgtattttgtcatggagatgaggaagacaaccgaatatggttgctggaaatagggaagaggaggaaaccagagataccggcctgagatacaaccgaatatggttgttggaaatagggaagagaagaaaaccagagataccggcctgagaacagggactgatggccggaatgagagatggccagagagagagatggtcggattgagagatggccagagagacttggccggaatgagtcatggccagagagagagatggccggattgaaaggtggccagagaggtttggctggaatgaatgatggcctgaataagaggcggccagaagggattagggtttcagaaaactggctttgataccatgaagaatttttgaactccttttattgatttattcggtacacaccatacacatatatatacacaaatgaccgaataagaaaatatctatctagcttgattctctcctaaaaaataggaaactgaatcctaaggaaatatcctaaatgatctctcattttttattcctaaaatactttcctaaattaaaaccctaactttgaatgccgaatttcaacagatctgcatattcataattcagatagaaattaaattgggtttaggcctatttaggtggcttgatgtctcaaacaaagcaactaaatataagatgactccatcccatcctggtccattggttgggttgggctttggtttggttggtttttaacaccgagaaggggggctgttggttaggtgtttttgagatggtaccttacaattgctaatcactcccctgatttttccaattgttttgatcttcttttttaatcttattaacaaacaagcaaaaacacaagcaagaatggatgcaccaacactttcccaacaaggtagtcaatgcaatttacacgcaaatgagtcaacactccccaaccaacatttataaggcatttcaactactcaaaaaacacattttcaaatttctattaaaatcaaaaccaaattagagattatttcacactattccaaagattaaatgatccaatttcagcccattttctcaatcaaccaacataatatattaatggaaatttcataagctaagataaactaatggaaagatgagataaaggtaaaagacaataacaactagatttaatgtggaaaaccttcaaagagaaaaaaccacaagcctacaaacgataaaaaattccagcatgaagaaaattaactaagtacaaagatttacctagcccaaaccttcaatcctctcctagaccatttgcctagaaccttcaaacttcaactacccactttcttcttctaaagcatacttggagtccacaccaaatttgatctcagtattttcttgaatccacatatgatgaatatgagagtagagatggaactcacattgaatcaacctttttaaaagaattttttctcacttaaaagatgatttttagctcaacacccataaaattttctttcaaaccaaacgctcccaaaataggtaaagaacttgaagctcaagggagaccacctagttctcatagttgtgtttccctcatctagaaaagagcttaaatactagggttttaaaacccatcaaatgactaagatttgtttggaaaaataatgaagattcaccgatgtgatcgaatcttgattgatcaaacgagagtggaattttgggtacaacaaaaactattaccctttagtttgattgatcagaaattgatccaaatgttttaacacaaattttgacactcctaagctttacctccatttttcaacagaaggattgaagatgaatctcacttatggataacagggggtgaataggtgttttttaaaacaattagagatggtatctcacaaatgagcacagttcccctgtttttcccttatacaatgatctttttcaaccttatgaacaaacaagcaaatcacaactaacaacggatgcaccaacactctcccaaacaagtaattcaatgcaagtcacatgcaaatgagacaacactccccaaacctaatatataaaacattgcaccaatataaaaaactctttttcacatgccccttgtcatcaatcaacaacaactaacatatatcttgttctttcaaatattcaatagacacatttcagctcatgcttcaattagttcaatcaccataatgcaaagaaaaatatcataagctcatgaaatgctaatcaaaagacaagatagaaaggagagacaatgataccaatttttttaacgtggaaaaccttcgaagagataaaaaaccacaggcctcaagcaatcaattaatccactatgaagaaaaaatagctgagtacaaggttttacttagcctaagtcttatcctctcccggaccacttgtctagaaccttcaagcgtcaactaccaccattattattcaagaaaacacttggaatccactccaagctttgatttcggcctcttcttgagtctacacaagaagaatcttgggttttaccttaataagttggatatgaaagcaatatgagagataggatgaagaacacaatgaatcaacccatttgaaactaaagatttttcactcaaaaacttattttcaattcaaacccataaattttctcacaagacaaacactccccaatattgtaagagaaacttgaagctaaaaaacctagggttttttctctcatggctgtccactctacatctggaaagagggcttaaatattagggttttgaaacttatccaatggttgagatttgtttggaaaatcatgaaaattcgcaggtgtgattgaaatctgatcgatcgaacaagactgaaaaatctgagttcaagataaactgttactctttagtttgattgatcagaaattgatccaaatgttttaaacacaatgttttacacttttaagcttcactttcattttccaatgcaaggataaaaatttaaaatacgattgatcactgtttgcgatcatccatcacctcaaatgtacttaccaattcctctagccatcttcaaacacgaacaatttggaaaaggcaagtgtccaagagaggatttgaagaatatgagctacaagacataatgagaattttgacccggaattgccaatacacaaaataacttataaggataaatgattaaaactttgttgatcaatgtttgatattatctttcacctcaaaaacacttagcgtgtcctctagcaatcttcaatcacaaacactttggaaatgacaagagtctgatggaggatttgaagcaattgagctaggagaaacatgatgggaattttgacttggaattgccaacacacaaagatgcttacatgttccactccccctacttttagcattggtagaataggtgtatgtggagcccaaaaaatacagagccatcacaagaacaccctagagaaaggatgccctattaaaagagctcctttctctagagagggagggtgttaactttcatttgcattccattgttctcttttttatgtttcttctgactgatctgtgtttagttttgttctcttttcctcttcatttgggtgctgctggcatacaccctatctggataggattcagccctttttgcattcatttttctttacttgtaaaatatatgttcttaatattaactacacattcttttctttcaatcaattcagtgtcacctagttttgtttcatctttcttttatttaccatttcaatataatgaaaatggttgtttctgataaaataaactgtgttgctaatgattggaatttataaagagatacataataccattttggtttccagcagattaaattgtggctgaaaaactggataatccaggtccatgtcacatatgcaacttcccatgatcaaaatgctatttgagtcctatacaacttgctgagtaaaaaatgtgtattgttcagatctcaaaaattgaaaatgagaattgctatgccttagtttttgttccaagaaagtaggataatttctttatgtattacttttgttttttggttctgttatctcttatatatatatactttttttttttgttacagctaacctgggttag

SEQ ID NO: 12400 - DNA, 721 bp, Vitis vinifera
  Intron number 16 from transcript GSVIVT01026496001 (locus GSVIVG01026496001) derived from phytozome v7.0 (chr-ID chr 4; pos 22660251 to 22660971)
gaaagttacctggttgggacttgcgttctgtaagttcttttttttttttttttttgataggaaacgacaaaggaatatattaaaagaaaaaagaagtacaagagaaggatgagaaatccttccaccaaagaaaactaaacaacaagaatacgaaaacaagaaaatacaaagtaaaaccgaacaaactctctagactagacaaacccaaaggaattacacgctgctagccaatcaagttgtaacacaataaggggagtccccttaaaaaccttggaacaaaaagcccaaagagaagcaaggaaatgaatagaatcccaaagattctctgaattccttgctttatcctaaaaaatcatcgcatttctttccctccacacaacccaaattacagctatacaagcatcttgccacaaaactatccctctcttcgttctgtaagttctgcatttgtttacttgccctcatccaaccccaccctatcatagtattggttttcttatgatttagtgatctaatgtctgctgggtaattgaatgggttttgtcaacctaccacaaacatagtgatataactggtagattcatgtgtaacaattttatattcattggatgtgagggaagaaacttgtttctatggtttacctatatctcatattgattttggaattgacatgccttttttgctttcttacttattgcataggttatcgtgaagagtggag

SEQ ID NO: 12401 - DNA, 2730 bp, Vitis vinifera
  Intron number 2 from transcript GSVIVT01035713001 (locus G SVIVG01035713001) derived from phytozome v7.0 (chr-ID chr4 ; pos 3575635 to 3578364 reverse strand)
ggagggccccctttatattcccaaaggaaaggtaaggagcaatttatttgtttatttatgaaaatgctattcttcgcatcaaattcttttgactctagattgtgactgggatcatcacaaatcagaaaaattagggtttgtacaacacaaacacccggtgcctccatctttcactgtatcatatattaatcatgttagtacccaaaaaattgtttccatgaaagttttaatatcagtaagaaatcagaacagaaagacatgcatatacatcatacccacacagaaatatcatcagagagagcttggagaaaaagatgtggaaaagaaaaagaattacataacagccaaagcctcacaaatagacttctgtccctcaaaacaagcccagtatgttagcaatataacacaaggtaggcaataattagttcacatgttttcatgatgttccttaagccaagttttcaaatcttatcatacttgtaatcagatgtagcttcataaaatgtcactctcatatccacagaactgatacatatccttattctccttcatcatatcttaaatttatggaatttgagttgatatgttcacctcttccatgaaatatgtgttcttagtgaatatgatttccaaagctgttctcattcttatttcaccctctcaagcccctgttacaaccagaacataaacactagagacaaagttgtctcatcacaactttgtcatttgcatttcttatagaaagtaagtgatatcggtgtcctagattctatcagactgagggtcaccactttcttgaactgcttatggagctaattttgaacatgcactttcacacaattcttgtttttaaaggttaagatcaaatatattaacagcgcacaaaagcatacacgatgtatgcaaaggtatcaaaatgccaaaacaaggtgaggtggtacacaaaaagcaacaaccatgccttaattagaatgtagccactccacaaagtatcatggtcaagcagctattacctatatacacttcaacccactccaaaaaaattacatgaagggctatttaattgcttgttctactttttcaaggttttcaaaagcactcctacttctcttcctccaaatagtctacaataagtagtataaaggagtaactttccaagccttttcatttccacacagaatttaacttgaaattcagcttccatgctatgttttcattcataaaactgctacatttcatataatagtacgaataaataggtctcctagattctcttgccaggtgactgctgtggagaggaatgttaactgagtaacttttgtccttggaagattattttgcattcttgtgggtttttgtaatagaatacaagtcatggtatgaggtggtccacaatgcaaattacctatgttaacaaatgttctcgactgtttgggcgatgtcctgtttgtttcttaacatgatattttctacaataataaagttttgtatacccatgtgctattttgacacaattacctatgttaacaaatgttcttgactgtttgggcgatgtcctgttttttgtgtcataatagcacatgggtatacaaagctttattatcatagaaaatatcatgctaagaaacaaacacacaatgtcaaataattcttggtcatactaatggttactgccgcagataagcagtaatgttgaaattggcagcaatgtagtggtagtgattcagtaatggatacaacttgtggttctttatcagaccttaatttgtttggcctacttaccttgtgggttcttatctcacctctggtattctatttagcttccaaatgaaggctttgcaatagattgaacaatttggactgtcaaaaccgtttgattttgagttttctgtaaactgagggagaagatgcctaacattttggatcaagtgaattaaccttgtgatatggcttctctggaagcattttttatctaccaacttttatttattctacaatagtaaagtgcaaaaaataatatatatatggaaaaatacacaacgagagagaggagcagtttgcaaactcttttgcaagtctaaaccctagtaaattctgaactatgacatgatgcaaaattactgctcattttgtgcattccagttagagagttcctaagatgccctttagttcggttgttacctgctttggttcactcctctagccatgagaaactgaagttcttactgattagaagtaagagaaagtttagctccaccatcatctttctggttgtgcttggaatgccagaataagaaatagaaatgggaaatccattccatttcccattcattactacatctggattacaaattagaaataggaataggaacaaaaattctttctcatggaaacaaacccactcttgtgaggattttgatttctctcctgcacatggtattgtgattcacactcatttccattctcatacctacatgccaaacactcacggcttatactttttcctccttcctcctgctaattactgtgatttaaggatatagattcacctatcaaggttatctttcaaatagtattaataagaaacaaaaatctagcagctttggttcttaacgttaatgccatctgcaattctttagcttcacaaataattaaatggtatgtcaaataagatccttaaatttattttctgcaggccatccagcgctgattggacgtcatcggccattc

SEQ ID NO: 12402 - DNA, 11127 bp, Vitis vinifera
  Intron number 2 from transcript GSVIVT01019901001 (locus G SVIVG01019901001) derived from phytozome v7.0 (chr-ID chr2 ; pos 4343455 to 4354581 reverse strand)
ttcgcccattttagatcaaaccgaacatcctgctagtatctttgctattggtgctggccatgtcaacccattaagggcaaatgacccgggactcatttatgacattcaacccgatgactacataccctacttatgcggtttaggttacaatgacacgcaagtaggacttattacgctgcgcactgtgagatgctccgaggagtcaagcatacctgaagcacaactcaactatccttcattttctattgcactgagatctaaggcccgaaggtttcagaggacagtcacaaatgtaggcaagccaacgtcatcttacaccgttcacattgccgcaccaccaggagttgatgtcactgtgaagccacataagctccatttcaccaaaaggaaccagaagaagacatatacggtgacctttaagaggagtagctccggggttatcacaggcgagcaatatgctcaagggttcctaaaatgggtttctgctacacactctgctagaagccccatagctgttaagtttgaatgaggaataggtcgacccatatactgtagcaagttagcaaccaatcaaggagggaatttaattcgttcttgcaactaacaagtccttaatgtacggaggtgatgaatgtgcaacatagactgtctgattcatggatacattgttaagaatactaaatgttccagctgattgtataactttttatttcccaaattttaactttcatagtagaactataagaacctatcaatgcattctatattttgttaagaatactccatgctttaatttgtgatcatatgtcatataccctctatcttcatttacgtagataattatttaatagcataaggtacctccgttagagtgatgagataactatatatattcccttgagtaatcctgaagttaatgattaagtttaacttataatcatggtaatttaattaatttagaattggatatttatcttaaggaatatcgtagaaaaaaataactcaaaaaatttaagatagaattctattgatgaataacaaaagttcacttgaactatggatatcgatttataaggaacattgtgcaatgttactatatgctatggataaggcaattgatgtttaattaatttaatttaattttcatgaaatgtcgaaatgtaattaatcctttttagtggagtaaaaattaattctacgagagttggtaattctattatcctagtagtccgtactcaacctacatattttgcattaatttattttatcgagcagttggggtgcaccatatggttttgggtgtatcaaaaaagttaagcctaaggttaggttcaccaagggtaaggtcatcaatttaccctagtccatataaagcaattttcaattttgtgttttcttaaagttatgtttggttcccaaaaaatactaaggaaagaaaaaaaatgtaaagaaaaatgatttttttatgtttggttatcctataaaaaatatcaaagaaaatcaaatatgattaaaactaattaaaaacttatgtatttttaaattatttaatctttatattgataagttaaaataaataaaatgagtttgaagtaacaaaaaaaataatttatcaacttttaatctatttttttattttctttcactttttcttttcctctgtttttcctttgtattttctttctcttgcattttcctttaaattttttgagaaccaaacatagcctaaagaaaactcgatttttaagtgcatcccatcagtgagaaaaagtagtgctttagaaaccaatgatttatgggttgcatgatatacttgcattttgttgcacatgtatactatttttttatctagcacacctcatgaatgacaaacaagatatcggaatgagagcttctactaaaagtctttcattggtttttagggaaatgccaacataaaaaacatgtactccattaatcaaaacatgataattttaagagatcaaaatattgccttgttgatgacatgttgaaatggtaattttataagccttcagctaatagttcccctgatttattattttaatatgacctccatttatcaatattattgatatcataaaaggttcaatatggttagtaacactttttcctccttattcatattacattggatgccggagattgattgaaataagggacaagtatggtataaatagataatactagaagataccacccaattgtattatatttttaatgatattaagagcttatttggtcatatgattctaagaaacgtttatgacatttttcacttgaaaatttttattattcaagtgttaaaaaaaaattaaaatattttttaaaattattatcaaacatactctaaatcgtcatcatacttcctaataactagcttattgatttgaagaaaatatatagaaacaaacaacttaatatttctccaataatgacatatgaataacctattgtacacatcaaaatttgtccaaattttatttttacgttgattttgagttcaattttattcttagattttaaatctcaattatatgtgatatttttgacccactcatcatttatttttattttcttcattttcttttttctttcttttatctcatctctcatctctcttcctaccctccccaaccaccccacccacattttctctctctcctctcacacccccgttcctatggccatacccttatcttctctttttttttttcccatttttttcttcatcttcttccccaatttccaaggtggtcaactctcccatcttctatcttcatttttgtttcccttccctccaactcccacacacggcgacccattttctcttccaatttttttttctcctccccaccatggaagaaaatatcggtaatcacggatatatcggtacttcgattttataaatatatcggatatatcggagatatatcggcggatattttggaaaaaaatatcggtagacttaaaattgttaaaaactcatggaaatgtaagaaaaacctcataataatataattagaagtataattgacattttaaagttgttttattgaaaaatttgatatatatatatatatatatatatatatatatatatgatataatttgcgatattagatgtaattacatcatgtcgatctataagaaatgttaattttgtaattgttctcattataaagtcacataaaatatttcattttattaaatatcaataatttgtacacattaaattcattaaataaacatatttcatattcaaaatatattatttcatgttaattaaattaattaaataatttatctaagttaactagtttaatttaattctaaatgtgaaaataaatcacaaataatcatctaaaataaacgtatcaatttataattaaataatcaaattaacctaagttaattcaataaaaatataaaaattaattacaattgaatgtaaaaatagcattaaatcatccatattgcaaacatactaattaattgaaaatacatgaattaattacaattgcaaacaaaattaattataatttaaaacaaatataccttaaaataattaaataattgagcaaccttaataaaaattggagtaatgagagagcaaatgaagaatgaaagcaaaaatggatgaaatagatgaaatttgggttatttatagaagaaatttgggccaaaatagccgttggaacattaatttactgttgaaaatcaattttagccgttggataaaaaactaggagcaatcgagccgttggatcgccatattaccattggaatcacatctaggccgtcggatcaacacgggcgtgatctgggccgtcaaatcacgttgcatgaaggaggggaaatatcaccaaaaaatcagcgatatatctccgatatatcaccgattttttgccacagaggcaattttttgaaaaaatctccgatatatctccccgaaccgatatatcgccgatattttggtgatatttacagaaatatctcctctccgatttttctccatgaaatatcgtgtcgacccctcctgatacacgatatatcggcgatatatcccgatattttcctccatgctccccacaacccttctctctacaccatcattttccagagactcccactctcgttccccatcttcatgcattctttttttgctcttcatttttctttccttttcccctccctacactccatggccactatcggctagccaccatcctcagctgtctgccaatccctgcctactagcaatctaaccatccatagttcttaaaaaaaaaaaaggtaaatttcatttttactttattttattttcatttttttatctttattttttttattttagtttgcatagtaattgatttggattttggcctattgcttattgattatttatttggacttattggattggacttgagacattattttctttgatcatgtgtattattaatgtgtacttgttaattgatatgaattttaggcccacaatgtgggtgaaatttgatggatgacttgaatatttgatatgagtttggccaatttgaactatttaatttggacatgggacaattatggtatatattaaattagacttaaattatgagatattaaattttggcctaatgaaatttattttaatttatcatgttttgggtttgattaattgagtttatattttggttattaatttgaaaattttggattagtgtttatagcatgtgagatatttttgttgggttatatttgctaatttgtgccaattttgattgataaaatttatcggactaatttgaaatttgaatttaagtttgaatatttgtttgagattttgtacatatttggatatttacatttgagctattttgtttttacatgagtctattctgcaatttcattggttgaatacgaatttatgacatatagagcacgaaatttcatggaagaaagtaagacagaaaaagctataggaagacattgagcttatcgtaagcttgtttaatacaagttttatttcccactactatttaattttatttttattgatttttataaatatttgtttgtatatatttaattgttgtgtacaaaattgaacatcgaacaaactataaattttgtttaaataagaggaacaattcaataaatatgttttaataaaataatagttttaaaatattcttcttaataaaagaaagttttttttattaatagaaaaattcaaaaaaaaaaatttaatagaatttgaaatttttttaaataataattgtctaaaaatttctttgtttaataaaaattgtgcaaaatttgttttgtaaataaagttgtcccaaaaattaatttttaacttaattaaaatgggtttaaaagtatttttttaaaaatagtggatttaaatctttttttctttttaattaaaattcctttggcaaaaaaatttatagtttttttaataatttgtataagtcactttttataaatgaaaataaattgaaatacttttgtaaataaaattgtaaaaattctttcttttatagtaaaagcaagtaaaaataatttttgtacccaaattgaaattttgtaataaattcttttgatacaataagagtaaataactttattttgaaaattgaatacaaatgaaattgagaaaataaattgactttttttttgtaaataaataaattgaaattattaatgcaaaatcatttttaataaaatcctttgaaatttcttgaaaactatttttttttaatatcattttttataattagttcaataaatcaatttgcataattctattatcatttgttttgtacattcttctaattttattttatcattatttttgtgtatattgtttcattcttttaatcttggtatccatgatcaattaattatcacaattttctcaattcgtttagtagaaattgtatatatatgggcttagaggagtgttacggctcaccaccgtacattcccaataggtaacctgacctccggacctagattctatttttcactgacctgtttttccttcgagcgtcacacttagggtttttatttcttattttgttttttcctttaaaaataaagcaaaaataagtgacgacttcaattctatttctaaaaattaatttttcacaaataaataaaaagtgagtctcaccgtcaagtaagaacaaataaataaaaagcgagtctcactgtgaggatgcatgtcaaaaacgcagttccacacttatattagtcttactactaaaaaaatgcataacattaacacatcttaccttatactacatttaatagctaatttattgatttaaaggaaacatatgaaaacaaacaattgaatatggaaacaattgaaatttcctccaataattcaaccttaccttttaaaacaattataagaagtaagtgcatataaatgagataataaagacattctaggggaaaaaaaaagggcacattataggtataaccttttaattttttttaaaaaaatataatataaaattaccggctctcatagaactaatttgacataattttataactaattccactaaaaaaagtaattacattccatgaaaattaaattaaattaattaaacgttagtttgctttatccatagcctaccataccattgtcaatgttcctcatgaacttaaaaccaaacaaaactttatgaattttattttttgaaagtaattttcattttttttaatcaaacacatcatagaaaaaatagaaaatggaaagtgttttgagaaaggaaaacttttaactttcacaaaacgattaacatgtattttccttttaattatgactatattgatttgattccaattacgtaaaagatttttacgtaccatttattatacatgccatttttaacaaataagcttactatatgtctcattttccatattcaatattcccatgtaggatgtatattccatattcaatattcccatgtattatgtatatatatccattttgatagaaatattctatgtctaccatatatatacatatgattgtgtgacaccataaacttaaccccttgtgttctaacttcttaatgaatataataaatttaaaaaggaaattaaaaatgattacattaagattattaattaggtgggtagttacctatcatctctttcttataaaatattttgactttccattatttttcttaaaattatcatactctttatattctattttaatctctcttacgttacccttttgatcacaattgagaataagtaaaccatgttcaaggtcattatcaaataaggcaaagcttatcttttggggtaagtaaccctatttaataaggcagaacctatatattggttggcggtcaggcttacacaaagcagtcgtgctctttcttcaaaatttatggagaacaaggggtgtagggtttccctaatcatggaagttttcttccttgtcgctctctttttcctgtgtgagatctctggtagtgtcgcttttcaacagatagccgcagaaaatagctaaattatccttcatttttgtctttagctaaattctcgtacccactccgtacccttttttttttaattttaattttttttaaaattacttttaaaatttttaattacattaaaataaatataatttataaataattaaattattatattttttataacttatattaaaataaatatattaaaagaattaaaaataatcttagtaaaaaatttgataaatattattataattttaaatatgattctttatttcaaacttatattattcctcatatatattaaataatttttaaacaccttataaaatattaatattatttgtttgctctaacttataaattaggtatcatcaaatattatattttttcaaatttataaaaaatataataaatactttttaaatacctcataaaatattgttattatcattttctaacttacaaattagacacatggtgtttattatttcaaaaataatataaacactcacatgcatatatatatatatatatatatatatatatatatatatatatatatatatatatatataaaataataataaagacaatatttttaatactaatttatcaacctttcaataattttaaaagtgtaaatagggtaattggccgaattaaagtcttcaaaatattcaaaatttctccattccaaaattacctaatttctctccatactaatcctaaatattttttaataaagatttaaatatttaaaatcattaaaataaatattttcttattaaagctattttttcaaagtaataagataaaaatcatgaaatcttcaaaactataattacaacaaatatttttaattttaaaactaatttcataatttaaattaatgatttaaaaaaataaaaatgttataaaaataattttgtttatttttaattccatttgaatatgattttttttaatatctattgataacaatgaaattatgtttataaaggcaaaataataaaaatatatatttcatttagtatacttataatgaacaatttaaacatgattgatttttatttacttctaaaatgtaaaagataaaaataaatgtaaaagataatttttatttatttaaattttttttttgaaattattttccaaaatagtctttgaatcattactataatttttgtctatttataatttaaaaataaaaaataacgttaatttttcaattatttataaaagagtttaaaaaaataatgaaaaattcaaaaatggttaaataagaaagaatagtggcaagtagtagaataaagacaaaatgagttaagtggaaatttttgtcaattactatctcatatccttatcatcaattatgggtggttggaggaccttatcttaattatatgggttgaaaacacaattgtcccaaagaaatatataggaacaaacaattgaatatggaaacaattgaatattcctcaaataatgcaatcttacctttttgttccaataaatggcaatttttatttttattttcttattctttttaaagaaaatcttccatttctaaaactctcctaaaacagttcaaactttccaaaatccttataaaatattcctgacaccttccaattttccctaatcttaggaaaaaaaagtatgttaatttggagcataaggaaattttcatattttattaattttcattttatataaatatatgaaaacaaacaattgaatatggaaacaatggaatattcttccaatcttacattttgttccaataaatgacaatttttttagaactctccaaaaactgttcaaactttccaaaatccttttagaatcttctttttctcatttatatataggatactttccatttttccctactcttacttaaaaaaaagtatgttaatttggagcataaggaaattttcatattttattcattttcattttatatatataattctgacatcccatgtcatgtgcatccaagaggagctaattaaaggtaaaatgaataacattactaatttttttaagaaagtataacagtataaagagatacgtaaaaacataatggaatttaatggaatgaatacatttaagaaggaaaatttaatgagatggaaaaattgatttttacgtttgaattttatttatatttattgtttaattttttttttcataattgaaataaaagttaacagcataatgttttgaaatttgtaaaacatggatgatatttgaatataatttttaattaataaattgatcaaataagaaagaatagtaagaattaaaattaaatacaaagaataaaattgttttaattaaattatgataatttttttaaagataaattgggaataaatatataaataagtgaagaatttactaaatcgattagttataaaatattattatttttaattaaattatgaattttttttaaaagaaaaacattatttaaatcaaatttttaggtaaaaagtaatactctattttttaattgagaaatttcggtaataatatttacctttcatattaaatttattttaattcaattataataagttttttaaaaggtaaacattatctaaattgatttttaaagtgttcatgacaaaagagaaatataattcaaattaattaaataaaacaattatatgacggaagtgcatataaatgagatgataaatattctatggaaaaaaaagtcggcaaacattataaatataatcttttaaatttaaaaaaaattaacataaaattaccggctctcaaagaactaattttacataattttataattaattccactataaaaagtaattacattccataaaaattaaattaaattaattaaacttagtttgctttatccatagcgtactgaaccattgtcagtgttcctcatgaacttaaaaccaaacaagactttatgaattttattttttgaaactaattttcatttttttaatcaaaaacatcaaagaaaaaatagaaaatggaaagtgttttgagaaaggaaaacttttaactttcacaaaatggtgccacgtgtttctatattaacatgtattttccttttaattatcactattttgatttgattccaattacgcaaaatatttttatgtaccatttattatactgccatttttaacaaataggcttactaaatgtctcattttccatattcaatatttaactttcacaaaatgatacaacatgtttctatattaacatgtattttccttttaattatcaataaatagaataaatttaaaaaggaaattaaaaattattaattaggtaggtagttaccaatcatctctttcttagaaaatattttgactttgcaatttttattttttttcattatcatactctttatattctattttaatctctcttatgttacccttttgatcacgattgagaatgtaaaccatgtttaaataaggcagggtctatatagtgttcataatcaaataaggcaaagcttatatttttggggtaagtaaccctatttaaagaaggcagagtctatatattggggggcggtcaggct

SEQ ID NO: 12403 - DNA, 7084 bp, Vitis vinifera
  Intron number 2 from transcript GSVIVT01003298001 (locus G SVIVG01003298001) derived from phytozome v7.0 (chr-ID chr7 ; pos 14323808 to 14330891)
gcttttatccgttccactctttgccggcattttcagtatgtagcctgtatttctgttattcttatcttctttcctctttattttagaattataatttatgtgtcatgaatattagaagtattaactctttcaatgtagtggttgagtagggcggtccctgtcctggtgccatttccaaccaagtgtgccaatttgaggcttttatttgaaaaggatttgatttattaatcccttgtcttggattactagttttagttatgctggttatttggcacccaacaagttgattttgctacgtcacttgattaccttataaatagaagcctcctattgtagttgaaggtaagttaatgatggtctttgatgtgggagaatgccataaaatttgttctgttatggtttgttctaggaaagtttgaatgaaagaaaatagagaggaaaaataaaaaggaaaataaaataaaataaaataaaatgcaacaagtttgattttgcaatgtaacttgattaccttgtaaattgtagcttccttttgtagttgaagggaagttagtgattgtatgatgcgggaggatgtcatgaaatttattgatgttatatttggttcctggaaagtttgaaagaaagagaatagagaggaagaatagaaagaaagaaaaagggaaggaaaatttatcaaatttttctcatgtttggtttacatggaaaagttaagggaaagaaaattaaattctcgaggaatgctctttccctgaacccgttctcacattttttaagaaaaaaaggggaggaaaatcttttaccatttcccctcctatttttcatagtatttttttcatcaccattttccatggcatttgaaaatgagaaaactatttttgttagcaatttttttccttcctttggtactttacatagccaaacatggcctaggagtatatacaggaaagcttttagtcactgtcattttcggttaatggaaatttggaagtagtataatgtttggttctcctttgctcttaattatatctttttgtttttcatgtctcctctcccttctttcctcttttcatttggtgtctcagcttgagctaagaagatcttagtttgctttcttcttgcactaattttctccttggcaacaagaagaggctgaatgagatgtcgtaatttgatgatgaacaatacaagtaatgataacttcgagtacttaaaagaaaagttaagttgccaattgtttggcttgatttttttttttttttgataggaaatgacaaaagaatatattgataaaaaggatggacaagagaaggatgaggaatcctcccaccaaagaaaaacaaaactacaaggaatcaaatacaagaaaatacaaagtaaaaacaagcaaactttctaggttagaccaacccattgggattacacaccgctaaccaatccagttgtaacacgttaagggaatccccttaaaaaccttagaacaaaaagcctaaagagaagcaaggaaatgaatagaatcccaaaggttctctgaattccttactttatcctaaaaaatccttgcatttctttcccgccacaccacccaaattaaagcgatgcacgcaacttgccataaaacaatccctctcttagaagatccaaaaccgttaaaattggtagataacatgtcaaagatgccccttgggggaatccaatccgtctttgctaactgaaataatctgtgccataaccccgtcgtcaaagagcaatggagaaaaagatgatctactatttctccatgcttcatgcacaacttacaaatgtcgggactaagtgctttatatggtcttctcaactgtagcaagtcattagtatttaccttcttgtgtatcaccaaccagacaaaggacttgactttgaaagagacttgagaattccatacgaacttagtagggaaaactggaggcaaaccagaaaattgggataaggtaagaaagaaagatttgactgtaaaaagtcctgaaggagataaagaccaggatctcatgtctggaatcgaatgtgataaatgtagatgattaagagaccgcatgaggccttctaaatcttctatctcagaatcgaaaaggttacggtgaaagttaaagttccaaggaaaggggcgagtagagccgagaattgaagaaataggagtatttttatctgtgactactctaagtagtcttggatattgcacccccaaaggttggtccccccaccacaagtcttcccagaaccgaattctttccccatctcctaccacaaaccgagtaaacttggaaaactcttgggagacttgtgcaatagccttccaaggataacgatgtgaccatctgactatagtgttgtcatcccaactattggagtgtgatccataaatgcttaaaatgacctaatgccacagagctgaaccctccctaggatatctccacaaccatttccctaagaaagtgaaattccttatagaaatctttccaaatcccaatccccctttcgccttcggattacacactacatcccagctaaccagatgatctcttttgccttccccaacccctgaccataaaaaatctctttgcaatctctcaatttttgttgccactgaggcgggaatcttaaacaaggagaggaagtaacaaggcatatgggtgagacaagattgaatgagagttatcctgtctccaaaagataaatacgccttttgccacccatctaatcttctcgaaatcctctcaatcacaggatcccaaaagccacaagccttaggattccctcctagaggaagacccaggtagagtataggccaccccgaagccttgcaatcgagcaactcggccaacctagagagatgattctgttcaaaattaatgccataaatattacttttgtcaaggttaaccttcagcccagaaatatgcccaaacactagtaaaacactcttgaggattagcatatcctcttctcgagtgctagaaaagaaaatggtatcatctgcaaattgtaaatgggacacccttattctgttcctacccaccctgaaaccctccaaggcatttctttcctctgctctcaataacatcctgcttaatacatctgcaactaaagtgaacaaaaaaggggataaagggtctccttgtcttaaacctctagatgccttaaaccaccctttaccgtttccattcactaggactgcaaaagataccgaggacaaacaacctctcatccatttcctccatctaggactaaaccccttcttctccaacacatgatccaaaaaatcccaagtcacagggtcataagccttttcaaagtcaattttgaagacaactccttcctccccttatcgtcttttctcatccactatcttattggctatgagaattgcatccaaaatttgtctcccttgaagaaaagctccttgactagaatggatagtttcatgaagtacccatcttagacgccctgctaacactttggctattatcttgtaaagactaatgatcaagctaataggtctatagtctgagattttctttgacatgctttttttgggtaacagaactatgaaggaagcattagtgttgattgataatcccgctcctgtgaaactctgcaaacactctcactagatcctccttgatcacatcccaacaatcttgaaacactgcaatggtaaagccatcagacccctgtgccttatccttatccaattgaaaaatggccttagaaatctcttcttcagtaaaaggggattccaacctagacgcactctctccagatataagggaccaatctaagccttcaactctccaagactcttcaaaagggctcgcgtagagcttttcaaaataccttaagatctcctctttgatgctctctgaattattcaacactaggcctctttcattctccaacaccttgatatatttcctatttcgcctaccattagccactttatgaaaaaaatttgagttacaatccccttccttaacccatttcaccctagctttttgtgtccaatgtatttcttccctcaaaatcaactcctctaactccccttttcttaaagctctttggactaaaagttcaggggagagacccccttcttgctccatggtatcaaagttagctaaatcaaacaggatactttttttcctttcatttagctctccaaaagaagccttattccactcttttaatttggccttaacgaattgtaatttcctcaagaatttgtgaccttgccacccatttccttgaaactctctccaccaacttccaaagcgctttcaagaggtcatagtgagcttggaccaatccacatgtattctagtgatggatccaatgtcaaaaaaaaaaagaaaaacccaatgtcaacccttcactaaaatcagcttccacaagaggaagcatggatagaaagactttatcttgctttaggtgttgtggagattggctggagttcatgataataagtattttctgctttccgttttttccccaaaattgcagattttcattaggcagccaacttgcaaagttaatcattaaaatgttttcttgctactgagataaactttgagagatttgcatttgtatagcaaaatctaaaaattcaatggtgaaaagaaagaccagggtcacattttcttttattattattttaagaacctttgctataatggtgatggtgtgatccactgcaacttaggattgattgaataagggggtcttataagctaatggtgcacacagcaaagaacatttgattggaggtaatgctgccatatcgtttatgagaatttgtgatgaagtgtagatgcaaataaataaataaataattaaatgaactgtgttggtaaagcctaaatttgtgtatcagagtgaaggaaagttcgtagatattgtcagtctctagttaatctccaaggttgagtcttcacgtgatggaggcaaaaactaaaattcaaatgctttaacaagtacctgtcaaaataagctgctgcagatggagcctgcacaagttaaaggccaagttactaatttgcctgcatttcacatgatgttatggctgggctgcagattgattatatagcatacaggattagtatctgttcaaggaggctgaaatatgtaacccgatggttctcttaaggataagattgttgttaagaaacatattttgggaacttttagataacataagagcattgactttgtgggtttgtgatgagaaacaaggcaagtgaaaagaagcatgtatattgatgattgaaaggagcaactactctgttgccagtatcaagttgtccatggggggtgattggtatgtattttcttattggtcttcctccaatgcaaatgcaagttgatttgacaatggtggtaatggactggttctagaaaaaaaggctaatttcattccttgttggaaacaatggatgccagtaatatagcaaatcctttttcctgaggagttttacaagttgtatggtgttcctcattccattatttatggtagggattctgagtttattatttgtcaattaaaagccacaatgaatccagtgcagtactaaacttaagagtcctatcgttataactctttatacgcatcttaataagttgaggcctcattcatcatcatccagaataattggggaaatttgtaattaatttaaaaagccctccccaaaattttagatatatgatataatttaggacttattgaacgactatttagatttattttttatttttgatttttcatgtttcactttcagttctttgttaaacagaaaaaaataaaattggaaagtactaacatgcttcttgaattccatgctttgtttgtctgcccatcttttatttgaagaatatgtcattgcttaaatgtataattagcatgacatacaaattagatacatgcaaattgatgaatcatgagtataatgtatattatcatataatgccgtatgaagaatatgtccttatagatttaaggcagccttcttgaactgaataaatgtgttgaaaaatccttaccaatgtgctgaagaaaggctaggtgttcagctaatcatttcactcctttttagcccttagtaatgttaagtgtgaaatatatagattgtagaagttcatgattatgattttctagatctatttaatgttgggagaattatcttttggggctagatgggtccccaaattaacaaagggtccatgtaactcttcaaattgagttgaaggatatgaaatagtaacggacaaatataccctttaagaacacatataaaatattttataaaattaagttaaataattttttttcaataatttttttttcaaaaatactaaattaaataaaagtagttttcaaaaatattaaattaaataatttttttttcaaaaatattaaattaattttttttcaaaaatattaaattaaattaaagtatttaaaaaatattaaattaaatattttttttaaaatattttttaaaaatattaaattaaataaatttattttttaaaaaatattaaattaaataaaagtattttttaaaatattaaattaaataaaaaatattaaattaaataaaagtatttttcaaaaatattaattttttttctcaaaatcaacaaagggcatttttggaaatactgaagaatgatatccttcaactcaatttccatactttcattgggtcttgggctcaatttgaagagttatttggaccttttattaatttgggggcccatctacctccaaaacataattctccctttaatgttttatgtgccatacccttgtagatagggtaaaactcactttagaattctatgctatatttaatgtatgattacttttgagtttacatatttaggcactttttattgtgcatgttttgtgaatctgttggataggctgtatttgtcatctcttatttaatggatttatctattataaatatgaaattttattttgtattttaagcattctgagcatatcttggttttttcagaaaggatccttactgtgccaggccttttgaaggat

SEQ ID NO: 12404 - DNA, 9665 bp, Vitis vinifera
  Intron number 36 from transcript GSVIVT01018178001 (locus GSVIVG01018178001) derived from phytozome v7.0 (chr-ID chr 15; pos 13570651 to 13580315)
tttgcaagcttgttgttaaggagctcactagttgggtatgctctgttgtactcttcctgttctctagaataggtgttgtagtttggaaggccttatgttctttgtagcatgaaatgggtaatgctgacacattgaatcctgaatcaatagcacatgacatgaaaacctgtaacttgtatttgatcttctaatatagtatgcctatataattttaattaattaatgtaaattctgcattccagttaacttggaagctgaagcttaaccaatatgtactcattatgtatattgtatattgctattcctattactagcactcctcctgtgaacccaaactgtcctctcctccagtttgatgggttagattggcaaggttgaacttattgggttgcttggattaagtgggtaatcagttatttctacaaattagatttattttttttatatttattagcaccttgatttactggagtgtgttttacaaaataacacatgaatagttgagaattgaaataagttgcaagaacaaaataagaacttagataataaatgtatgatgtagataattagaatttcattttttttaggtattttttggtgcatggaatcaaattaagatttcttatcatgctaatagttgccaaatgaatcggcctattttttacttttttgctttgtcaacttcattccatgtatttatcactgtcattgttttacaatgtagtattggtgtggttaaagtggtggatattttgtgttggaagtgtcaaatggtatagatccatggctatctgggactttgatttttcaactgattaggattagcccttatagtgaaaataacaagataaatgtgcttctaagggaaaatattattttctgctaccttgaataatccttacaaagggaatatatatacaaattaattgcagcctatttaaggagagtttgacacccttatcaatccttaaaaattcaggggacaacctaactagttacattaaaattaagcaatggttacaattaggaaactactttattttaccaaaatcttcacagctgtacattgatatttgaaagttagagaattcataaattttccaacactcccctttaagctagtgaatagatattatccattcctagcttgcttgtaatcttttggaataaagagctggccaatcccttggttaaaatatctaccaattatccatgtgttgggacatatgatgtacatatcaacccactctcaaggttctctttgatgaagtgtctatctacttcacatgtttggtttggtcatattgaattggattatgagcaatgttgatggccgacgtattgtcacaatagaactaaattggtccctgccccttgattttaagattattaagaacaattttttaccacaaaagttcacaaataccatgagtcatggctctaaactctattttagcacttgacctcgccaccaccatttgtttcttacatctccaggttactaaatttccttaaagtagcatgcaataacttgaggctaccctctatccacaatcaacccaacccagtcagcatttgtgtatgcttcaaggactctcccccttcatcaagctctgagtttagtcctgccaaaaatttaaaaacatgttctttttccagcaacctcttgaactgggcagcatctccaacattctcccatttagcttcttcatactgatcaaactcttactagagacccttaagaataccatagtattttgtgacaccctaagctccctgctttgtttcttgttgcttgattgcaaggcttctgattgacccatactctacctgggtcttcctttgggagggaacccaattgcttgcggattttgggatccagttattgagagaatctcaaggagattagatgggtggcaaaaggcttacttatctttcggagataggatagctcttatccactcacgcctttcccacattcttagctactttctctctttgtttaagattcccgcttcagtggttgcaaaaattgagagattgcaaagggatttcctttggttaggggttggggaaggtaaaagagatcatcttgttagttggaatgtagtgtgtaagccgagggtaaaagggggtttggggtttgggaagatttctttaaggaatctcgctcttttagggaagtggttgtggaggtatcttagggagagtacaactctgtggcatcaggtcattctaagcatttatgggacacattcaaatggttgggatgccaacactttagtcagatggtcacatcgttgtccttggaaggctattgcacaagtcttttaggattttttcaagtatactcggtttgtggtgggagatggggaaagaattcgcttttgggaagatttgtggtggggggaccaacctttgaaatcccaatatccaagactatttagagtagtcacggataaaaatattcctatatcttcaattttcggttctgctcgccctttctcttggaactttaatttctgtcgtaatctttctaattctgagatagaagatctagaatgcctcatgcgatctcttgattgtatgcatttatccacctcggattcagatgcgagatcctggtctttatcttctttaggattgtttacagtcaagtctttttttatagccttgtcccaagtgcctgatttatctcctttttcccctattaagtttgtatggaattctcaagtccctttcaaagtcaagtcctttgtctggttagtggcacacaagaaggtaaatactaatgacttgctacaattgagaagaccctacaaggctcttagtcctgacatttgtaagttgtgcatgaagtaaggagaatcaacagatcatcttttcctacattgttccttgtccatggggttgtggcacagattatttcagttagtcaagatggattgggttcctccgagaagcatttcagacatgatgtctatcaattataaaggttttgacactttcaaaagagggatagttttgtggcaaagtgcgtacattgctttaatttgggttgtgtggtgggaaagaaatgctaggatatttgaggacaaagctaggaattcagagaatctatgggattccattcacttcctagcttctctttgggcttattgttccatggtttttaagcgcattccccttaacgtgttacaaatagattggctagcagtgtgtagttccaacgggatggtctagccaagagagcttgttcatagttttcatagtgtagttttttgttcttttattatgttgtttagttttatctttggtgggaggattcctcattctttttttgtacttcttattctttcaatatatatatttgttgtttcctataaaaaaaaaataaaaaaatatctcttttgctattgataataacagatctgtctgtccaattttaggcttcatttagttgggtcatcaccatcaagttttttgcctcccatgcttgaaacgctgcctcttctttttttagtggttgtgttgctccattgagataaccaaactttcccttgcctcacataaacatattaacagattgagaccactccaagtagttctatccgtttagtctatgagatgtaatctgaagggagggattgtcctaggtggtagcttgaaacgcatgtggtggctgctcagcatatgacttggatgtggctttgtcacttacactagacatgattttgaacagcgttggaatagggttttttaccagaaggaaaagacatgaaaggaatagggtttaggatcagaggtaggctctgataccatgaaaccaaatatggacttaatcaattttttttttttttttctattatgatttaaagtgtacaattttatatatataggctgtacaagatgtattcaactaggagactgcccaagtgtcaatctatttaaggataagaaattaaatttgaattacatatcacagtcctaaatttggctccctaaaataaccaaattaactgaatcaaatctcctaaaatagcctaattttcatgctaggtttcagtttgttttgttaacaattttagttttatgatgggtttctaatggttttgtgtaggacattttcctaagaattcttttagaggtagtgtggtttatttttcttcttgtgtctttgtatgcaagacagctgatgggatatctgaccttgtctgtcaatagagttctgattatcatattgactaaaaacatttattaacaatattaatatagaaatctcaagtttttatttctcttgcttacttcttttgatactcttaactttcatatctctcattcaagttcaaaagaaaactttaataaatagtgtggaagaatgtaatcaggaaagattatagctgtatatttttgtaattaaggagaggattaggataatcctaaaatcaaggggattcaatagaattaggttaggaaagtttctattttttttgctaggaatacttgtataaatatgtggatatgtataggttgaaatcaagaaagaaatttgttctttttaccttctaatttttctttttcttcatggtatcaaagccttagacttgtaaatctaggaagagaagaatttttttggccttcattgtcgagttgaagaccagagtcacccttcattgttgaccttaatgttccctcttgtttgagtcaaatcgttgtagcaaacccaaatcacaaacacaacaaagcaatcggagtcgtcacatcgtcactccactactgcaagagaaatcgcattgtcaccttcattcaccctcccaatgagatcacatcaccattgagattgtgtcaccatcgtctttgggccatattcagcatagcttgcacaacctataaagattgcaaaaaggacccctcgtcattgtgacgttgctgccatcctcacgccatcgttatcacgacctcacaccgccgacgtccttatgaactcatcgcgaaactgatatcgtgccctcggcttcacaccagtgaccttagcaacaacctttgccgttgcattattttccttgtcattgatcttgtctcaacctcacactatcatcttcttagccttgttgtcatggcattgtcttagtcttgcctttgcctcacgctgccaccttttcttgccagctagagttccaatacgagcttccgggaaaaacatgaaaaaaaaagaggctcgaatggtacgattcctccatcaccccagaatgaaaggggtgatctcgtaattcttggtctgtgaagatgcgttgttaggtgctccattttattttcccattgaggccgaacctaaacatgtgctcgagagatagctgtccatacactgataagggatgtatggattcttgagaagagagatgtcgtggtggtcccccccggaccgcccggatcccacgagtgaatagaaagttggatctacattggatctcacttgaatcgccccatctatcctcctggggagaagtttggtttcaaaccccggttcgaacaggaggagtacgccatgctaatgtgccttggatgacccaaaaactactattgttgccactcaatttgaagaaaggataattacttacaatggaaggcagtagaaggataatggacaagcacacttgtcttatgttcaaccaaatgaagaaagatccttgaaacaaggtggatttaatcaagtgaaaattgaaaaactgcgaactttgttgagaacccttaagaaacctttaggtgcctcttcattggcacttttaggtaagtttcttatttccattgcattaaaagccttagatgaaacctttgtcaattcatgggttatatatttaggtgccgtagatcacatgactcatttatcacaccaatttcacaactataacccttgtccaagtaataggaaaatagccacaattgatggttcattaaccattgtcataggtgtagaagatatccaaattagtctgaaatgtgtttcatgttccaaagttgtctactaatcttgtccctatataaaagcttagaaaagatttgggttgtaatgtgatttttcaccatactcactgtgtatttcaggactagagtttggggaaggtgattggacttgctaaagaacagaacgggctatactatcttgggacaccaagcaaacatttgtttctcttctttatgagcaccacatttttaataaagaaaaaatttggcttcatcatcataggcttggacatccattgtttaaaactcttaagatcttgtttcctttttcgtttagaaaattagatgttgagagctttcattgtgaggtatgtgaattagccaaacacaagcgtacaaccttttcaatcagtaataaaagaagtttagagcctttttatctaattcatagtgatatttggggtccttcccctatcttaaatatatttggggcatgttggtttgtgtctttcatcgatgattgtactaggggtctcttggatctttttacttaaacacaaatgtgatgtgagttttgttcttccaaatttctataacatgataaaaaactagtttggtgtcactatcaagaggttttagtttgacaacactagagattatttcaattaagtcctaactctatactttcatcatgaaggtataattcatgagtcatcatgtgtaaacaccccacaacaaaatggagttgttgaaaggaaaaatgatcacctccttgatacaacacgagttttttttgttcaaaaaacatgtgcctaaatcttatttgggggaagctgtcctaaccacatctcataaaccgattatcttctagagtcttaggtttcaaaagtctcatggatactctcatcattttatcctaatatgagaacctcaaatcatctcatgcctaagatatttgggtgtgtcctttgtgcatattcatagtccaaacaagggaaaattgcatccaagagtagtcaaatgtatttttgtggggtatgcatcaactcaaaagggatataaatgttgccatccactatccatttttttttttttgtcttagttgatgttaccttcaatgaaagcaagtcttattttcctgcttcttatcttcagggagagaattccatcaaggaagacaaagatcgagattcttctttcattgatccctttctcattgacttttttaaagtgtctgatccagtatttgtacctttcattgaccctactgaccctcctaaaatgtctgatctattatttgtacccttctatgaacccgagtcatccattgagcttgctcttgggaatcaaatgactgacaaagtgtactcaaggaagaaagttgcagtccctcaacttatgcaagttcaagaatctaaaccaacttctggaaatgagctaatagtccctcatcctctcttacaaactgagttagaacttcagtctgaaagacccatgatcaaaactttcccattgccattaggaagggaacggggaaatgcactaaatgtcctttgtatccattttcccatgtggtgtcattcgaaaaattctctcaatcccataagagttttcttacaagtttgaacaatattcatattcttgtcactttatccgagactttatctaataaaaattggagataagccatgaatgcagaaatggaggccctggagaaaaataaaacttgggagttggtaaatttgcttgtaggaaaatggttagtgggatgtaagtgggtctatactattaagtatagggtaaatgagacattagagaggtacaagacgagattagtggctaaaggatacatttagacatatgacgtggataatctagagacatttgcttcgattgtcaagatgaacaaagttagaattttcttattattaacagcatattataactgggatttacaacagttcgatgtaaaaaatgcatttctaaataaagatccggaagaagagatttatatgaaaatccattatggatttggaagtgacttagccactaaaaaggtgtgtaaactgaagaaagctctatatgagttgaaacagtctccaaaggtgtggtttggaaagtttggtaaagtgatgaaaagcatgggatacagagaaagtcaaggagatcatacgttgttcatcaagcattcggattcaggagggattacaactgttctggtatatgtagatgacattattttgacgagaaatgatgaaaatgagagacagactttgaggcaatgcttgaccaaggagtttgagattaaagagttaggaaagttgaaatactttcgaggaattgaagttgcacattctaagcagggaatttttatttcttagcaaaaatatgtaacaaacctcaaagaaatagggaagttggcatgtaaaccagtaaacacaccaacttggacaggttgaggaagatgttgcgatagatagagagatgtattaacgtctagtaggaagatttatttatctctttcacataagactagatatagcatatgctgtgagtgtggattagccagtttatgcacattccaaaggaggttcttctgcaagttgctaaccgagtgctacaataatttaagaggcctccaggaaaggggatgctatttaaatgaaactcaggattggtacttaaagcatacacatatgcaaattatgctggatctgtggttgacagaagatcaaccattgggtattgcacttttcttgatggaaatctggtaacatggagaagaaacagagcttggtggcaaggtccagtgtagaaatagaatttcgtgcaatggcccaaggaatttgtgaactactatggttaaagatgattttggaagatttgaagataaaataggatgacccaatgagattttgctgtgaaaataaatccacaattagtattgcacataattctgtgcaacatggtcgaacgaaacacatagagatagatagacattttattaagaagagactagatagtgggttgatctatactccttatgtattagctaactgccaacttatagatatactcactaaaggtttaagtagtacaatgtttcaagtaagtgtatccaagctatgaataaaaaacatctacccaccaactttagggggagtgtggaagaatgtaattaataaatattattgctgtatatttttgtaattaaggagaggattaggataatcctataagcaagggatttgatagaattatgtaaggaaagtttctattttttgtgctaggaatacttgtctaaataggtgagtatgtacagattgaaatcaaggaagaaatttattctttgcactttccaattcctcttctacaaatagaagaacacttgtattactaacttttcatatctgtttgtttgcctacaactgaaaaaagaaagggggaatagcactagtagtatatgacactacatgtttcttcctctacaaaaaattatgtgaaatgtatattttattaatatatgtgtgtatatatataattttttttttatattctctgtcctagtttaaaaaaaaaaaaaattgtctatgctacaaagaagtgaaagtgattgtgcacttgtttccgttttttcctgtttcagttctcaattttttttcatcataaataattgtgcaactttttgtaggtgatttactcag

SEQ ID NO: 12405 - DNA, 11122 bp, Vitis vinifera
  Intron number 2 from transcript GSVIVT01010291001 (locus G SVIVG01010291001) derived from phytozome v7.0 (chr-ID chr1 ; pos 19130559 to 19141680 reverse strand)
gggtacaacttcattttctcggtactttctttttctctacccctttcttctcgctctctcacacacacatgtgccagtgaacatgcgcatgcctgtgagtacaaacatacatgtgcatgtatagctcatgcgcctgtgtgtgcatacacataccctcacatgaatgtgtagacatgtattttctttgatccaaaagtccggtgtcatgctattatttgatttcttctcatggctgaaatttttgcaatgtttggtgactgttagtttgtttttttgattaacaatgttgcttctcaaaccttacccaaattaccgtcaccagaaaaactgtttaggagcatccagagaaaccaaacttagatgtcagatgttttgagtagcagtttcatctggaatcattgagatgtagggataactaaagctgaattttaacacagccttatctagtttgtggtgggttctttctctactttgtccatctataaatctacattgtcaatccttttctctattggtcagccgtaaccattgctctaagaagcataacatgtagtttgattatggttatgttgtgtacataggaggcttaatccttccagggctggagactacctcatcaggcttatattatgtcaattattgatttaaaaagaacgttatgctgctgcacttggattttgatatggaatttgaagaatttgaagactaaaatatgaagaatttgaagacaaactatggaggaacacagactcaatttattctgtgataccttttttttttttttttttttttacaatgaatgaaagcatagcctacagatatgagacaattccggaatggtacactatcaccggacggaatttcccttacatggaaagtgaataaactcttacatggaaagtgaataaactaccttgctagaattactcctaaatcaattataacaaaggctgtacattacactaattcagggaagtaaacagaggatgctaaatatggggaggaacatgcacaggcaggaaggcgacgtgggcttgatttccaacactccccctcaagccacgttgtagatgttgatcattccaagtttttctgtcagatcttcgaagttaactcgagcaagagcttttgtgagaatgtcagccgtttgacagtttgtcggagtgtagctgactttgaaaactccttcttcaatcttttccttgataaagtgtcgatctatctccacgtgcttagttcgatcatgatgaaccggattcttagcgatactgatggcagcttgattgtcgcagtataacaccatgggatgcttcaatggaacccgtaattcttctaacagcctgttcaaccagattcccttgcagataccttgtgccatagcacgaaattttgcctcagcactgctacgggctaccaccgactgtttcttgcttcgccatgtaaccaagttcccccagacaaatgaacagtagcctgaagttgatctccgatcagtcattgaacctgcccaatctgcatctgaaaaaatctcaatctctttctttgttgttctttgaaagaagagaccctttcccggtgtcatcttgaggtacctcaatattttgatcacagcagtcatgtgtttttcggttggattattcatgaattgacttaccacactaacggagaagccgatgtctggccttgtatgagaaagatagatgagtttccccacaagacgttgatatcttcctttatcaactagcgcacttccatcactttcttccagtttgacagttgtatccataggtgtttctgccggcttgcatcctagcattcctgtttcattcaataagtccagaacgtatttgcgttgtgagactgctatacctttctttgacctagcaatctccatttcgagaaagtacttgagggttccaagatccttgatctcaaattcctttgtcagtaattttttaagtaagtcaattttctcttcatgatcacctgtcaaaattatgtcgtccacatatacaatgataattgccagcttcccttctgggaagtgtttcacaaataatgtgtgatcggattgacattgaacgaatccgtaccctttcactaccttagtgaaccgttcaaaccaggccctgggagattgtttgagaccatacaaggattttcggagtctgcaaaccttgttgaaatttgatgtcgtctcaagtccaacaggaatgtccatgtaaacttcttcctctaagtcaccattgaggaaggcattcttcacatcaagttggtgaagcgaccaatcgagattagctgccaaagataaaagtacacgaacaatattgagcttggcaactagagcaaaagtttcttgatagtcaatgccataggattgggtgaatcctttggcgaccaaccgagccttatacctgtccacattaccatctgccttgtactttactgtgaaaatccacttacacccaactggtttcttacctcttgggaggtcagtaatttcccacgtaccattcttttccagcgcccgaacttcctcattgattgccgccttccacttaggatacttgaaagattcttgaatattccgaggaacttgtatctctgtgatgctagaagtgaatgcacgaaacgtaggtgatagcttatcataagaaataaaatttccaatggaatgctgagtgcatgatctaactcctttcctccaagctatgggcatattaagaatatcattttctaactcggaatcaacagtaccatcaggagcgttgttacctggaagtttgcttggattaggacccggttcagcctcatgggtttgttgagaaagtgctccttcctccgtttcctcttggatgtgctccttatcccacaagtcaacaatggactcgggttgattaaatgactctggaggaatgtgattttcagtggtgatgggtgactcactgaatgactcaagatcccaaaattgatattcctgagttgaattctccccctgaatatcgtttttgggatagtaaggctgggtttcaaaaaaggtgacatccattgaattgtagaattttcttgtgatcggagagtaacacttataccctttgatttgaagaatacccaagaaagatgcacttgagtgacctaggatcaagtttacttctatgttgttgattgatatgaacaaagacagagcacccgaaaattttgggtgggacggtggagatgagacgagtagtcggaaaggattttaggagtgtttgacaaggtgtttggaattttagtaccctagacggcatcctattgatgaggtaggctgtcgtaaggacaacttgcccccagaataattttggaacattcatggagaacattagtgatctagccacctctaacaaatgcctatttttcctttcagcgattccgttttgttgtggggtatcaacacatgaagttaagtgaactatcccttcttgtgctagaaattctcctagaatggagttgaaataatccctagcattatcagactttagaatttgtatttttgactggaattgggtctgaatcatatttttaaaatttttgaaaatttgactcgtttcagatttttctttcatgaggaatacccaagttaatctagtgtgatcatctatgaatgagacaaaccacctagtaccagttacattttttattcttgacggacctcagatatcgctatgaatcattgagaatggactagactctttatagggttgaatgggaaaatgagactggacttgttttgataattgatagatttcacactcaaaggattttggatttttattaaataatgaaggaaataaatgcttgagatacataacatttggatgacctaagcgatagtgccacaacctaattgcactatcgttattttgacatgaaaccgaaatagaattaccaccaactgtcatttgaggttgttcttgtggatcgtggcgctccttaaggatgtagagtccagagcattcctcagcattgccaatcgtcttcctcgaatccaaatcctaaaattcacagtgagtggaggaaaaattagtaatacacctcttttccttagtgagtttactaattgacaatagattacagtccaagttaggaacaaggagaacagagttgagagtaagatcccttgatagcacaactgaacctgttccggcaacctttgatagtgaaccatctgctattcggactgttaaattatttgaacacgagctatatgtataaaaaattgtcgcatctcccgtcatatgatcagatgctcctgagtccacgatccaaggttttttacatttcttaccagcagtgaaggcacttaaaaaattacctttgtgagccaaggttccggaaccaatgacctggttggaagatgagccagtttgtgactgtactgacaaaagaggagacagtagtttctgaagcatctccatttgctccttattaaaagggctagcttcaggttgtggcgattgttcatcggtagccacatgattgcctcgtccttctttctcaaatggttgacgtggcttccaatctactggctttccatgaatcttccagcaagtttctcttgagtgtcccgactttctgcaatgatcacaccaaggtctacctcctttaatttttttacggttgtcaaaaggagcgaattgagtcttaagagccgagctttctgccatattcagttgttgatgggatcccatcatgagatttttccgactttcttcgcgacggacttcagagaatgcctctctgaggctaggtagaggttttactcccatgattcttcctctgatttcatcaagatttttgttcaagcctaacaaaaatttaaacacgcgtttccctttgacaatctttttatacaacaaaccatctgtaacacaattccagttatgaacctcaaacgtatcaagttgacgccatagacgagtaagagtattgaaatattcagttaccataaggtttccttgacgcaaatcgtggaggatgccttcaatctaaatgatttcagatgtgttttccttgtctgagaaagtttcttttgcaatgtcccagatttctttggcagtatcaaatgacagaaaattttcaccaatgtcagtggtcatagagttgactagccaggacatgaccatattattttctgctatccactttttgtaggttgatgctgtggtttctggtgccgccgaagctccggtgatgtagtcatctttctcctttccccgaataaacattaatatggactgagaccattgcaaataattttgcccattcagtttatgggctgtgattggaagatgagaggtttccatctgatgagaggatgaagacgatgagatgatgatatcagaagtagaggatgatgagttggtagccattccaaaggctggaccgtatttaggcataaactagaagaatgaattgagtaggaaaaaaaaaatactgactaaagatgaagacgataagacaggattaaacctgctctgataccatgaagaatttgaagactaaaatatgaagaatttgaagacaaactatggaggaacacagactcaatttattctgtgataccttttttttttttttttttacaatgaatgaaagcataaataaatagcctacagatatgagacaattccggaatggtacactatcaccggacggaatttcccttacatggaaagtgaataaactcttacatggaaagtgaataaactaccttgctagaattactcttaaatcaattataataaaggctgtacattacactaattcagggaagtaaacagaggatgctaaatatggggaggaacatgcacaggcaggaaggcgacgtgggcttgatttccaacagaattaagttttcttccatttcatccagacaattttttaaggataataggtattgaagcactgcatgcactgtaaggtgaaactgtaatttaacttacctttattattataagaaggatgtcacagttgtatagaaacacatcgttttagtgtgaataaggtaaggtgatgcaggatggcctttgtgcccttgaggccatggtttgtattacaaaagaaggtggtgggatatgtttagaaatgagaggaggtttagaaagatggtaagagggaggttgctgagaggcaacaagagagaagcagcaaagaatgaggaaatgttagagagcaggagatgagagactagctggaaaatcccaaggatttccaagacaagtaactcatgcaaagaaacttttttgatagaatggacttcagaaagtttgtgagacaagtacaagtgcttttagaacaaggctaggtggtagataatgaagtaggacttcaatttcttgaaagaaagaaaaagtttctaagagcagccacgggagtggttaacaacccaagaaaagatgcataaattaagctttaagtaggatccgaaaaagaaaggaaaaaaagaagacttacatcattgccacaataatgctgatggtcccctgctacagatctgaatagaaacttgctggttgccacactactatgacacagcaatatgagctaaatgttgttaaataattactaatgctttcccctcactctatatactatctaaagtaccttagtttacctgctctctcatatagattttaagtttttcaatgcaaaatgatcatcccaaacagacgctttttccctttcctgtttacacgctttgcatcataatgatatggaacaccgtggaagcaaaatttgttggtgaaggtagaaaagtaacagacaaagttaaaaaagaaaaagaaaatggagttagtgtagatataaaacctagtttccttgctcatttatcaggcatatgtgaatgtaatcttgaatttgtttgaagtaattgataattagctatttgtactcttttcctcaaatgattgccattcaatgcatattataactaatagtcataagtacaatataatagagtatatatagaatgactagatccagttatagagaaattatgttattggattggtgataattgatatgtgactggtgacttctaattctcacttgcccttgctaatgaaaggcttgataggcttgcattaaaataagcctatttgataggccttgactaaaaatgaagaatccatgctgagtctctccagatatttgtctgataggaaggattagtggggagatggtgggtcacttgttcatacagtaccctagcacttattccttgtatcattggcaggtatgaaaagaatgttatcaggaccttagttatagccttctgagacttttgaaggagaaggatccaaaagttgtgaaacttcactctcttagctactttggtgatttggaaggagagacactagaatgtgcaatgaaaggaataatccttgagacgaggtgtgggatatgtcaacttccttgatggtctttatatgcttccaccacagagaatctatggcgatttcttttaccgttccaaaggcagattgggcttctttctcagtcttcagatagtagcaggagagggttctcccagtgtggatgtccttcacacgagggaagagtgaagattgttcttcttcttccaccctttattctttttgaaatgaagcgaaacttgtattgaattggataagtaagatgcacaaaagcttaactttgatggttgatgtttagaagatctgggttgatctgggccaatgctcaggagcattattaagaattagaggatgatgcattggtcatttaaaaccatgtggttatgattggactattgggatggagattaaggcattgctgagattttgaatgaaaccactgtgtgaggatttagtaatctcatgattgcaagcaatgcctcaacagtgatcttgtgggctgctttgatagtgaattgttctcagctcgaaatggagggcttggatgagggctgcttgtcctcgacaagttttgtggtgttagtgaatggtgcagccaaaggttggattgaggcatatagagggttaaggcaatgagatcctctttccctttttctttttatcattgttgctgatattttaactaggatgttgcttagagcggaggagaggggcttatttgaggggtttctagtgggtagaaataggattagagtgtcccatttacagttttctaatgacactattttcttctctagggcttctatggaagatttgcaaaatctgaagctcattctattggtttttggggttttttcgggccttaggattaatctaaacaagagcactcactttggcattaacacaagtcatgatcaaatctccaatctagctttgatgctaggatgtacagtctctgattggcctttaatgtacctaggtcttcctttagggggaatccgaaatcaatatcgttttgggatccagtgattgatagagtctctagaagattggatggttggaaaaaggcttttttgtcattagggggtagaataactctaatcctttcttgtttgtctcacattctgagttatttcttatctcttttcaagattcttgcgtctttagcttctaggattgaaaaaatgcaaaagggattttctatgataagggtatggagaggtaaaaaaggaccatctaataagtttgggatcaagtgtgtaggcctaaggagattggtggtataggtttaggaaagttttctatgaagaatcgtactttattatagactagaggttctctaagaaaaggcacaccctttggcatcaagttattttgagtatctatgggacacatcttaatggatgagatgccaatattttagttagatggccacatcggggtccttggaaggccattgcacatatattctaacttttttatgtacacactcactttgtggtgggagatgagatcggaatttgtttttaggaagacttgtggtagggggatcaaccgttgtgttcacagttttccaagactttatactgttgtcaccgttagagacttctccattttggctatctatggtaatgcctcttctctcgcttggaatctaatttttctccgcaatttaacaggttcggagattgaggatctcgaagaattaatgacttctcttacttgtgtacacttatccacatctatcccagatgtgcgagcagggacattggacttttcaagcttattctttgtaaaatctttcttccttgctttgtccaaattatcagttccttttcatcctgccaattttatttggaaatcaaaagtctcatctaaggtcaaggcctttgcttggttagtggcacacaagaaagtgaataccgattatttgctttagttgagaagaccttccaaagcccttaggccggagtggtgtataccatgtagggggattggagagacaagcgaccacttatttttacattgtccattcactttgggtttctagcacaagctttatgtgtgtttagcctatgagtttcagtgatatgacatctatttcctatgagttttgggaactctactagaggtaagacacatcgaaagattgtttgttttactttgatttggatggtgtggtgagagagaaatgctaggatcttttgagggcatgagaagttatttgggaaggattcgaactatggaccaactgaaaaggagagggtgctttttggcaggtttttgttgtatgtgcaaaaaatgtagatgaatcgaccatcttttcgtccactgtgggatagctagagagctatgacacttgctatgctatttattcgacatgttgttggctcttctatattcagtgatgaacttaattaatgggtgctttgtgggtaagaagagaagaaaggcttggagaataacttctcttttccctttttggacaatatgaaaggaatgtaactgaagacctttgaaggggtgcaatgcattaactaggctcttaaggactctgtcatttctaatcggtacatgtggtcttgtgggcatctcttagttgattgtcaaattagtccactatccttgatagattttttagaggggttctgtacttagttcttgtttagggttattgttgtatgttgcttctttttgctttcgcacatgtatacttacagtgtaccatgttcgctcttttgatcaaggcctttatcctcatatttacacacacacacgcacacacacttactcttttgcctatagaaaaaaatgtcggtttgtttaatcatgtgaaccaataattagtacttttattttggttgcttcatcgcattgaccatttattgatgctaatttgttatctattgccctgtctattttcactcctcaccattaggtattagctgtaaaatttccatttaccactcataaaatgatgattaaagtcggtaatttgacacggattcatccttcatagttcacacaacttatgattccaacctcttgattcacttatcttcatcctcacttttacttgatgaattggaagaagttgtgcttcaggtgttattttccaattctgaatatttcttggttatcttctgcattgtggaaatgggcattagtgttgtgttccagtatggatgagatgtattagagatagaaattccccaaaatctagacatggggaggcagctagtatgcacatttctggggattctaagtaataaacatttatttttattctgttcgagtattatgtgtatctggaagaaccttttttttttttttttttaatttttaatttttaatttttaatttatttttatttatttgttattttttatggtaagatatagttacaaaaggggaaactttaaattagggtttgtatcatgatgtcaatattcacttgttcttctacacattatgatacttttcaagcaaggacactactgtatctgtttgcttagaggctaatggagaaaaaaatcgatgtggataaaatcaaagatagcatgaataggagttatcatcctaccaaatgaatgaggggattcttctagaatgccaagaacttagctttttcttttaatgtctatgtaccttttgttcccctgttttccattatctttcttatcgttgattttcctttgttcagg

SEQ ID NO: 12406 - DNA, 13146 bp, Vitis vinifera
  Intron number 4 from transcript GSVIVT01023393001 (locus G SVIVG01023393001) derived from phytozome v7.0 (chr-ID chr1 4; pos 12821107 to 12834252 reverse strand)
aacttgagactgagagtgctcacttgttggtctgcttctttcttcaatctgagtaatttatgtagttcttgatgcatattccacatccttgcattcacactcaactttgcttcttttgcaaaatgtttgtgttcaaaccaaatatttattattattattattgttattttcttttactatgctcttctttatgcgagtaatgattgtgattagttattttgtgtcgatcttttattaagtttccccccaagaacttaaaacaaaggtgatattcgaagctgcatgaattaatctggtattgaacttacgagtcatttcttgtaaaagaaaatggatgagatcttttcaagttaagaatatgaaagatgtttgagaacatttcttgtaaagctgcaaaatgtttgaaacccttttagttccagccctttaagcaatttgggagtggattagtccccaaaaggtatttgttatgccctgttaaacaagattgaggaaattttgtcaagtttctagtccttttggccacttattctggaatcttgaataaaagaataaagatcacaagaagggggttaagtatatactggattaaattgtcctctcttagagaaatgtgaccattctttatcgtacaatgttgcttgtttattttgtagcaattgaatctgaaagttttaatttctaaggtggcatgtgggctgggctgtgactgttctaagacggcccattgccctcctgttatttgtgttgcccaaagaggaggtgagggctctattatgctggactgcagtgctggttctaagactagcctagtggaattggctatttttggggcttcttttgcctttagagggaacaatttccagaagtctgagctctccctgttggtagtacttcacacaagcacctacatggccctcatggcagaagtgacaagacaccccggtactatttctctctctgttttttcgttggggacatgtgcaatttcttctccatctccttctgggaatggtcctggtctggagggatgtgaggtggattctatagttgatccactgggagagggtagcagtcctctaaggatggttttggtggacgaaacttcaatggagtttggtgagattggtgtgaggctgatcaaagttgtggtgggtgagatggataaggaagagggggcacgccttggtttggttcagagggtggaggtgcctacggaggattggtcctcaagcaacctggcagctttcaacaattggttgggcatgaaacagtggggttcgagattgagatcttggctctacttagaaaaatgaaggtgagggaagaggtaaaggtccaggagggtggaacgaggaggaagaactcgtcttcaaaatttgaaagggaactaaagaagttggaatgttttgtgaattataagggaccattaggtagacaattagaacctgtcaaaaagaaagaaaaaggtagacaattaggaggtggaaatggagagtgggatattgctgcagtgggtaggtgataccttttttcattgctttggaatactagagggtcttctgacatcatcaaaaggaagttcatctaagctttgtttggtttgcagcaaccagtttttatatgcctgcaagaaggtcgttggggggtactgtgtttcttcttgggctttaggcttggtttgagtggtgggttgttgttgctctttccttttgcttgttgtaaggtgctatttgtaaattctttatgtactttgctgtgccttttcaatcacttttaatataatcaccttttttacctatcaaaaaaaaaaaaaaaaaggatctaaaaaatcaattggtataagaccatcctctaaagaaaaagctaattatccatattgggttgtttactaaactaaataggaaacagaatagaagagaaaatgattcagataaggaatgaatcagagttaggttgaggaatcccattgaagagtttacagaggaaagtgaattagaaagaaattgattgtctttgaagtgtttacaaaactgataggaaaatggaataaaaatgaaattgagtggctttgaactgttaactaactgtcatttttgatactgtttcaatctctgtttgcttccctatgttttaatgatatattttgttactaagttgtgagatccacctctagtcacatttgttggattttatttatatgctctaaacttgttattcttttgctccttactatatgtagttaactaaatgtaagccttttcgtttgacattgtttcactgtcaagccgatgttgggatgccaaatgagcgtctccattggctctgtgataccaaaattctgttttcaacctcaaaccttgaagtaactgacaggaaatatggaatgaaaaataataagttctgtatattagattgactatacacacaatttatatagaatattacaagagaagaaataggaaacaagagacatgatcagaaactaacttattcctaaatcataaaactatctatttacaaaaataggaaactaacataataggaaaataattcttctattctatttacagctcaacactccccctcaagctgaggaatagatgtcttccattcccagcttgaatacaagatcgtgaaacattgaactgttcaacccttttgttaggatattagctaattgatgttttgatggaacataggacatacacactattccttcctccaatttttcttcgatgaaatgcctatcaatctcaatgggttttgtcctatcgtattgtatagggttatgagcaatattgatagcggacttgttgtcacaatagagcttcataggaccatcccacttgattctcaaatcatctagaataatcttcagccaaagtagttcacacaacccttgagcaatgaccctaaactttgattctgcagacgaccttgctaccacattttgttttttacttctccatgttaccagattacctccaagaaaagtacaataccctgtagttgatctttgatccactagggaacttgcatagtcagcgtcggtgtatgcttctagagcaagagtattgttcttcttgaacaaaatttctttcccggggttgcctttcaagtaatgtagcactttgtaagcagcttgaagatgaagttctcttggatcatgcatgaattgactgattacgctcaccgagtaggcgatgtttgaccgagtgtgagcaaggtatatgagcctaccaaccagcttttggtacattcttttatcactactggttcttctttagcttctcccaacttgtggtttggatccattggggtagagactggtttacacccaatcttccctgtttttgccaataaatcaatcacatacttttgttgagagatgaagatcccttgtgtggaatatgccacctcaataccgaggaagtacttcagtttccctagttcctttatctcaaactttgttgctaatctttgtttcacttcatgcttttctctctcatcatttccagtcactatgatgtcgtcaacatagactagaagaacaattactccccctgcagccgagtgcttaatgaagagagtgtggtcaccttgactttgtttgtacccagactctttcatgacttttgcaaatctcccaaaccaagccctaagagattgtttgaacccacaaatggcctttttcaggttgcacacgttgttacttgtgtttccctcaaatcccgatgggatgttcatgtaaatctcttcatctaaatcaccatgaaaaaatgcattcttaacatcatactgtaggagttgccaattgtagtgggcagccagtgacaataagattcttacatggtgtacccttgataatcaactccataagtttgagtgtaccctttggctaccaatcttgctttatgtctttcaagagatccatcagccttatattttagtgtgaaaatccacttgctatcaacaatgtttttccctttcgatctttcaacaatctcccatgttttattcttttctaatgcactcatctcctctctcatagcatcctttcattccctttttgtcaatgcctcagaaacagtgttagggatgatagtggtgtttagactcacaataaaattcttgtgggctggtgataggtgcttaggagacacataatgtgatagtggatagagtggttggttagtgcattctctggtgccttttctgacaacaatgagaaggtctaggcctaggttgtctgttgagtctgtggaagtttcaccaggttgtgtatgtaaatgtgggtctgatcttaccgtgattgcattcccagggtttgagttggattcttggacttacttttgttctggaatgaccttttcccttgtcccttgaatacaccttaggaaattgtggaaaattgcgagtgacattggctagaataggggatgacacgggttcaatggtaaaattgggtgactcaggtgtgattgacccggatgactcaggttcttcatcaccatgggttgagacatgaagaaagtcaagaggttcaaaggactcacaaggactatcttccatcattgaaatctccccttgaagatgggatttggggaaaaaaggtttattttctgtgaaggtgacatctgtagggatgtaaaattttctggctaagggattgtaacacttgtatcctttttgagtggatgagtaaccaaggaagacacattttatggctcattttctatgaaggtgacatctatagggatgtaaaattttatggttgagggattgtaacacttgtatcctttttgagtggatgagtaaccaaggaagacacgttttatggctcgggggtctagcttgtctctatgttgggtgtggacatgaacaaatgcagtgcacccaaataccctaggagtgagtccatttgaggtactgaagtgtggatagaaactcttaagtatctctacggggcttttgttgtctaacacttctgagagaattctatttattatgtatgtgacagtaagaacagcttccccccaataggacttaggaacattcccttgaaagagtaaggctcgggttgtgttgagtaaatgcccatttttcctctcggttaccccattttgttgggttgtgttaacacatgatgagtcatggataatgccctgtgattgaaaatagggtgacaaaatctggttaaagtaatctctagcattgtctgtcctaaagctttttattttaaccccaaattggttttgaaccattgagtggaaattaggtataataatgctaacataagatttttgtttaagaagaaagatccatgtaacccgagtgcagtaatcaattaaggatacaaaccaatgagccccggaaacattaggtatagttgaaggaccctatatgtcactatgaatcaaatgaaaaggatgagaacttcttttattgctgataggaaaggatacacgagtatgtttttccaattcacaagtttcgcaatgaaactcataaatatctaatccttggaacaaatgaggaaacatgacctttaaaaccctaaaagatggatgatctagacatagatgatacaaccaaatggtatctttatttgaggaactgagaaaagatgacgaattattactagtttgctgagatgattcaaggtggtaaagaccgctcctttccttagcaagtccaatcctcctccccgagccttgtttctgaaaaacataataagaagggaaaaaaatagcataacatttaagatcatgggtaagcttttgaatggaaacaaggttagccgacaattttggtacatggaggacatttttaagaataagggtaggtgtgatgtatatgtctccgaaacttgcaacggtagctaaagagccattggccattgcaattttcttattacttgggcttggggtataggtatggaaaagttgggatttggagtcataaaccctgtgtgagacatttatgcaaaaagagagtgaaggtgtacctgaaagagccaaagaacaagttccaataggtttgtcaagggatcccaacaagcttctcaacttctccatttcttcactattgaacctgcttgttgttgaattttcctcagttttgggctgctctgccatgtgtgcttgagacctttgctgccctccacggtttccccattcacgacttggtggtttaccattcagcttccaacacttttcttttttgtgccttggtttcttgcaacaggtgcaccagagattgtccttgttctccttccaccgattttctctacctaagtgtttaggcagatcattatttccttgctctgaatattctgtttttgcaactagggctaatccatccaaggtttgtggttcaagcataacactcctttggctttcctcgcctcgaatcagtgccaccacctcattaaaagcatggaacctcctgcttgccaagaatctggattctcacttgatcaaattctgggttaagcccaacaagaaaatcataaattctatcttgttcaatgaaatccttgagaacagcggcatcctcaggacatttggtttttatcaccctataatgatcaagttcttgccacaaagctttcaattgaatgacatattcaataactgttttacttccctgttttgcagcaatcgtcttcaccttaacctcatatacttgagccgcatctctagcttttgaatacgtctgttggattgcatcccaaatatccttagccgtagccaataacatacatgtgtcgctaatctcaggagtgacagaattccacagccacgccataatcatagaatcttcttcatcccatgcttcaaaacgggggatctcttggtttcggccctgtacccataagatggttgatcttccctttccctttcagcatagtgcaaacaagttgagaccatttaaggtaattttttccatctagcctatacgcagcttgaatgttttgcaattccttaggttgttgagatcaaacaatctcctccgattgtgctgtagtagtcgtctctgcaacctttgacatctttcacgaaaacacctgatctcttgggaattaaggcagatcgcgaaacaaaaaaaaaaaccagcagcaatgaaggctagtaaaagaacacgtgaataaaaaaaaaatccagctatgaaggcaaaaaaaatggcgatgaaggtcagaatgatgcccaggttgtaaaaacctataactttgataccatgacacaaaatatgggatggaaaataataagttctgtatattagattgactatacacagtttatataagagattagaagagaagaaataggaaacaatagacataataggaaattaacttattcctaaactaacttattcctaaatcataaaactatctatttacagaaataggaaactaacataatagaaaaataattctcctattctatttacagctcaagagtaaccttttcaagggactggttcatagttaagtagttcttttgtttgggcaactgagttgaaccatgacaccatacccatatgaaaaaagctgaaaggtaatgcaaggtggtgtggtaaatattgtaaaaatttctacaaaaggcatggttgagatcaatctgttaatttggcttcaaggggttagttcactgattggttcaactgtcaaagccgctaaattgaactatgacatgatgctagctttaaaataattatgtttttgatatatacttttgtttttggttgttttggatttaaaaatcgataattcccctcttccacacctgcttttattactctacaaaatcaataatcctgtcagggaggaagaaaaatgtgtggtgtggggttttagagaaacagaaaaacagtgtacaatccaaggcccctctacatttaagagggtaaaaagtctctcacaaacacaagggtggaagatgagggttattcggggagaagatgaagttgccaagggtggaagaagttggtctgtggtggattccaagttgtttgagattttggttgaggatatgagagggaagctgaaaggttgtatttgggagagaagtagaggtatctcttcatggattagatttggggaggttagtttacagtgcttactagaaggagtagaagcatgttgtaaagaggttgataattgaagttgagttcttggctgggaggaggggggtaggaagtataggctggagcaatgtttaaatgaggcaagaaggttcattctctgctctgtccgtgatcttgaggaaaaaaaatcagcattatttgttcagaagggaagggggttgtctaatggatggaattctctggccgagtggttgggaggccttggagtggtccctacaggaggcttaaaggaaaccagagttccagaggttccgttgagggtgaaggggggcccgaaggttttgtggagagagaaggggggcctgaaggttttgtgcagggagaagggggtggagacaaagtcctacgcagatgctgtaaagttgaaatcgggaagaataggcgattcagtttggttagaggtgggggaaagagaagtgcgaggaaggttaaatcagatgaaacaatgtttggtgggttggcggggtgataattaagctccattacctgagttggatttcgtaaggagatggacgcattagtattggcctttaaaggggaattttagtgttgttgtgttaggcagaagactcttgctgtttgaatttgagatgccaagtgaggctgagcaaattctagctagaggcaaaagaagtactaaggaaaattttcttattttggatagatggaacccagaggtggggtgtctttgcaaggactcctttgctaatgaagcttgggtgagggtggtggggctcctgcttcacttgtggagtcgtgaggtgttcaaaagaatcggtgatgggtgtggaggctttgttgcagtggatgaagatactgattcattttctaagctgcagtgggctcggatcctggtgaagcgtgcggaaagggttttacctaacattgctcaggttgttgtggggtcggggtgctatttctttcatttgtggtgggagactccacctagtttcgtgtaggtggtgccgatgggaagaaactgcggggagggcggttcaagggaaggagaagaagcagggggaagctcacgcgttgcttgctgtgggagtcaaagggagaaggtggagcagttgaacttgcagcttggggtagatgtcatgtcgtcagttggaggcaacgcaactacccttcctgctgaggtctttgtcgtagagactgaagagaggtttagggtaggtaactctcctttctaagtgagaggggttcagaagtcttttttaaacaggctgggcggacttggtttagagactagtggtcttagttgtgggccttttggattgggccttggggaggcccagggacaagataaggagttgtaagtgggtttgggccgggtctttaggcctatcactttaattgatttaaaagggtgcagtgagggagagttggtcgtgggccttgggcctgaagttgttggcgcaacgggaggaggggatttaattgggccaaagtcttcagtccctttttctggggcactagatgagtatttgcttaggaaggttagagacgaaagcggagacgaggatcctctcgtagggatgatgagggctgctttgtcgctggaggcccttgaggtggtggaaagagcgttgttgactagcaagatggaactgatggactagcaagatggaactgatggactagcaagatggaactgaagggccatcagtcgacaaagtctgagtagaggagaggcataagagacgagcaaacacatcatccaatgatggaactgatggactagcaagaatctgatctcggacagactcaagatctcgacggaggccaatgagggttaacaccataaagaacttgtcagtttgtatttgttgagcttcagcaccattagtgaagggcatcaaagttaagaactcctccttaagagacgcaatccggccaatatcagtagacagatccatgtcctgctgtctcacatgaacaataccagaaaccaccttataaaatcgttgaatatcattcgtgtataatcctttagcctgagtccaaaatttaaagcaggttttgtaggcacgaagatgatggaaaattttgggatcaacaaattgccataatacgctgcataattgtgcatcgatcttcttccattgcgctttgtcaacatcagctataacatcctcaggtgtaacaagatgatcctcataaccttgtcccataaactagagttccacggacgctgaccaggagagataattctcactaccaatcaatttttccgatatgatagtaggagatccagagatgacggatgtaaaaatggaatttttagtcgccatatctacttcacctgagattgaatcatgtttggatcgaagagagccctaaagggaggttggatcacagctgtggaagaagaacctggtatgtcgggacccaaacaaaggataaaagtgattggggatgaagaagaggccttcccaaggcacacacaggtctcggccaaggaagagagctgctgtcggaggccggaggaggttgaaagaagacctgcggaggctgaaatgccaaaaaaatggagaagcagggttcggagaggcttgacggaggcttagaagtgcaagacggtgcttgacgagcctgttggaagaagcttgacactggaaagtgggccacgcgccctcacgcgctggcgcgtgagattcaggccgtcggagaagagtggcgcgtgggaggcgcgtgggtgggtgtttggctccggtgatttgagaaaagttgcagatctcctctttgcgcttctgatggtgtggtcgatgtcagaaaaagtcgctggaaaaagtcaccggaaaagtcattggaaaatatcgccagaaaaatgttgacggtgatgagggttttctaaccacgatatggctaatcggaaagctttgggagatggaaaaggtgatcggaatgaaacacggtcactgaacggattcccggaattaattacacggataaaccagaaagaataaagttttctcccttggctctgataccatgttgaaagagagagagagggaaaaccttaattcttattcatattcatggctacttacaacttacaatagaggaatatatatacaaggctaggttaaactaactaccatatatgtgacctatattaagaaaagaaagaaatattgtacattatataatgcattatattcaatagtttgtaatctttggtcttggtctaagacatatttagatgtaggacctctacctttaatcaacttttttgattggttgggttctagttgagggctagtgagtgtttgcttctttttgttcttgccttttggtgactcttgtatactccttgtatgctttgggttgcctcttaaacgccatttttctaatatatattttgtgtgtttatccatcaaaaaaataattaaaagtggtgtttacttagctcttgtacgttttgtataggttgttgtacattttatatagccctttgtgaggaggtttacttagctctttttgatcaggtttgtatttcatgaggaggatttctcatccttttcatgttttttattcttatttaatacatatgtttgtttctgaaaaaaagaaaaaattaaagttgtgtttgtaattgcattcaagcacaatatcattgttgtatgtgatagaataccttaatatcacacatgtgagtttttatgatatttggctagttctgtggcatcaagtcattctaagcatttacgggacacactcaaatagttgggatgccaacactttagtcagatggtcacatcgttgtccttggaaggctattgcacaagtcttttaggatttttccaagtatactcagtttgttggaggagatggggaaaaaattcttttttgggaagaattgttgtggggggatcagatcttcaaagtccaatatccaaaactatttagagtagtcacgaataaaaatatttctatatcttcaattcttggttttgttcaccctttttcatggaactttaatttccgttgtaatcttttcgattctgagatagaagatttagaacgtctgatgcgatctcttgattgtatgcatatatccacttcggtttcagatgcgagatcatgatccttattttcttcaggattgttcacagtcaagtatttctttatacccttgtcccaaatgcctgatttatctcctctttttcctactaagtttgtatggaattctcaagtacccttcaaagttaaggcctttgcctggcttgtgacacacaagaaggtaaatactaatgacttgctacaattgaggagaccctataaaactcttagtcttgacatttgtaagttgtgcatgaagtaaggagaatcagtagatcatcttttcctacattgttctatgccgttggggttgtggtacagattatttcagctagccaagatggattgggtttctccgataagtatttcagacatgatatccatcaactataaaggttttggcaactctaagagagggatggttttgtggcaaaatgtgtgcataactttaatttgggttgtgtggcgggaaagaaatgccaggatatttgaggacaaagctcggaattcagagaatctttgggattccatttatttccttgcttctctttgagctttttgttccgcggtttttaagggcattccccttaatgtgttacaactagattggctagcagtgtgtagttccaacgggacggtctagtcaagggagattgtttgtagttttcatagtgtagtgtcttgttttctttttgtgttgtttaattttatctctggtgggaggattcctcatccttctattgtacttctttttctatcaatatatacatgtgttgtttcctataaaaaaaaaatgatatttggctagttgatttatctgttaagaatagttgccattctgacaattccttggaacaagtattggagcttatatcatttgcttctgctgcttatgatttacatgtttccatgaacaggaacaacttg

SEQ ID NO: 12407 - DNA, 4818 bp, Vitis vinifera
  Intron number 2 from transcript GSVIVT01000635001 (locus G SVIVG01000635001) derived from phytozome v7.0 (chr-ID chr1 3; pos 20225394 to 20230211)
tgcctcagtggtcttgaaagtctggagatctggtagtggcatggacttgtaccctttggactttggagcagcagggctgcttggcaatcttaaatatttgaaattggaagactgggctaaccagaagaagcagaagactgcagtttagcctccaaccttacatcactttatatgggagatcatctaaatctgaagctgccattatctgagtagggcctccacaggctcacttctctttcatcatttgtacatttctggtgtatgtccagctctggcttctctatcagatgatgactatctttttcccacaactgagcaatttttttattcgtaaactggattccatcgcatcagtggctttcaaaaacctgcgttctcttgaaactatatccatctataggtgtcctaagctctggtccaaagggttgactgaaaaactttcgaggcatgacctcaatactacatgattatctgctttcttcaagaccattttgagtaagcatgataagttagtgcttcattttttcttttaatttcttctttcaggtaagaagagaagaatgatgaagtaattcaatgccaacattgaagtatcaagcatgaatatgttacttttcagttatatattgatttttattttttttttcttatctcaagtaaattttctttctacaccaaatcctaaggcaatacaatcttgagcttactttttaagattgatatttgacttgctctttgaaccataatttgccaaagagtgttgtgataacgttaaatcttgagtcatcttaacgttaaaataaggaatggaaatgaatattttgttttctattcctgtttcttagtagataaaaatgaatttgatgattctatttctagcatttggacgaatttaggaatgccagattgaaatgattatttgtttcaattccaatgtttgataataataggaatggaaatgaaaaagaaataaatttacaataatatcattacatataatttaaaataattttttttattttaaaaaaataaattttgagagttttttgttgttaaataataagactaaaaaatatatatatatactcaataaataaaaaattaaccataaaaaattatataaccctaatgtacaaatattcaattattatttttattaaaaatttgaataatttgatatgcttaagtagttataaaattatattttaccaaatatatatatatatatttattataatatttaaacgaacatccaaaaccctagaaattagaaattgaaatttcttttctaaatgttgtgaaagatttgattgattcagtttgggagaatcacttgttgcggagaagtggatgatgaatgggtctctaactttgcaaagaagataagcattggacttaaaaaatgagaaaatagtgcaaaatagtaaatttaggttattttatattatcaaatgggttcaatgaatcaaaataccacctacttttgataaattcaaattcgacttataagttggatttgatttctacataaataattttttatttcattcatgttttcttaacatttatccaaacataagaataaggaagaaaatgaatgagatgtctattctcactttctattctcatgtaccaaacactaccgaatagtagaaaaataattgtgcatacttctcagggtcaatagttctagcttgggtcattatatcttaaggagtgacaatgttgcaaatttgacacaatcacaaagctaataccaaactttgagcatatgaaattcctagggcaattccaagtcaacacaatcttgggtttgctccttgagccattatttccaaaatgtgctatagttacaaatctacataataatagggctcaccccccaaatctcaagccaaaaaatccctagccaacttcttgaaccatcatttcttgaggctcatctaattcattttctcttttttcgacttgttcttcaacttgtttggaaaagaaatgaaagattcttagccattgtgatttgatcatattgtcatattatgaaagtggggtgatcaaatgaccacattggtaatgatcaataaagccatgggaatggttacgattaacatttacattgttgtttgtcatgatctcaattgtcccactttgattatgaagttttgtcttattgtgaaagaggttttcaaattgattacatactcctataccatttgttatgctcaaactcaaagtagccattttatctaacaatcaattaattgcttaagagatcaaggtaaacctatttatgtgattcaaggaatattaaatcagtcataagctaatacaatcttagggttaactacaaaatgttgagtgaataaaatcttgagatcattacttcttaaaccaaaaccaaatcttaagtcaacacagttttaggctaattactttcaaattcaatactaaacctgaagcataccaaatccctataaccaagatacttcttcgatcataaaaaatcccaaggactatccttgattcatcatttccaaggaacaatatgatttcaaaccttacaagtaaataatcatggatgacatatctttcttttcttttttttcattatctagcatcattatctagcaatgaacatgaattaataacttgttacatgagttgtgttgattagggatcccttgtttgcataaccgtgaatgaaagtataacctaggagataaaaatcatgaagctaaaaaatttgtgcaccctaaaggagaagtaccaaagttttggattggaatttctttgacccttatttttatgctagtaaattacaaaataatcaatcaaatgagtggtgtgatttttttttcctaaataacaagttatttaggttttctatgtataaattattacatgttgtcttctattagatactaaattttctatattataaactaaaattagtaatggtaataaaaaactaaaaattctttatatacatcgggttagagttctctcatgtttttaaatatacaagtctatggtccctcaacttttgctatttttatttcataccatagctccacaaaaaaagtctacaaattcatatgtagacaaaacaaagttaaagtaaaagtggaccaatcttatctccttttccccaaaccatccacaattgtcatttgatcactaggccaatacaaaatatttgattgacctttttttcacacattatattatgagtatgtttgaaatgttgaattattgcatttcaattatttgtcaaaaataaaaatcaaaatcaaaattttattctcataaaactaattttattaaaatttttatttattttttacatagtattttaattcatctttatttgcatttcaattatgattaattcatctttatttgcatttcaattatgattcttattcttcaatattactatttcaaatataggtaaaaatcttcctttactaaaagatgcatttcaaatatgtcacatcataaaaaaatttgtagttaagattgagaaaacaaaggctatgcttagttaagaaaaacacccaaaagggggggtgaattgggtttttaaaatcttttcaatcacaacaaattcaaacacaatataagcaaagtaaagagatagagtttagagaattcaaactcgggtttatagtggttcggtacttccttgcctacgtccactctcctcaacctcctaaccgagtgagggttacactaacttgaagcttcaaccatgcttccaatctttttacacttggattccgtctccaatgggctcttacataacctcttcaagattcaaccctcttaaaggctttaacactcagatttttacaagatataatcgttcaacctagcttaaggatagctcaaatacaagacaaagctaggataacacaagagtgcactaaaggatatgcaagtggtgatttaatgcactatgaaagaaatgaaagcttttttatcaagaacatgtaggtaggctattgaatgcaagtgttctcttatcaataaatgaagtggagctctcaatttataggtttccaagctcgggagtaaaaaacagcaaaaggtaacctcgtccggtcgagctaggggtcgaccggttcactagccgttagagcatttaatgcatgacaggttaccgttgcctcgaccggacctcgaccgataagagaaacacctcgaccgggaagagaaggctactgggagagagagaaggtttttgacctccctcgaccgatcctcgaccggacaagcacaaccggtcaatcggttcctcaaccggttgagccagttggtcatagccttgatcggttgagccttttttgcctcaaaaacctgtttttttaattcctttcttttctaacacttaggcaaggtctttaggtaaattattaagccaattttgaaactttttgtctaaggtacattagttaaaaactcgggttttaatgaaatcgacgttttaaataataaaccgagttttcaaaaatgtatgaaacgtgtgaaaatcctaagtgcactcatgcattcatcttatattagtttcctatgatcacaagtcttctaagcgtctcgatcttgtatccatttggtcatttgatgaattttcgagtttatacctgagattcttaatcattaaaccaattagtcacttaaccatggtttgttatcatcaaaacccgattaggagaacccttgggctaacaaatatgatagtactactaatggattgttatagatttatattaaagtactagagctgttgcataattctattaaacttcaaattattag

SEQ ID NO: 12408 - DNA, 2658 bp, Vitis vinifera
  Intron number 3 from transcript GSVIVT01010090001 (locus G SVIVG01010090001) derived from phytozome v7.0 (chr-ID chr1 ; pos 15219230 to 15221887 reverse strand)
tatcttgtgagaagaggctagattatgatcacaagaagaaagttggagctatgaatgctctagtccatatcagtaaaatttggtcaaatgggccatttattttaaatcttaaccccgatcatcactatacccaaattagaatatgtggtggtttaacttcaattttaggaattacaagcatatgtattatgattgttgttgatgtttcacatcaatgttatataccaaagaattgacaaataataaattatatataaggaagaaaatagtgatctctaagacaaataggtcaaattcaattgatctttgtgtacaatttaaagatttttttttttttttggtagtaaaacataaatcactagaaattttatttcatggtaaaagggtgatcttttaacatgattttatttttaaatggcaaaaaagtgatcttttaccatgattattttcatgacaaaaaatgacatgttattagaaacttgttttatggcaaaaaatgatatgttgccaaattttattttgttgtgagaagtgacatatagccatagattttattttgtagaaaaaatatttattttactataatattaaattctatggttaaaaataattgctcataaacttatagcaacaatctcactacaaataattttttatggaaaaaaatattttaccacaaaatactcttttttaataacaaattaatttaaagcaaaatctcatatttgttgtagtgatatttgcttgataagttctctatgagatcttccttatttgaatacatttgatgcttgaactagttcatatgtacaagtaaaattgatgctagatcttaagatcaataaggataaattccgaaaacaagaatagagcatacataatatgttgtgttatgattggaatttgattttgaattgattgatttaatagcctattgcctcatatctaagtttgtcttaattaggccttttatttcaaatcaagagactttttgacctagggatataacctctaatttgaatatactccaaaaactcaaattaatttgaatttgctttaagaatttgatcgtgatcttaatcacatcaacaattatatattaatcattaaagaatttttgttcttagtctcaaaactttatttccttaatcccaaaactttcttatttcttaagattttcttgagacaagataacaattttccaaaaacccatatgcctagggataatagcttgactactatccatcagttgtcacttttttccattttgtcaagaggaaagatttctatgataatattttgattgaacattgatttcttaacatcttaaataaccatgacatcaatatgacattgtgttaagcaaatggcaatgaaaatatcatctaaggcatatgagaatgagcttgggatacttaaatttgaagttacatgcaaaatgaggttgtcgaggagaagacctcaagtggctctgacgagcactcaaccacttgaattaggattctttttagtttcgttcttattaaaattacatattttttaaatgcttcttgtctaacccagctcactagggtttctttatatttatgttttctttttataaaagttagatctttttcatatgcttctagttcgatccaacttattaggaacctacttatttgatgatgtatgcacacatttgttgaattacattgttattgtcttgttggaataatcctaaactctcaacatttccttatcttcttatattattgaaaggagttggtggttgtccaagtttcttgattaataaagagttaaagtgtccattatgcaatactacatgacactatgtcgaagacgtatgagaatagagtatagttgttagctaaagtaaatcttttttgagaaggtagcttcttggtttaagtgaacactttttaagtattaatgaatttgctttgctctatataagacttgtggttttacatttgtagaggtttttgctaaaattctattgctagtttccacatgatcttaggaataatcaagatcaataaaaatttaatttttgaatctaattaattaatgggactaggtattcactctcccttaactaatttcaagaataaggaaccttttaactttcaattataatattacatggcaattgaaagcattgagactttgggacgccttaattttgagaagcaactagtatatgatttaccatcatttgatagatagtgatatgcaatccctaagttaatagggttcaaagtatcggtctagttcgatacctgataccatctcaaactcaaactcaatcaagaattgtttaaacttggttgacttaatcaagattttgagttgactcgattgaaatatccgtgttccttaaagaaatccttttgcattttcaaatcacagtaaatcaacaatagacaagatctaagcctaaaaaaatctttgaaaaataaagtttgtcttcaaaagaaaaagattttcagcaatcaagactaaccccatgatgaagaggaagaaagacatcaatgaacaatcatggatgtggagcgtcttcatgtcgatggtgtcgttgtggtgaccgatatgatgagaagatttcctccattaacataagtggcaatcgctacatctagtctctcctctctcgga

SEQ ID NO: 12409 - DNA, 6766 bp, Vitis vinifera
  Intron number 2 from transcript GSVIVT01015880001 (locus G SVIVG01015880001) derived from phytozome v7.0 (chr-ID chr3 ; pos 18907163 to 18913928)
atattctagctgcccattacggagagcaaggtattgttccttccccgtgctctgtgttgttgtttcttcttggagattagaagtactgataggtgcacacattttattacctgtttgcttagtttaaaaaggaaaagtcaagtggacaaggcgcctcttcagcaaggcacatgtcttggcatgcaaggccctgtaacttgggagtggttgcaaggcagtggttgtggcttgggtctaggcgcgctttaaacgtgccttttaaaactatgcctgttttgagtgtgtcttttaaattgcttgttttatttataaaaatagtttttgtggttggttaaaggatttagtcaagtggaaagtacttatttcttggacagatgagggccgattgttttttttgttcttattagaaataaaagatgcattgattaaagataataaaacataagaaggatgagaaatcctccccatgaaatacaaacctgatcaaaacacccatgaaaaacgccgttttacaatgagatttgtacaaaaagaataaaaagactacaaaaaaaaaatacaactcaaaagctcaacttgactcctcaccaagtaagctcaatcctaaggtgtacatacggagtgccaactaaactgaatgaaactcaaggggaaaggtttgaaaatatcagtatagaaggctcaaaaagacacaaagaaatgaatcaagtcccacatcatctcagacgttttgcgagtatcctgaaaaatcttagtattcctttctctttccacacaatccacatcaaagtgagagaaacaattttccaaagagttttgtctctagtagaggtcccaaaacatataagggaaataaccatcatatcacaaatactccttgggatgaacccatacattcctaacctatgagaatagcttgtgccataatcctaaagtaaccagacaacgtagaaagagatgatcaatcgtctctccactccccttacataggatgcatcaattaggactaagggctttgaaagaccttctcaattgtagcatgacattggtatttaccttcttaagtgtcattaaccaaacaaaggtcatgatattagagggaacttttgatttccacaaaaaattagtcggatgagaaggaactaaataagataaattggtctaggttctagatgagggttggtgagattttttgtatcccctcttcttttttattcttgccttttagcgcctcttgtataccccctgtatgcattgggttggccttctgatgcctttttctctctttacctatcaaaaaataaataaattgatcaaggctaaaaagaaagattttattgataatactcttgaagaagagggtacccaagctttcacatttgggacagatggagacaagggtacacgggaaagagaagtcatttgtctttcaagatcattaatctccaaattagttagattacaatggaaaaacaaattccaaggattataactacccaatatagttgaaatggagatttctagttgtgacgactcgtgaacacaaaggttgattccctcaccgtaaatgttctcaaaaacaaatttttgtcccatcacccactacaaagcgagtgtgtatagaaaaaacccaaaaaataagtgtaatggctttctagggacaatgatgtgaccaatgaactaaattattggaatcccatctattaggatgtgtcccgtagatactcaaaataacttgatgccaaagggcgaaactgatgaaggttaattgttgagaaaattaacatttttctctaaccttctaataagtgataacttacccttcttactcatttcctcttttacttccttttgattgtgatgagaacaatgaaatcaaggttaatggcatctagcttttctattgagtgctctaaatgttataatttttgtatactggacatgaagatatctgtctatcttagtttatggagagttagtccaaaatccaattaattgggatcaaattgtatgttgaatcataggccattttattttctctcttcttccttgaactgctgtccacacaatattcttatttttttggattttcttggaagtaacctggtgttccttgatagataggaatgagactcataagtgggccaatgtttcattggattgagtttgttcatactttgttgggtatttggcataggcttaattatagttaatcatagttaccatgcaaaaccttcttcaaccataggctctaaacagggatacatgttctattaaattcttggatgtgaggttttgttttccatgtcctctacccttatgaacttgaattctaaaaatatttgggttgctcttggaagtgatgctttatggctgtaagccctaaatagttaatatgggatgtcaactttgggctatgttacatggatttgggtctgggttctggtatgagtatgcgtataggtttttgatccctcggattcccaaattttaggattcagcaacttgactggaaaggatcttaatagctatgctggtaagagattaaatttgtattactagatatcaggttagcttattcatggtttggttgcatccataaatcataatatcaatttttattgatgcaagttgaacacttgtttggtcaaaacaaaagaaatgtgtgtgtgtgtggggcacgcacgaacgtgagtgttagcggcccccacatgtattttataagattcacaaattttgatgcacaatgtatacacatatattgtatgcttagctctttaactaattgaattttaggaagaatgacatctactcttcttaactggaatcgacaaaagagaggggggtaaaggggttaggggaaaagaagaaacccttgccttcttcccattttgagagggaaatccgaaggttagagcattcgattaactacgattgctttccatccattgtaaggggaaaggggaggggtgtcggaatttagggaaggggttgggcttgggcttaggaagctttaatgcccaataggaatttcttttttgggttctagtaggggtttcttttttctcttgcatctcagttacttttgtggttgtttgttgttagggtggtggggttttcttctcttttctcctacttgccgattggccctaattgcatactccgtgtgtactttgttgtgccttttggcaagtgcttttaatgtatcttgcttatttacccatcaaaaaagaatgacatctactcttcttgatttatatacacatatattgtatgcttagctctttaacttattgaattttaggaagaatgacatctactcttcttgattttatgaatgattacattaacatagtaaccctctctggcttctgatactaaccaggtatactttttttgaacttgttggctaaaggagttaacataagtattgaacatcattttggctcctttagtctgaaatttcaaaaaacaggagagaaaaaatatagactaaaagaaaatgaggcatctctcatcgtgcaacatggaattagtgtaagatgaagggggaagggaaagggagatgtagccgtaagtttctcacctatttaattggggaaaaattgtgtgtgtatgtgtgcacatgcatgtatgcatgtgaaaagacatgaagatgaaagaaggggttagagtgagatgaagaagaaattagggactaggttaagacgaagaagatgaaggggaaggggaagagagatgtggccgtcagttactttcctaaggtgttgtttggttgcctaaaatgtaaactaaaaaaatgtggaggtgaaattagttattggaagagaatcacagttatgggtctctcacccatggtctgtctctagctgcccaaaaaaaggataaaagaaatgagatcagggattaggtgagatgaagatgaaattgttatttttgttttgatcagttcttgtaagttttggaaggatttgttgcccttctttgttaatgctaataaattttgaataaaaaaacaaaagggtaaaaaggtacgagagagacccatgttgtgggttgagttttcatggtagtgagtttaatgttgtgtattaagctttgaattaggattagttaagattgaattaagcattaatttgaaatggatttgggttacttataaaaaaagaaaagaaatatatatacatatttgaagtggatttgggttgatttgaaagtaattattattcatattagttttaagttaatttaaatttattttggacttagctaacccagtattctaaaaaaatggttgatgtcaccaaaagtgttaacagagagccattgcacccttgatcaaggggttgttcatgttggttgacttgtagaatgtcagtgtaatattacagaccagagtgggtaccgctttaattgttagaagcctcaggaggtataggtgtaggtgtaggtgtaggtgtaaggttccctttattttattacttatattagatttaaatagtttagctttattttttgatccataatttaagctattcatggatttatttctttaaaatttattattttattagaaaaagggcactagcatggatttcaaattaagtacatgtgaccacataagaatagcaaatggctagtgcccatatttccccatttctcaacaaaactcaattttagttcccctgcttttcattcacttccccataaaaatccactcttttctttctctgatccctaggcaaatctactttccaaaagctcctttactttggtggttgcaataaaaaaattaatttgaaatcaatcaattgttcataataagagacaaatacttgacaagggttcttctctcaatccaaagtctaaaaagttcttttgtttgctgtctttggttggaagcaaaggggtgtatagatgatgttcctcttaactctttttagttttctagattagttgggcccttggtaagggtgggttggctttgttccgttttattttgtaactttggtttattgtggtgttggttggtggtagctgtatatgttttgtataccatgggttgctattttggcagccttttttaatttatttttctttttatctatatctatcaaaaaaataaaataaaaatgacaagggtcccatgtatatgcccatgtcatgtccccctatttcacttgatgtacatgatacacatgcaagtatgagatctttgttggacacatctcttttactttggatctagttagtagacataacattacacatgcaagtatgagatccttcttggacacatttctcttaatttggatccagttggttgatttttaattgatttttttttttctagttgcaaccaccaaaaggaaggactttgttatgtgattttatgatgatatttagtctcgttagagataaaagggaaaatagaaagcaagtttttataaggaagtggattgagaaaaagtagtggaggaaataaaaactgagtttgcatgggtgttggtttggtattggcatttgacatattattttttttatcaaaaaaatttgtattattaaattacaaagtctaataaattttagatccatactggttcaattttgtaatttcaaaataaataaaatttaaatgcataaatccctatcctaattccactagtttaagattgggataataaattaaaattaaactgaaaaactaaataaaataaattgatcaaagagataaatacacaactttatgcatatttaactatatccaatatacacgcatataaaagttgtgcttcctaataataagtttatggttattcaaaattttaattagcaataattgttacagaaattcatataaaacaatattccatagtaaaaattgaaatttctaaaaataaaaacatgacagaaaaacgacaatttttttaaaggcctctatgccttaaaatgatatggcttgtattcgtagaaattgatattatggctgcaatgaacaaaaaagtatatatagctctaaataaggtatggttcctattaaaaaatattcctagcccaatcatattcaattatccatacccattgttgaaatcattttcacccaagttgtattataaaacttcagaatttgaagaatcagatacccacactgaaaccattgtagcataggtggttgcttttgttgcgcatgtgtgtaaatattctatgctattaattgtttggcatgaatggatgatatcaataagatgaataaatctataggctcacgtgggcaagtttgcatcttttgagaaaacacactttcttttaaatctttttcctatatctattttctttttctttttcaattaacagcctttttgtatgatttggatttgtttagtatcttttgtttgatggttacatacaagctgactgtgatcattcattttttttttcttttctgggatgattttgatttgtttaatcactttcatatgatatttacatacaagattaaatgtgatcattcccttggtagacatgatgccttctgcatattttttgacttcattactgctattgccatgcacatgttttccctccttttcttatatcaattcaacctgaagaataatgctgatcttctggatgtaagcccttgtgttgttgtggggtttttttattttttatttccttttttattcttcatgtctttgggtgaatattttatataagaattatcgtctccatctttgtatttatactatttcaaattctgttgcag

SEQ ID NO: 12410 - DNA, 17288 bp, Vitis vinifera
  Intron number 39 from transcript GSVIVT01028990001 (locus GSVIVG01028990001) derived from phytozome v7.0 (chr-ID chr 5; pos 10270840 to 10288127)
acctctgcccggttagcctctctttctgtctttctcatcatttggtttataggaattattaaggttcaactatgatggtgaaaataatttttaattgccatgatgaagttggggagccggtgtcaagagaaattataacatttgttgggctcatggaaaatacatgtggtcttggtcacatgattttcacttgtcccatgggatgacttttctcagcatgtgcaatatatatataaacaattgtattttttttatattgatggaggaatttacattgaatatatacaaggttcatggggaaaacaataaaggaaaataatccttgaatatattgaatatagacactattagctaactacataaataaggaagatattcctaatttatagccctaattttatctctaatttacaaccctttttatagcttgtataagctgtaaatttccaataaatcataatcagttaaattgtcaattttcacaatcaacgaagactccactggagagtatatattttccattcctagcttgcttgtgattttttgaaaagactaactagctagtacattggttggaatgtcaaccaactgctcctttgtcgaaacatatggagaacagattaagccaccatctagtttttccttgataaagtgatggtccacctccacatgcttcgtatggtcatgtttaacaagattatggacaatattgattgttgacttgttatcacaatacatctttgtacttctttctcatttgattctaaggtcattgagaataatttgtagccacaacaactcaaatattccatgaactatatatagatctaaaattggcctctgcacttgatcttgtaatattcgattgcttctcacttcttcatgtcattgaatttcctccaagttcaataacttgaagttgaccttctatttactactgattctacctagtctgcattattgtatgcttctaaggttaattctctatttcttctataaagaatttgtttccttagagtagctttcacatagcgtataatcctgtacactgcgtctagatgtatctctctaggtattttgcatgaattaacttaccacactgactgcatatgctctatctggcctagtatgtaacagatagattagtttaccaactaaacactaatattccccacgatctactacaacatcctctttggcctctctcgatctatggttctatttagtggaggactaaatacaatagttggactcataggttgaaagaataaatttttaaataagaactcagattcattgacttccatatcttcacttagtgactcctaaagctaaggatgagaaaagaaggattgatttctattgaaaaagagagagagaaaaccttaattctcattcatattgttaacttcttacaatagagaaatatatatacaaggttaggttgaactaactatcatatatgtgacctatattaagaaaggaaagaaacttgtacactataaatacattatactcaacactccccctcaagctggagcatatatgtcatatgcaccaagcttgttacaaatgtatttaatcctaggacctctaagagatttagtgaagatgtctgctagttgatcatttgaattaacaaaacttgtagcaacacaccctgatgcgatcttctctctaatgaagtgacaatcaacttcaatatgcttggtcctttcatgaaagattggattggatgcaatatgtaatgcggcctaattgtcacagactagctttatctattcatcttttccaaatctcaattcttgaaggagttgcttcaaccatatgagttcacatgttgtcaaagccatagctcgatactcaacttcaacgcttgatctagacacttcatcttgtttcttactcttccaggatattaagttacctccaataaaaacacaataccttgaggtggaacgcctatctgagggtgaaccaacccagtctgcatctgtgtaaccaacaatttgggtatggcccttgtcttcatacaacataccttggcctggtgttcatttaatatatcgaagaatgcggatcacagcatcccaatggttgtcacatggtgactgtagaaattgactaaccacactcacaggaaaagagatgtctggctgagtgatggtgaggtagttcagtttgcctacaagtcgtcgatatctcctaggatctcttggaggctccccctgtcctgatacaagtttgacatttggatccataggagtgtcaacaggtttacattctaacatacctgtttcttctaaggtgtctaagacatacttcctttgtgacataaccacacctgaactggattgagctatttcaagtcccagaaagtacttgagtttgcccaagtctttggtttgaaagtggttgaaaaggtgttgctttagtctttggataccctcttgatcactgcctgtaatgacaatgtcatccacataaactaccaaatagaatggaagacaactaggaagtacccaattcaaaatttaaattagccaaatggggccatctaactagatccatccaaacaaggtacaagctccagtgaaaggatgattcgaaatcagttggttgtagtggagagaaagattttccaggtgaagtctgaagattacaatggaggaaaatggctttcaataacagagagaagccgaggttttgtggtttctttagattttggagaggaagagacgggttggctagtggagcagttagagaaagctgtggagttggaggattccaggggttacattcgaaaaatgaggggcaagaccaggactcatctgatggaaatatgttttaatagcagagggtgttatatgaaaatcacagaatacagtgcaaagagaaaacctttggtcttagttgttccaagaggtgttaatggctgtgggtgggaaaacctcaggaaggtgattgcttcagtccaagagttatctgttcaagttgggagagaatcgaaggagacgcaaaacaagcttcgagagagcaaaggaatgtacagaggtgagaggacctacgctgaggtggttgcagagaaaggaacaaggaatggtgcagggatgccagttggaaaatgggcaagagcggtgatttgtgaaggcaaaggagatatacgagactggtgtgaggttggaaaagctatagcgagaagggtggggatgaaaggaatggtatccgtaacacccatttctgcttacaaagggtgtttttttgtggaaaatgcaaggaaagctcagtggtttcaagaaagaggtagttttacagtaagaggagaggtttttgctctgaggagatggtcgccagaagagaactcagtggtgagaggaaaatttagacgggggtggctggaactaagaggtctccctttccacctgtgggatgaggtgcagttgagtcatattttgcagcagtgggggagggtaacggaggtggcaagaaactccttgaagtttgttgatttgtcgaaagtaacattgcaggtggaaatgcttccaaaggtcgtgctcccagcgctattagaggtagaagatggagattggacatacacggttgcagttacagtcaccggagaagatgacggagaagacgatggaggagactctatcaagcctgagtcgagtcgcagcaaggacgagatgaggtcagccgggggttgcgtcttgcagaagccacagatggttgaggggctacgagctattgacaggaccagtgactgccaaagatggatgccccgtcatcgtctccattttagctcttcagattcaaaatcggctaagggggagaaaggaaagggaaggtgggtgtcgggcccaatggagggaagcaatgtcgggccaacaccagacgtctttgaagcccgttctgtttgggcccaagttggggcgaaggatgttgggccaatagcgggtccagcccataaagaatcttcaaatggtggcccagttgtatcttcgtcttcaaagctccaaagaccagggctctctgcaaagaataaagcgtcggaaggtcttcctcaagcgtcgtcaaagacgaagggatctccagtctccgtaaggcgcagagcaagaagtgggccgccgagttttgacgaggcgtcttcttccccgaagcgtagctttgaaggaggcggctcactggtgacaaatcgagacatttctcggggcaaatctcactccagaaagagtgatttctccactggtttggaaacatccaaagtttccaccggcgagacagagggggaagaggggattttgcaatgcaaactgatcaatgaggtgcgtaatcctatctcagctgtttctgagcgagatcttcctctgtttggggcttttgagtcgattcttattcccgaaacctcggtttctttgggtcatcctttttgtgtccactcttcttcttcgtatccggtggagtcaagccaagcttttcagcgtggatctgtttctatctctcctgtggtgtatgataaccatcgtggtggtgcgtcctgttcgaaaggtgtggtggtccccctagaaacctctaaccaaaaatctaaagaccgacctttccttagggaaattcctagcaaccttgaggtgcgtggtgactcaggtgaggctttgttccctgtgcaagaaccttccactatcccgttggaaggttttcaggttgaggggcttacgcctcggaagatggtcaaggttcagtcggttctggagagtttgagggttagcattgtcagggataatgggaaaggtgtggtaggagagaacaggaatcctctctctgcggacaaggtttattccagaagaaagaagaataaggattctggaactcgaggagaggattagttctgggtgcgggttgtgttgggttgtgattgttctcatgaagattttaagctggaatacaagaggtttaggttctaggaagaaaaggaggactgtgagaaggtttttaagtactcaaaacccagatgtggtgatgttgcaggaaactaagcgtgaaatttgggataggaggttagtgagtagtatttggaaaggtaaaagtctggattgggttgctcttcctgcttgtggggcgtcgggggggattgtgatcttgtgggattcagttaagttcaattgttcagagaaggtgttaggatccttctctgttactgtaaaattgaactttgatgaggaagggtctttttggctaagctcagtgtatggcccgaataaggcagtgtggagggaggacttttggttggaacttcaagatctacatggtctaactttcccaaggtggtgtgtaggaggggattttaacgtgatcaggaggatatctgagaagatgggtgattctaggcttacagtcaacatgaggcgttttgacgagtttataagggaaagtggtttgttggacccccctcttaggaatgcggcttttacatggtcaaacatgcaagtcgatcctatttgcaagaggttagataggtttttgttctctgcagagtgggattcttttttctctcaaaatattcaagaggcccttcctagatagacctctgaccatagcccaatttgcttggaaactaatccttttatgtgggggctgactccttttaggtttgagaatatgtggttgctccatcctgagtttaaagagaagtttagagaatggtggcaagagtgtacggttgaaggttgggaaggtcacaaatttatgaggaaactaaagtttattaaatcaaagttgaaagagtggaatacaagggtctttggagatttaagagagaggaaaaaacatattcttacggacttaggcagaattgatagaattgaacaagaagggaatttaaatcttgagctggtctcggaaaggatcttaagaaggaaggagttagaggatctgttattgaaggaagaggttcaatggagacaaaaatctagggttaagtggattaaagaaggggattgcaactctaagttttttcacagagtggccactggaaaaagaagtaggaagtatataaagtctctgatttctgagaggggggagactttaaataacattgaggttatttctgaggagattgtaaatttctttgggaatctttattccaaacccgagggtgattcttggaagattgaagggattgattgggcccctatttctgaagagagtgcaatttggttggataggccgttttcggaagaggaggttcgaatggcagttttccaattgaataaggaaaaggcccctggccctgatggctttaccttagcagtttatcaagagtgttgggatgtgataaaagaggatcttatgagggtgttttttgagttccacactaaaggggtaataaatcaaagcacaaatgcgactttcattgctatggtgcctaagaaaagtcaaactttcaaaatctcagattatagacctattagtttggttacaagtttatataagataattgctaaggtcttatcagggcgtttacgcaaagttcttcatgaaacaatctttggctcgcaaggagcctttgtggaagggagacaaatattggatgctgtattgatagccaatgaagtggtggatgagaaaagaaggtcaggagaggaaggggtagttttcaaaattgattttgagaaggcctatgatcatgtggagtggggctttttagatcatgtgcttcaaaggaaggggttcagccagaaatggagatcttggatgaggggttgtttatcttcttctagttttgctatcctagttaatgggaatgcaaagggttgggttaaagcctttagaggattgagacagggagatcctctttctcctttcctttttactctagtagcagatgttctaagtaggttgatgattagagctgaggaaactgggataactgagggtttccttgtggggagggataggactagaatgtccttgttgcagtttgctgatgataccatatttttctctaaagcctctttggatcttcttcaaaaccttaagattatccttttggtttttgggcaagtatctggtttaaaaatcaacttagaaaaaagcaccatttcaggtatcaacactaggcaggaaatgttgtctagcttgactttggttttggagtgcagagtgtcagagtggcctttgtcttatttaggcctccctttaggagggaacccaaagacaataggattttgggatccagtggttgagagaatttcgaggaggctggatgggtggaaaaaggcctatttgtctttgggagggaggattactctaattcagtctagtctgtctcatatccctagctatttcctttccctcttcaaaatccctgtatctatagcttcaaagattgagaagatgcaaagggattttctttggtctggggccggggaagggaagagagatcacctaatcagatgggaggttgtcagtagaccaagggagatgggaggtttgggctttgggaagacttctatgagaaatagtgccctcttagggaaatggctttggaggtttcctagagaaaggagcagtctttggcataaggttattgcgagtatatatgggactcatcctaatggatgggacgccaacatggtggttagatggtctcacagatgtccttggaaggctattactcaagtttttcaagagttctccccttttgttcgcctagtggtgggcaatggggagagaattcggttttgggaagatctttggtggggaaaccaaactttgtgtgctcaatttgctgaactctacagagttagttctgtgagaaaccttactgtctcaaacgtccttggcaactcctttccattgtcttggaattttaactttcgtcgtaatctaacggattcagaaattgatctccttcagagattaatgtcctcccttcattctgtgcttctttccccttcatcattagactcaagagcgtggtctttgtcttcgtcaggttcgttttcagtgaaatcttttttctatgccttgtcaaaagattcaaatcctttaatgttccttccggccaagtttttatggagctcaaaagtcccctcaaaggttaaggccctcgcttggttagtagcacatgggaaggtaaacactaatgacaagttgcaattgagaagaccctacaaagccctctgtcctcaatggtgcattctttgcaaaagaaatggagagtcgattgaccatctttttcttcattgtcccgtcaccattggactttggcacaggttgttcaatctagtaggtgtgatttgggtccctccaaggagcattgaggatatgttggttatttcctttagaggcttggggaactcagtaagaggcaagattctttggcaaattgcttgccttactttgatttggatggtgtggcaagaaaggaataatagaatctttgaggataaagggagaatggaagaggtggtgtgggatttgattcggttttactcttctctatgggcttcttgtactgaagcttttagaggagttcctctaagcattctacaaatcaattggattgaggtttgcgtttaaagagtttgaagattgttgggttttctcttgtttttagtttactattgttgggtgttttccttggttattgtgtaggaaggacctctcatccttcccttggtctttttctctttcttttgtctattttttctcttctgtatctgttcttttattaatataatattcttcgtttctgataaaaaaaaaataaactaccaaatagatgcactagctcgaagagttatgatgatagaaaactgaatgatctgcttcactctgaagcattccaaagtcttaaacaactgaactaaaacgcccaaaccatgcctgaggagactatttcaagccatatagagagcggcgtaacttgcacactaaaccagactccccctgagcaacaaaatcaggtggttgctccatatacacttcctcgagaagttcacatgaaggaaaacattcttaatatccaactgataaagaggccaatgacacatagctgccatggagagaaataagcgaacagaagcaatcttggcaacaggagataaggtgtcaccatagtcacaaccataaatctcagtataacctttagcaaccaagtgtgccttaaggtgatcaacctgaccatcaggaccaactttaacagtgtagacctaatgacatccaactgtagatttactaggaggtaaagaaacaagatcccatgtgccattggagtgcagaacagccatttcatcaaccattgcctgtcgccacccaggatgagaaagtgtctcactagtgctcttaggaagagaaacaaaggataaagtagagacaaagatagaataggatgaagataatcgatggtagctcaaaaaattataaataggatgaggattacgagtagatcgattacctttttggagagcaataggcaaatggtcagtagatgacagggctggggtaggagaaatcggtgggacaggaggtgagtcatcaggttcctcagctgaagagagaggaggagcaatagcacgatgtcgccgatgataaatctgaagaggacgagagaacgcatttgtagggggggatatatagggaagtggcaatacttcaaaaatgggaagagatttagaggatgagaagaatggagagtcctcaaagaaggtgacatcagcggagagaaaataacgatgagtgtcaggggaataacaacgatagtgcttctgaagtcgagagtatcccaagaagatgcatttcatagccttagcagagagcttgtcctgtctaggtgtgagagtatgaacaaaacaagtacagccaaagacacgaagaggaaggaaataaagaggttgggtaggaaaaaggagggaatgagggatttggttatgtaatatagatgagggcatacgattaatcaagtaacaggctgtaagaacagcatccccccaaaaacgaaaagaacatgactatggagaaggagggtacgagctgtcttaacaagatgtcgatttttacgtttagcaaccccattttgttgaggagtatgagcacaagatgactgatggaggatcccatgttgggacataaaagaagtaaagggtgtagaaaaatattcccgagcattgtcactgtgtaacactcgaatagaaacattgaattatgtttggatttcagcataaaatttctagaaaatggagaataatttagcttgatttttcattaaaaataaccaagtacatcttgaatagtcatcaatgaaagtgacaaaatactgaaatcctaaagtagacgctgtcctacacggaccccaaacatcagtgtggacaagttcaaaatgagactctgcccgattattcaaatgctttgggaacgagacacgagtatgtttcccaagatgacacgactcacatgcaagcgacggcaaagtggaaaaacgaggaaccatcttctggaacttggagagactaggatgacccagacgattgtgaatgagaagaggagcatcggtggaaatgcaagcttcaggagatgaaggtgatataaggtgatagaggccttgagattcacgcccaatgccaatcgtcttccccatacttcggtcttgcaagatcacagatttatcagaaaaagtgatagaacagttaagagtgcgagttattttgttgatggaaataagattaaaaagacactcaggggcataaaggacagaatggagaggtagggaagggagaggatgagtctaaccaatacctttagccatagtttgggaaccattagctaaagtaacggtaggtaaagtagaggtagtagtaatagaggagaaaaggtgtttattaccagagatatgatcagatgctccagaatctagaatccacgggtcaagagaaggagactgagtaaagcagacagagacattaccggtctgggcaacagaagtaacagaagttgatgtggctgcctgatattggagataggcatcataatcactaccagtaagggtgatactctgagatgtggagctcgcagcggagtcaggtcgagatagcagaggatcagatgactgagcaatgtgggcagtgcgaggaggccgtccatgtaactgacagcaacgatcttgagtgtgaccaagcttattataataggtgcactgaggacgttgtcctcgaccccgattgccactacgtcctcctcgagagttagtctgagaggctaacacagatgaatctaaaggaccatcaatcgacaaggtttgagtagaggagaggcgtaagagaatagtgaacacatcatccaatgatggtactaatggactagcaagaatctgatctaggacagattcaagatctggacggaggccaatgagggttaactccataaagaacttgtcaatctgtatttgttgagctttagcaccattagtgaagggcatcaaagttaagaactcctccttaagagacgcaatccggccaatataagcagacagatccatgtcctactgtctcacatgaacaatatcaaaaaccatcttataaaattgttgaatatcattcgtgtataatcctttagcctgagtccaaaatttaaagcaggttttgtaggcatgaagatgatgtaaaattttgggatcaacagattgccataatacgctgcataattgtgcatcgattttcttccattgcactttgtcaacatcaggtatagcatcctcaggtgtaacaagatgatcctcataaccttttgtcccataaaccaaagtttcacggacgctgaccaggagagataattctcactaccaatcaatttttctgatgtgatagtaggagattcagagatgacggatgtaaaaataggatttttagtcgacatatccacttcacatgagattgaatcacgtttggatcgaagagagccctaaagggaggttggatcacagctatggaagaaaaacctggtatgttgggacccaaacaaaggagaaaagtgattggagatgaagaagaggccttcccaaggcacacataggtctcggccaaggaagggagctgccgttggaggccggaggaggctgaaagaagacccacggaggctgaaatgccaaaaaaatagagaagcagggttcgaagaggactgacggaggcttagaagtgcaagacggcgccggatgagcctgttggaagaagctcggcaccggaaagtgggtcatgcgccctcacatgccggcgcttgggattcaggttgctggagaaaaagggcgtgggggaggtgcgtgagtgggtttttggctccggtgctttgagaaaagttgtagatctcctctttgtgctcttgatgatgtggtcggtgtcggaaaaagtcgctagaaaagtcttcggaaaaatgttgacggtgttgagggttttctaaccacgatatggctgactggaaaggtttgggagatggaaaaggtgaccggaatgaaacacggtcactggacggattcccagaattaattacacgggtaaactagaaagaataaagttttctcccttggctctgataccatgttgaaagagagagagagaaaaccttaattctcattcatattgttaacttcttacaataaagaaatatatatacaaggttaggttgaactaattaccatatatgtgacctatactaagaaaggaaagaaacttgtacactataaatacattatattcaacaatttcaatggaagtgacatccatagatagttatgaagaatttcctaaattttggatgatagcatttatatcatttctttgtgggagaataaccaacaaacacacactttagtgctcggggatcaagtttgctgcctaatgagaataaatatgaagatatgagatacactcaaatgttttaggaggaaactaatcgaacacatgaaaatcaaggtagaactttgaaaaaaaaattattggattcttactccctaaaactttagaagataacttattgataaaatgagttgaagtccaaattgattctcccaaacatgacataggaacattcttttgaaataacaatgcttaggttacctctaagagatgattgttctttcactctaaatgtcgttttgttgtggggaatcattacatgaggattggtgtgtaattctttcctttttaagaaatgattccaaaacctaattgaagtattccttcccatggtcagacttaatatgcttgatttgaacaccaaattgagtgtgaatcattttattaaaaacatggaacataatgctaacatctgatttatttttcatatgaaataataagtaaaggagacaaaccatcgagcccttgaaacacttggaattcttgatggaaccaaaacatcagtatgtatttattgaaagggactagatgttctatttttacttaaaggagatgaaacatgatgaagcttagtaagttgtcaaacttcacaatgaaagttactaacattcaaatgtttaaacaataaaatgcatatagttttttaacaaagcaaaaggaggatattcggaatgaagatgatgaaactgaacttgtactttattggatgagatttattttgacgaatgagtgagatacatggtaaccattgctacttccactttcaaggtagtagagcctctttaattccttagcatatccaatcgtcttccccatgacctgatcttaaaaaatacaatgggatggaaaaaacattgcctaacaattcaagtacttagtgagctgatgaatagactattgactgaccaaaagcctaggaacatgtagcacatattttagagtaagagatgtgagaaagtaaaggctatgcttaattaagaaaaacacccaaaaggggggttgaattgggtttttcaaaatcttttcaaacacaacaagttcaagcacaatataaacaaaaataaagagatagagttagagaattcaaacgctggttttatagtggtttggcactttcttgcctacgtccactctcctcaatctcctaattgagtgagggttccactaatttgaagcttcaatcaagcttccaatcttcttacacttggattccagctccaatgtgctcttacacaatctcttcaagattcaaacctcttgaagactttaacactcagcttttacaagaatggatccttcaacctagcttaagaatagcttaaatacaagacaaagctaggatgacacacaagagtgcacttaaaggacatgcaagtgatgatttaatgcactaagaaagaaatgagagctttttggtcaagaacaagtaggtagacaattgattgcaagtgttctcttatcaataaatgaagtggagctctcaatttataggtttctaagctcaggatccaaaaacagcaaaaggtaaccttgactggtcgagctaggggtcgaccggttcactagccgttggagtatttaatgcttgataggttaccattgcctcgaccgaatctcgaccgggaagagaataacctcgaccgggaagggaaggctactgggagagagagaagattttgggcatccctcgacaggacctcgattggacaagggcaaccggtcgaccagttccccaaccgattgagccgattggccatagcctcaaccggttgagtcttttggccctaaaaacctatctttttcaattcctttcttttctaacactgaggcaaggtctttaggtggattattatgccaattttaaaacattttgcctaaggtacatttgttaaaacttgggttttaatgaaatcgaagttttaaaggataaaccgagttttctaagttgcatgaaacagtatgaaaatcctaagtgcactcatgcattcatcttacattcgtttcctatgatcacaagccttccaaaagtctcgatcttgtatccatttggtcctttgatgaattttcgagtttatgcctgagattattaaccattaaaccaattagtcacttaaccatggtttgttatcatcaaaacccgattaggagaacccttgggctaacaagataatatgaagtaaacaattccttgaccagtcatggtagctaatataccaactaccactttgattttttgatttcctagacatgggttataagaagtagaccagtaaaaagagttgatcatgtgatcagtagcaccgtagtcaattacacaagcactagataaacagtcttttgaagctctaaggaaaaaagagtttgagtacttctctgagtgagccaatgaatacgaggcattaggcttttctagagaggtcaagaagttttgaagtctttctatttcttctttgtttagtcctctactatcagatcttttgtaatttgaggttttatggttggatttatcttctagctgggctatatgtgcctgtttttccttctgtccagcttgccaatttcagttattattgcccttctcgaaggattattacttcccataaagtcttctacaatcctcccttgtgtgtcttggcttcttgtagcaagtacaccatactctatctttgttattctgtggtctaggggcctgattctttccacttctttctccagtagccactccattattctgttgattggtatttggcttgactacatcaagagttgatccttctcttggtgaggcttctaacacaattattctcctattggcttctgcccttgcaattgagaacacttcattgagggaggaagtgtctcttctcaagaatttacactcttaacttaatcatattcaacattcaatccaacaagaaattaaaaaaatttctccctttcaacaaacttttgtagcatgagtgtatctgcactacatttcatcttgaaactttgataataattcaactcaagccacaaactttttaaggtatatagtactcaattacaaacaaagtaccttgtttgatggatgaaaattttattttgatttcataaatctgagctgcatcttctatctttgcttaacggcctcccaaatctcctttgtcgttgtgagaaactgcaagtctcactaatctccggtggcatcaaggtccaaagctaagacattatcattgaatcttttcatcccatgcagcaaactttgggtcttctgggcttggtagctgtccaactaaatgacttaacctcccctttcctttaaggaatgccttcacaagggagagatttggacattactagatatttcatacatgttgagaaagcaaacaaaaccaaagagaacatgggaaaaccagcaatgaaggttgtatttctctatgtcgattttggcaatgaaggccaagaatcatttacagtgaaagtgtgtgtgtgtatatatatatatattgaatgtagacaccagtaataactatacagaaaaggaggagatccttgacatatatgttccaaattttatcattgattatagctctagtttacagctgcaatgaaggccaagaatcatttacagtgaaagtgtgtgtgtgtgtatatatatatatatgtatatatatgtatatagatatatatattgaatgtagacaccagtaataactatacagaaaaggaggagatccttgacatatatgttccaaattttatcattgattatagctctagtttacagctgcaatgaaggccaagaatcatttacagtgaaagtgtgtgtgtatatatatatatatatatatatatacatacatacatatatatatatatatatatatatatatatatatatatatatatatatatatatgtatgtatgtatatagatatatatattgaatgtggacaccagtaataactatacagaaaaggaggagatccttaatagacatatatattccaaattttatcactgattatagctctagtttacagcttgtataagcttcaaatttcaatcaatcacaatcaatcaagctgtgaatcaatcactgtttctctggaaagcattaaaataaatttgaaaaggggttgctgtgttcctttgtggtgtggtttcgtttggtggcaattgatgcatcagtgacttaggaataattgaaacaacaaaccatgtcttgttattgcaagtatttactttagtgcaattcttgaatttcatgaatatttgggaaatattcacaatattagaagaaagtatgatttttatttgaaaatttgatgctgtctttctctctcacacacgtgttaatgcttgctgcatcagagcctaagtgttcaacagctttatagaat

SEQ ID NO: 12411 - DNA, 8754 bp, Vitis vinifera
  Intron number 6 from transcript GSVIVT01021057001 (locus G SVIVG01021057001) derived from phytozome v7.0 (chr-ID chr5 ; pos 14375948 to 14384701)
aagtggaagcaagaagaaaggaaggaaggaagtgtgtagaaaaattggtaagttcatgtattcaaaaggtctcccattcaacactgtgaatgatccttattggtttcctatgatagatgctgttgcaaattttgggctcgggtttaagcctccatctatgcatgaattaaggacatgtattcttaaagaagaggtgaatgacctaagtatcattatggaagatcagaaaaaagcttggaaacaatatggatgttcaattatgtcagatggttggacagatggaaagagtaggtgtcttatcaattttttggtgaatagtcctgctggcacttggtttatgaaatcaattgatgcttctgatacaataaaaaatggggaattgatgttcaaatatcttgatgaggtggttgaagaaattggagaggagaatgttgtgcaagtcatcactgataatgcctctaattatgtgaatgctggaatgaggcttatggaaaaaaggagaaaattgtggtggactccttgtgctgctcattgtattgatttgatgttggaggatattggaaagttaaatgttcatgttactacactatctcgagttaggcaagtagtgaagttcatatatgggcatacttgggttcttagcttgatgagaacatttacaaaaaatcatgaactgcttcgtccagcaattacacgatttgctattgcatttcttactctccaaagtctttataagcaaaagcaagctcttatagcaatgttctcttcagaaaaatggtgtttaagcacatgagctaaaaaggtagaaggtgtgaaaactcaaagtacagtgttgtttgatccaaatttttggcctcatgttgttttttgcataaagaccactgttccattagttagtgtcttgagagaggttgattcagaggaaagaccagccatgggttatatttatgagttgatggattcaactaaggagaagattgcatttaattgtcggggtgtggagagaaaatatggcccaatttggagaaaaattgatgcaagatggactccgcaacttcatcgacctttacatgcagcgggttattatcttaatcctcaattgcggtatggagataagttctttaatgctgatgaggtgaggaagggattatttgaatgcatggataggatgttggattatcaagaacgtttaaaagctgacattcagttggactcatatgaccaagcaatgggtgaatttgggagtcgtattgcaattgattctcgaacattaagaagtcctacaagttggtggatgcgttttgggggttcaacaccggagttgcaaaagtttgctattcgagtccttagccttacttgtagtgcttcgggatgtgaaagaaattggagaacatttgagtcggtaatacttctatttttgtaaatttttatacatatacttctatgtcaatgttagagaaccttatttcattttaacacataaatttgatacttttattatttgtagatccatacaaaaaaaagaaatacacttgaacatcaaaggttgaatgctctagtgtatgtaagatacaacactagattgagagagcgaagtctacaaaggaaacaaaatgttgatccgattttggtagaggagattgattcggatgatgaatggattgtggagaaagaagatcccctcctcccccttaatctttgttggcttcaagataatgagttattcagtgttgatgccattagagctgtgtcatcgaactcccaagagactgaaacatcatcggatcacatggtttcttcacattcctacaaaaggaaacataatgaagtaccaagtaagtactcaaaaattgaagtcataaatttgattaaatttaataaaaaaaacttataatatttacacttaattaattctttatgctaggtacaagtggaggcaaaggcaaagagaaggagttgaatttgacaccaattgatgaagatgaagatttacatgaaatggggatacatgatagtggacattttcctactattgatacattggatgaggatgatgatgaccttgaggatgaggatttaagttgaaacaattgactctagttgttattttatgacttagttatggattttttgtaaaagtttagaactattattatggttgactctattttttatttcatgacttagttatggttttttgttaaagtttgaaactattagtatagttgaatctagaatctattttatgactttgttatggtttttttgtgaaagtagggtactagtatgcttttttttttttatgattctaatgaattgttttcatgtttctatttatgctattttattttatatatttaaaaatattaattaattatataatgtgaggctcaaaaagcttacgcctcaacgcctcgaggcttacgcctcgcctcgcctcacaaacacaaaaacgtatcgccttacgctttcgcctttaaaaactttggtcctattagggaagagagttaaaagagtctataaaggaaatctgagaaccagaattctaatataagtttttagcaactattatccttcctttgagggtgcaaatgccttctttctggagtgtgattgcttagtgtaccttatgtgtgattgtcaaggatgtttctttttattccttttcttttgtttctttgatttctcatatcattataaaacaaagaaacaatttctatagtgctgaaacttttatcatcaccaaatttgatatcagagcctaaaatagcactatgataactattttttttttatcaaaccactatgataaccataggtggtctaagttttaggtgatgatttttctctgcatgattatggggaaggttgaagggagcatgtgtgttgggtagaaagcggagcaacgacttggttcaactctctctcctatcttgaaagaccttgaactactctcttagatatggcaaatgatgtcatggagctagattggcatgagagacatgataaacatggcatgattggtgatattacaaagaaagtatgtgtaaagtaatagattttgctggaaaaattaatttacagccttttcagatttgttagctaccttggagaggtactttgattggtatgatatgatggataaaaaggcaggttcaatttgctattatgaaactcattaaacaagttcaaatttagtgaacaggtgaggtgaacaagtctaaaattttgggatagccatgaaatattcattgagttgagatgaaatagaagttaaaacaaaaatacatacctaacttatgattagcaagatgatttttatgattaaatgaccactcttaagaaaggagacatgataactgatcgagtatatggacaagtttaaggagctgaaattctgtataagttgaatatccatggcaaactctttatcaatttaataccagattgagggatgaaattcacagctaaatggtaacacattgtctctatgatgttgacaaagtgttccaattggctttgaaggtagaaaagtatctgcaacagccactaactagaaggttttctaccctagttagggagtacaagtactagaaaatatgatgaaaatgggagagcactgagaacaactacaatgtaggctggccctaaagttaatattgcagctgattcaaaaaatagagcttctacgatgatcaacagctagacaacaaagtccgttgctttaaatgtagagaaaagggaactatgcatgacaatcccaaaaagaaatttgtacattgatgccaagacaagagatcacaagaatgaataatgatgaagcggatgactcctcaaatgagattagggctttgctatctttgcttacatctaaaaaggattacagttgttgtttacgtgtttgtatccatgcattaaacaagagtacaatcaaatgcaagtttctaatacctagatttcatgatatcttgggtacgatggcaggttttacaatcttctcaaagagtgacatgaagagtggctacagttaagtacatataaaggcttggagcaccatttcatgaccattataatggcattaggtgcattagagagatcaaatgacataaccagccactcatggagaccatcctttatcatgaccctcataaaggtgttaggtgctaggtactctagccctttattggttgatttcttgttatttattttgattccataagttaaagaagggttacatttcacatttacaacatgtgaagcctatgagaattgaacaaataaagaaacgtcaagattagaagctgaagaattttgttgaactcaaaagaagcctatgcttgttcttaataagaaaaaagttcaaaaggtagaataaggaaaatggtattttttatgctatcctagccaaggcccaaagtaaacaaagatctaacccaataccaactgacgaagtgccttggaagagtccaagttgctgtttaatttttcaaatgttgcagtggaggatttatccaatgtgctgccaccaatgtgtgaagtttaatataccattgatttaatgtaaggttctcaattatctaacctaccaacatgtcatattaatctattagagcatgcaatgtttaaaatataagttgagttacttttgaatgggtttatttagtgaaagtcttagtccatgtattgtgctagctttgcttgcacctaaaaggcatgacaattggcacatacgtgttggtagctatgcatttggttactatcaagtacatctttttagcatccaagtggtaattatgaaaaagaggtacatgagtatacataggcgacatctcctcaattcctaactaagctcctcttattgttgtccccaacccttttgatttacaaaccaaatgccaagtcagctgaataacatagaatggaatgcctttaaaggcgtcagtacaagagggccagatggagggatagaagtgaagtagataccacaaaatctctataacacttttccttaaagatcataacacttctctctcactatacaatccaaggcattgtgagaaaagcgatttgccatgcaatctaggattacctcacctaacttaatttctcttcctcatttgacccacaaattgatgatcaaactgaagttaattgtagccatggtgatcttctaaaatgcttagtgatggccatgttggcaattggaaccgattacttcccatgaccaaatttgcttgtgttgttccatatatggaccatagggctcaatcctcttgaaatttttattggtttgcaaccttgaaagcccattgatttaattccttttccttcaaatgcaatttgctagtcacgtgagggaggttcataatgaaatatatgagagcattgcagttggctttgaaacatacaaggcttatgctaatctcaggagaccttttgatgaattcaaggatggggatatgacaatgatttctataggacttgagcattttcaaatgtggttttttcttttttgatcaactacaaaagacttattaattttataaaaggtaaatgagaaggatgaggggtcctccccacaatatgcaacaaactaatctaagtatgagtaaactcctctactatgcaaggagaattatacaaaattgtttagtcgacttaaggatatacataggtgacatctcaattccgaactaagctcctctcattgtgtccccaacctttttgatttatgaacaaatgttaactaagttgaataacattgagtagaatgcctttagaggcattgatacaagagtcctagaagaaggaatagaagtggcatggatcccacaacatctctactgtattccacttttgctccaagatcataacatttctttcttgtctcccaaacctaaggcagtatgagataagcgatttgccttaaggtgttgcctttgatagaactccctaaacctttatatgaaattgtcatcatgtcacacatagtcgagggtggcatctaatctatcttggctagactgaataacttgtgtcatagccttatattgttataggataatgtagaaaaaggttgttgattgattgtccactccccatgcataagatgcaccaatcaagactaagggatttgtaaggtcttctcaactatggcatttcatttgtgttatcttcttgtgtgccactaaccaaaacaaatgtcttgaccttagatgagacttttgatttccataaaaaattgtttggagaaaaaggaattggttatataaattggacatgtttaaagagaattattttatttagaataaatttgaagaggataaagatcaaactcttgtgtgcatgatggatagagacaagtgcacaagagtgagagaggacataaatctttcaaggttctcaattctcaaatcagtgaggttgcaatgaaaattaaagttccacgaaaaagaagaagagttaccaaggacttgtgatatggtgaggttttttattgtaataactctataaagacttgaatattgtgaaacactgattttcccaccaaaaattaattcttgcccgttacccaaatgaaagcaggtgtgtgaagaaaaatattagaatacttgtgcaatggccttctaagtacatcgatgtgaacatctgagcaacatgttggtatcccatcctttagaatgtgtctcataaatacttgatgacctaatgccaaagggtgaaatgttccttaaaccccaaacctttaaactcctttggtctacacgctatgtcccaactgataagatgatattttttacccttctcagtaccaaacccaagaaaattcctttgcaatttctcaatctttaaagctattgatgttgtaatcttaaaaagagataagaaatagctagggatgtgagacaagcatgactaaattaaagttattctacccttaaagagcaaaaagtttttgttttttttccacccatccattctccttaagattctatcaaccactagatcccaaaatctgcttgcctttagattccctcttagtggaagacccaaaaaagataaaggccaatgtgagactttacaatcaagcattgagaccaacttggggaccaaatcctaacttgtattgatgccaaagagtgtactcttttctaaattgatcttaagccctgatatttgtctaaaaactcatataattaacaaggttttgcaaatcttccgtagaggctttagaggaaaaatacttgaagaggctgatccccaaattcaacacaatagtactcaataggattccatgatgagctgtgtagccaaggcctaaagagaggagagagaatgttgactcctatagtgtttctatgcatctccatttgtctaaaagatatctgacatttatctctagccagatcactaaagaatggtgaaaatggccattcaccagagaaccttgttcctaatgttctccaaaccctgagaaggctagtcttcacaactgcagcactcttaggaggggcctaaaaaaccattggaaattatctgtgtcaaaggaatatagccattgggcaatggagaaataaatcaattctccataactacaacacattatacaatggtgaaggcacaaggctttggaatgcctcctcaactatagcaagttattagtattgatctttttaattgtcaccagccagccatgctgaagcctttactttcatgggggcttttaaaccatgccttataataaaataggcaacctaaccagaacatgcacagttgttttgtttctaggtgccaaggaatgaaaatttgatgattctaaatttagatcttatattttcctattctttgtctgcaaacaagcagggcataaatctaaattgaagtgtgagaatgatattatgtcatgcaactcttatgcaagcctacagttgaatcttgcttagtgggcaagatttaatcagagttgaaataagatgtgcttagtttgtgacattgtcttgaggttaaatgagaagtctaatcttacatttaagttgaattgtgagacagagattagtcatgagattttctattttgaatgggtctagaaagctcatctttgatagctctccttggagatgattggatcgaccacatgcatttcccctagtttggtttatgttgtgctcttttatcctgatatcatacttttaactcattatttatagtcttactacatttatcttggtgttgggctgttgcatcaaattttattcacatttgcccatgtaatctaatacttcaaaaccagatggttaagtttgcagcaggagttcagatataaatattaaaattatgtatatttgtctatggaaacatagatttgttctaccaaacacatgtatgtcatctcctttgaagtcctttaaagctgattattggaaattataggcagtggacttttgccatgttatttggctaaacttacattgttccctggtcatgcaaggtatattcccctttggccataaaattctattgtgagtgtttttctcgtgcatgttgcatctctttcttgtttgtagttattgttcctgggtagtgtattgcaagaagaatctcaagcaacttttaactgccattatttggatgccacattgtagggtttatctcagccactatttcatcaaagttttgctaaaaatttatatatttgttgtttctacctctcttattacagtgcatatcgagccttgtatattttaaattggattt

SEQ ID NO: 12412 - DNA, 10321 bp, Vitis vinifera
  Intron number 7 from transcript GSVIVT01010463001 (locus G SVIVG01010463001) derived from phytozome v7.0 (chr-ID chr1 ; pos 20793744 to 20804064)
ctcagggaggccacggtagaaaagcataagtattggtaatattcatattaataatctgagtttatatttggaagatccaaattgaggtatagagaagggatattatttaaaattaatcagcttgaatcctcaaaattattagggagaattatgttttgggggtagatgggcccccaaattaacaaaaggtccatgtaactcttcaaattgagcccaaaacccaatgaaagtatggaaattgagttgaaggatatcatccttcagtatttccaaaaatgccctttgttgattttgagaaaaaaaattaatatttttgaaaaatacttttatttaatttaatattttttatttaatttaatattttaaaaaaaatacttttatgtaatttaatattttttaaaatacttttatttaatttaatattttttaaaaataaatttatttaatttaatatttaaaaaaatttaatttaatattttttttaaatatttttatttaatttaatatttttgaaaaaaaaaatttaatttaatatttttgaaaactaattttatttaatttagtatttttgaaaaaaaaattattgaaaaaaattatttaacttaattttataaaatattttatatatgttcttaaagggtatatttgtccgttactatttcatatccttcaactcaatttgaagacttatatggatcttttgttaatttaggggcccatctatccccaaaagataattctcccaaattattattattattttaattatttttagtccttttctcaaacctagtttttttccccttcaatttgaattatggaaagtgcaagaaaaagagatttttttttttaaaaaacatcttaaatataataaaatttatttaatgagtgtgcaagaaaatattgctactaaaaatattttaaataaaaatactacttaacgcattcaaaacgtgtttgatagtaattttaaagagtgtttctaatttttttaatactcataaacgggatctttcttttgtatctctgcaggttactctctttgacaggtgtagggctcttaagatgacaagtggagggctctctaggagccaaatgctgcctccggttggttgttgtggaatcagattagtggagttgatggacaatcagaaggtgacacttggagatggtacgtttctgttatggaggagcgtatgagagggggggggggcgggggcgggatgggatggcagagtagggttgctttttggaggctggtggagagatatttggaggggagaggtgagtgttctagagctagcggggtttagcttgggaaatgagagatattcaagggtttttttttgggtgctggttggagatttttcagagggaatattggttcagtttggggggaaaggagcaagctgctggagggcaagttttgctgagggttatttttgtgtgaggaaagagtttgagggtaaggaaggagccatagtctggagaagagatctttgagagggagtctgagctgaacgcttaccggagacagagcagggagttgcaacccaagacacctagttgaaaaagaggcttccaggtatggttgttatggctttcccgtgcactttcatttatcatatctcttatgtctcattctctgtgattattattctgtttgttgggttgctattgctttgatgtttattagtttaatatttgaagagcttgctgcatttttaatgtcttaccccatcaaacatcttccatctcaacccattgattgttaagctcatggataaaataatgaaatgggtttagcatattcattaaaaggttctctgttctattcctttgctcctttgtttttccctgaaagagactatcaagctttaagactgaatctggggaggttggttgatggagaatgatgatggtatgaagaggagattgacagttatgagatctgaatctgaaagtgcctgcatgaggtggattgccttattacttcactgaagaacagatacaagaattgcttgtttcctttggacccttgcgtggttatgatcttgtcaaggatagagacgcagggaactctaagggatatggtttctgtgtttatcaggatccagctgtgactgacattgcttgaacttaccggactgggatattagcaatgccctggctgttgcttttggaggaattgtatatctatgggatgcctcagatgatatctacctcagagtttgttcgtgcttgaaggagaaagtggccttatcataaatgtcatttggattcttggaggaagatctattgctatcaactggaattactctgatgtgcagccatgagacacaacagccaatcgcctgctgagagctctgaaaagtggctacctatcaaaaggggccctttagtttggaatactcacgtccttacaactggagagagtgaggtcaactagcttgctgaaatcaacaaggttctgggcacttcaacaagagaggagatgaaatgcatggaacccatctgtacagagttcggataacctcctctaccattcatcccctgtacatgacaacctttactatccaccaaacctacccactaacccatttcgtctttcatccatcatgccttctctcctcatgcccactacccattccataccagaataatgggtcaaaatagccttccgctgaaacataatgttcagaatggcctacttttcaaacaattattcaaactagcccttttgagtccacgtcagcatacaaagtaattttttattctttttactttttactttcccaaacttcagctgcattttttcttcccaatcccaaacttccatccgagctgctctcttcccccgtgctctgcatgtggtttttccattaaaaaccctagccccaccagtgggccattgagggacgttgaaactacaacttccatccgatctgctctctattcccagcccgtgctcatttttccttaaaaatcctagccccaccagttggccactgagggagcgttggaggttgaggttagtgttaatttttttcagatttgagcttttttttttatcatgtgttgttagtatttttatttttcccattggatgctgagaaaagtggaaaatgagaatgaaaacagaaagaaaaaaattcttgatttttcccgtttctcagttttgatttagggttcttgaaatttaaatccaatggcacaacagcaaagagatccctaaaacggatccagaaaacacagagagcaaaagaggatgaattttggtaatgtccaaattttcgaatctgcccaggcccgtttactctaggaaccaaagacagaatggtcatagacattaccaaatcaacaacgctcagtagaaatgtacaggggcatgggttttgcatggattttctcggaaatcaaacgaggatgaatttttgctgaaatcgaatggggcatggattttctcggaaatcaaacgaggatgaattttcccggaaatcgaatgaggcatggattttattgggaatcaaaggggggttgcaaaaaaaaataataataacatgattagattagtacctgcgaggattgagagtggcagagtgagagagggcttttttagggattctcccggctggagggcaacttcagaaaaggggttcttcatgcccgagtgagagaagtgggtagccttttgatttttagatttaatagagttaaaaaaaaaaaaaaacaaatcatgagaacaattttatctcatcttaatagaatatattataatttttaataaaattaaagattaaataaaaaagatattaataaaaataattttatcatattattattatgaaattttcctgtggaattattattatgggtttgctttggtattggtacatcagcttatcacttttcctatggaattaactgaatttactaaatttatattaatattactaaattttcctattgatattaagtaaattactaaatttataaaatatttatatatttgaatatttaaatgaataaatgaatataagaattaaagtttgaaggtgtagtagagtcatttttataaatatatcatatttaaatacttcacttttaaataaattttataaaatatagtgttatttatttttattttcatattttcaattgctaatttacttaatatcttgtttttgttaaaaaatattatttaatttcataacaagtcaacataataccacagttatgcgtgatgttcattaatcaattatcaaatttcaattagaaaaatttctctttatttatcaaaaaaaaattcaattagataattgctggcttttgaataagacaaggggacccaccctagtaattgttaattattcaaatcaaaagggtagttggttggtttgaaatttgaaactttggaattggaatagttgttttattgtttgttttttatattgattggaaaaatcaaagtaaatacttaataatggatgataataatataactattgaaaccttggaacatcttgattcacttgaggtaagctaagttgctaactagtcatggtttcactttttatttatttttcatcctgcttagaactctttgacagtgttaagttcatcaagaaacttattgtatcatcatgatcattatgagccattcaaaagatgaaaatacgtactttcattgacattaaatttcatttgtgatttggttggtgatcttttgaatgctgtgattacattttgtgtgtaattgattgcttgatatttgacaacactaggatggttttctataatcaaataggcggactaggacttcaatcttttgagatttaaggagaagaaagataaaattataatagtagggaaaaaataaaataaaaaataggaaaaaaaaaagataaagaagcaatcttacaaacttacataggccctaggagtctcacttagaagtaaaataattaagtcctaccatgaaaattgcaaaatttgcacccataaaaaaataaaaataaaaatctttggatcatcaatcatcatccccttttacatccattagccttatttataaagttttagaacccttaaaactaaaaaaaattatggaaagcaaacctaacctatgtagcaacttgttaggactattgttcatttttgagaactcctaaatctttgaaaaataaaatcaaaaaaaaaaaaaaactccctttttagaattaacatcctactttatagaaacacatttgaataaaatttctaataacaaagacttcaaaattctgaagatcaaattagaaacttaagagaaaagagattaatttataaaatagaaattttagaaatattgacacttcttttaagaagaaagtttcaataaaaaaacttttcaaattatgaatacaattcaagtaccaattttttactaataacattaaaaaacgccaaatctgcaaaattacctaaatgcactttatagagtaatttaggatttcatttaattcctttctttagcaggtattgtcaattcatccacgtcactgtttcactttctttgtattatttcttatcctcaacctaaatttcagaatatttgtatcttcatcttaggtagttctcgtattggttgattttttttctcattacacatttgattttgtggggatgctaatctatggttgattgtgtggttaggaggtaatagagttcactattcaaaatatgtatattctaaaaattattccttagcttgtggactagggtggatttcttgcaattactaaaatctcattttttatttaaaataatatatttaacatatatttattttaaaaaatatatttaacagataattttgagttgtaaaagaattaacataattaacacatatttattttaaaatttaatttttaatataaaaatattaatttcattttatcaaaaaaatattaaaagttaatctcatcctaattatgaaattagaaaaataaattaaacgtgtttgtaacccaaacacatgtaaaacattttattggaccacaaaaataatattaattcataatatcatcctactctttacttatacacttatttgcttatacattgctttcatttgagttgaactgggtatttagacatgaagctttgttacattccaatatttattaggtttattattgtattttatgaatcattgaccataaagtattattttttacttaaataaatataattttttttatgtaataaccttttgttattatttatgtgaaggcgattatgactgattccacagtagaagtgctatgttattggaatagaacaattttgaggacagaaacggacttgagatatattggaaataatgtagagattgagcctatagatgtgcccattcatacgacctttgtggagttgttgaagatgatatatgatatcattggtgttgacagagacgatcaattagtcttgaaatgtcgtcatccaactaaaatgaacaaatttcaaccattagtggtgagaaatgatcggacaattgcacgtatgctactggtgccatcaaagtatggaatgtcttcagttcaattattcatagagcaaactcccaaccattatcatttgagtaatgaaatgggtcatttgacacgattatcaacaggtgatactgatgttgatgatgaaaatgagagagatgagaaagatgatagagatgatgcaatcgacacagatgagattcatttacctaatgatgatgaaaattgttgtcaaacggaaaatattgatttggtgatggtccaacaagttgtggaatgtgaaagcacaagatttgtgaaccttgaagttggtgataggtctaataatcctgaggttgagtttgaggttgaaaacacatcactagttgcctctccacatggtacccaatttaatatctctaatgacaacctacaggaaacatttgtacccgtttcataccatatgccacctacaccacaatttttaaatatggacgcggcaattaattgtgttgtaagtgattggactccatggaaaaagccaactttaggaaatgttgatggagaattatcaattggccaaatattttcctcaaaatcagatttgcaacatgttgtgaagatgttttccataaaggcgcaccaagagtttactgtttatagatcaaatgcaagtgtgttagttcttcaatgtaaaaaagcaccacagtgccaatggcgactaagggcaatgacagtgaaagatacgggtatgtttagaatcacaaagtacaaaggtcctcatacatgtgtcaatccatgtattaatcaagatcattcacagttggattctagctttgtatctaagtatattgaaacattggtgaaggtagaaatgaccattacagttggtgcaattcaagttgttgttgcggaacaatttggttaccaaatttcttatcaaaaagcaatgaaggcaaaaaagaaagcaatgactcgattatttggtgattggtacaagtcttatgcagagttgcctcgtttcttccttgccttggagcagtcaaatcctggatgcattatgtattccaaaatggttcctagaaacaatccgaatgaagaaatttttcagtgtgttttttgggcattcgctccatctattacagggtttgcacactgtcgaccagttctcagtattgatgggacacatttgtatggaaaatataaagggactttgttgattgctatgggatgtgatggcaataaccaattgtttccacttgcatttgccattacagaaggagagaatacagatagttggagttggtttttggcatgtatccgagttggaataacacaaaggaaagggttgtgtctgatttctgatcgtcatcctggcattatagctgctgtcaataaaacatattcgggatggactcagccagatgcttgtcatagattttgcatgcatcatttagcgagtaatttcaacacaaagttcaaagataagactttaaaggatctcatgtgtagggctgctatggagagtaaagttaaaaaatttatttctcacatggatacaattggccggataaatgccgaggctagaaattggttagagcaaattcctcttgaaaaatgggcactctcatatgatggtgggcggagatatgggattatgacaactaatatgtctgaagtttttaatggcgtccttaagggtgcttgtaacttaccaataacagctttagtccaattaactttttatcgggttaacagttacttcacagtcaggcgggagcatggtgccagtcggctcgcttcaggtgaagaattcactccacatattgacgccaagataaaggctaaagttgttaaggcgggtgcacatgaggttcttttgtatgatcatgtggagggacgttttcatgttaaaactagacactctgttggaagcagtaataggaaaccttgcacatatcatgttaccattcaaacggggtcttgcacatgtaacaaaacacttttgttaggattcccatgttcgcacattcttgctgcttgtcattgtcgagcaattgattttcgatagtttgtacaaggttattacaccacacgtgcttacctatcaacatgggctcccttgttttatcccatatttgatgagttggagtggcctcaatataatggaccgataattgtgccttcagactcaatgaaacggctaacttctggtcgaccaaaatcaagtcgtttgcataatgagatggatgcaagggaaactaggactccacaaacatgtggactttgcaagcaatcgggtcacaatcggcgttcttgtcctaatagagaaaccaatgataggaggagttgatgtacttcatgaacatcttattgtactgttttttttttaaatttactagtattgaccttaatcgttttaagatatatgtagaaactatcttatcaaataagcacgaattaaattccgaataatggaatttatggaattaattcatataaagataaacgagctttggtgaaggccccacatatgtgactgatcgatcgattgactgattgattgatttgattatcatatatgattgatttatcctgctctctgacatgcatgctattattctttaattgtgtactaaccctctctcttgatagtgcatggtgactcgttgcccaggtacgtacccactttccctctgattgttgtctgtgcatgttctgattcttatatgtgcatgatcattcaagatattcattgatttactcatcaattgtcatgtcaacttcattttattagtagagacccgactttagggacttagaggggtgctatggtctttatcgtaccttctcgataagtaacctgacccctgaacctgatccgatttttcgtaaaccacctttttcaaaagtaaggagttacacttagggttttcttttttttattttgtttaccctttaataataaaacaaaaataagtggcgactccaagtcatttttctaaacaataaaaatcattttcaaataaaaatcgagctcgccatcgaatggaaagtgcatgagccgaaatgcgggatccacatacttaaaaaataaaaattttcaattattaaaaagtttagaaacacttcctagaatagttattaaaagcattttattgtttccaatttttttaatacttaaaaataaaaatttcttaatgttacaaaggttagaaatattttctaaaatcactttaagtgtttttatcatttcttaaatgatacaaatttttaagtgttcaaaaaatttgaaaacacttccttaaattacagctacacagactcaatcttcaaatatcacatttgtcttcaaatcaattttcccccttttttttctgctaataagttgttttcttctctatttttcaatttttctgacttattttatagtttggactggacctcagccattggattggcctcaaaacaatcccagcccaaccaaatcgagtccactaaaatctctcgcaatagacataaaggtgataggcatatattaagggaaaatgcgatatctatttttatttttagtaattttttaataaaaaatgagagtaagaattaaaaattcgctatcatataaatcaaaattcattttttcatcattttatttccattctgcaataaataggaatggaaacaaaaatattcattctcattcccaatttctgagtgccaaacaaccccttaattcactctcgttctcattcctatcctaatctacagtgcattaataattaaattcctacatggcatgcaggagcctg

SEQ ID NO: 12413 - DNA, 13726 bp, Vitis vinifera
  Intron number 2 from transcript GSVIVT01013917001 (locus G SVIVG01013917001) derived from phytozome v7.0 (chr-ID chr1 6; pos 6727122 to 6740847)
taattggtcgggttctgatccaccagcgacatctggccggaaaagggggagagacagtgagactgaagagagacaacaagtggagattaaggttttaaagcaagaagagcccttgccggaatctgactgcacactggcggcagccagtaatgtattgggggtttgtcccttaactccgtcaaattggacggccgtctgggaggagggagacatggagggaatgttccatctgccaccgttaacgccgttatcaccccatccttggatagcatattctcagcttattgtctgagtcgagggtttaccataccaaagacatccaaatgtaactagaattcttatatactctatgaacagtatattgaatatgtttaaatcttttatggataataaatctcacactcttcctttttaataccgtccaaatcaattatcacaaaaatacttaattgagggtttaattaatagaaactaatgtacataggtttctttttgtctaatttttttttttgtgttccttaaggagtaaacctgataagtatagaatgtcatcttgttttgccacttcatttcattacaatatttttcagaaatttctctcaataattttggtaattagttttttttttaaaattttaaatattttgaaagaaatggtcgaaaaggagttcttttgtcttgaaatccgaataatattcattaaaaaaagtgattcttttgggaattcatcgaaaggggtgtttagaattttaccaattgtggagatatctagaaacaatattttattattattattcttcatttgaagtagactcttattctttttctatattctttctagattcaaggaataactattcaatcgcaaataaaaaacaaagaatagattcataggtttgataccttgtaataaaactcaggtttgatagaactatgagattgagagtcgacaagtgaattgcgttcattaacaattcatagttgaacaaaaaaattgacaaaaaaaaaaaaaacaaagaaatcgttcatttcccttctatgttttgcatctatagtagttttgtcttagtgaatctctttatcacttaataaaagtttggaatcttaggttactaattgatggaatactaggcaatcagaaacttacgtgaatcatatttaagaaaagagtactctaaatttttttatagaattagaggaaatcttgttgttggacaaaatgataaagaaatgcctagaaacacatctataaaagctttgtataggaatccataaagaaacgatctaattgatcaagatgtacaatgaggatcctatctatacgattttgcatttctcaacaaatataatatgtttccttattctaagcggttttttctatttcgggtaatgaagaacttcgaatggcctttggaaagtaattagacaaaaacaactcctcaaattgtatcaaaccatctaagttacatcttgagtagtcttgatcatatcccaccaattgtctgcttcatccctcaacatgaaggaagctaaagaaactctcatttccttaggaactgccattacatccaatattttctttatttctttcaaccaattctcagcttcaagaaaattagggccacctcgaaatattggaggagtcagtgctttaaattctcgaattaagcttagattttggtattctgaactagcaattggatttattatagtccttccaccagttccattaccatgagatagtggagatgatctagttgattgtctgggccttgttgttaatttgttccttgctctaggcattttgtcttagaaaggtacacaagggttagattatcaatacatcacagtataagggttattcattaaatcaagcatccttaaacaatacaattaaatcaattatgtcatatacaaacattctgaaaactaacataataccaactataccgtagtaatggattctcaatgatcaggaattcaaacaagcaacatgatcacaattatcatagctgggcatactcacaccaatacaactaagaatgtcatcaacacaacaaagatacaaacctaacattcatcatttaacctttcaccttaatatcaatatatcatacacagtaaaagagtgtaacaataacaatgactccagtgcacctattaggctccccacctattgtccacaataggcatctaatcccttatgctctaataccaagctgtcacactctgggtttcaaacttaacaattgatactcaaatacaacatcagtgctttcaaaaaaaaaaaaaattggggatacaaaaatttaaatgctgagtttctactttattttttgtgcaaaaagagaatatggaaacctgttataaagaggtttacatcctgtattaaactttgtaactattagttaacaaaatatgatatgtttcacaaaaagaacttatactacattactttacatataccaaaacctcatggttcactttaggtggcccatactacaagtgtacatgacaaatatacattacatcattccttcaaaaagattttgtctttgtatgatacaaaggcaaagccttaaaacacttttaatgggagcaaacaacatccaatcaacagaaaagcaacgctcaagcattatttccagcataggtattctgacttgcatctaaaagtggaaagtgataaggtgagttcacaacttagtaggaaagtttataaccatcctaagcatacccttaaaaaccttgaaattaaacgtataatagaatgcatgataaacatttataaccattaacaaatatgcaataatgtcaaacatatatgcatgtgtttgctagtttcatctctccttttcctcatccattatttcacaaatgataaacttctaacccctaacaatgtacacatcagatatcaatgttccacaagatactcggtcaatgtaataatatgactattttgggataacccaagggcaagtcataccccatgtcttctaggactcatacccaagggcaggaccaaccccttgtctttagggactaaaacccagggacaggaccaactccattcacccacatcgaagtgtcttcctcgagggctttagggactttcacctaaggacccacgatcccacataaataatatatcaatggatagggtctgcaacttcacataaacactttccacatatcaatcaattctctagatatcatctatcattattccatatccttcttgcaatgcaaccacaccatgaaccatttcctcaatactgaaccatgaatcttcataccaatatacgttctaatatcattgtaacatttcaatacaacaaactgagatgcactgacacattaaaacatttcatgaatcatagaaatgacatggaatttcaataaatctttcaaggaaagaaaccaagattcaccatggaatgtcataaaattccctaccttacactgactttccctttgtgattcttctatgcagacgatctttacctattacaaggaattggaatgaaacaaaataatttaggtttcctaaccatgaaaatttatacaattaaaactgttaggaatattaggctaatccaacctatggtaatcaccctagaggggggggggggggggggtgaatagggtgatggtctctttttgcaaatttaaactatgcgaaagtaagagacaatttatatgcaagtatataataatcaatataaagacaattgcatataaattaaagagtagggaagagagaatgcaaacacaagagtttatagtggttcggcgcaacccggcctacatccactctcttctagcttcaatcccaagcttgaggttccattaattcaaggcttccaaaccaagccttcaagctatacaattggattatggttccaattcaccctcttggacttttggctccaagcaccctttacacttctcaagagatatcccactgttgaaatacttcctctcgaaggtttacaaatgaatgatttcacaaaaatcctagcacaagaactttaagctcaaatgatacaagaaaactaggattgaaaagtgcactaaggatatgcaagttttagaacaatggtgcactcaaaaacactcttccaaggctcaaatataatcaagaaatatttgagaagattaaactttttaaacaatgaagattggagactttttatagaagagaaaagccaaactagcagtttgggggttcgaccggtcgagttaggggtcgaccggttgactagccgttagcatttaatgcttggtaggtgaccgttaggcctcaatcagaccttaaacggacctcaaccagacctcaaccggacctcgatcggacctcaatcggttgaacaaccgttttggaagaaagagaaagttttttgcaccattgatcggttgagctgagggtctacccaagccttgactggttgagctgtgggttgacccagacctcaaccggttgagttgggggtcgacccggacctcgaccggttgagcttgcggtcgaccggttcctcacccggttcaaccggttcctcacccggttcaaccggttgagccgttttttggctcaacaaccaactttttcaacttaaaacctttaaaaacaagtttgaaagacatttaacacaaggttttagttgaaaacatgaaatcatccaattcttaaaatatttaaaacaaaataactcttggatgattttggtgcataagtaaagaatgtaatgcatgaaaatcctagtgtaccaacaaccttacaaagagatcttatgaagcttgggtcttgaaaaacacttctctttgaggtggtcttcttcttcatgatttctccttggcttgatttgtctttgtgattgccattttggaaaccgtcttgcctaatcacactcgaaatatagtcattagttctaaaccttgttttgttatcatcaaaatcaatattaaccaaaccttggtttcacaatctcccccttttttatgatgacaaaaccaaggttgctaaaaagctccccctgaatatatgctcctttgaatttagaaaatattcaagtttagaaacttcaaggagtatattaaggatgctaaaaaagatataatcaaacataaatagcataaagagcaatttagcaatttggcaagacattttaaacatgatgcatgtaattataaccaataaagcacatagcatcaatatgaatagaattattgctaaaacaatattgacatttcttcccaagttagcaacctactattatttctctcattttttgtcatcaacaaaaagtttcaataaagtatataaggggaatcacatgatatcaaaaatataattcctcatgaaaaggaatctccccctttttcatttgagaatagtttccaaataaaagattgttcatccttagagcattcccaatttaaagaatgatttggaaaaaaaaaatatggaagaacatatgcaaagatatataacatgcattggataatacttttagggcatacaagcatatgatcacttaattttacctaggtataaaaaagtcttctttttaatccaaacattggtttaataaatataccaattttatcaaagtgataccaaatgttatattaaaaaaatataccaagtgttagcaaaatgatatttcaaattaagctttagaagggataccattaccaatattatcaatgcattcttttcaaggtaagcatatcctccttcttacatggatccctacaaaacaaattatcctttggtacccatatcttcttgggtcctagagggttagtctttcttccctttggaatccaaaataatttagagttttgaaaaacatgaggagattttcttaagatacaaatatcactaatgtgacctccttttttacaaagattgcaaatagttaaaggcgaaaaactagaggcttcctttacaaaattttttttttttttttaaaagcttattggctagcctctttttatcaaaaatgcatttttgatttgccaaattcatatcaaaagtcttttggctatttgagaatttttaattccttattttccttttcaaaagagatttttgccttctcaatgttttcaaaattttcattatgttcattgagctcattttgaagacaagaatttttaaaatcaagtttttcaagatcaaaatataatttttgaagtacatattgaaattcgaaatggttagagttggagtttacctcatcttgatgttcttccaaagccataaagcacgtgttggcatcctcatttgtgcattcttcttctatggagtctttatcactttcactttcactctcttcctcttcatcatcatttattgaagccataaaggctatacttttcttattttcttcaactctttgatgattgtacaattctatctcataagtaatgagtaacccaatgagttcttcaagtgaaagcttggtgagatcatttgcttcttgaatagccgtcacttttgtttcccatttctatggtagagaccttaagatcttcatgactttctctacttcggtgtaggtctttcccaaggcttcaagttcattcacaatcacaatgaacctagaaaacatctcaacaatagattcaaaatcatgcacaaggatattgattctagactctttaacttgattgtttccctcataagtgttttctaataatctccaaatttctttagtcgacttacattgccaaatacgattaaattcatttctatcaataacacaatgtaagataaaaatgactttggcatttaattgaactttctttctatcgagttcatcctattcatgcttaggttttggaaccatcactccattttctaattttgaaggaatgtggggaccatcttcaatgatatcccataaatcaagattaatagattggagaaaccaagtcattttggttttccaatagggataatcggttcccgtaaaaagtggaggtcgggtggttgaaaaactttcaatgtgggatgagcttgatggattagccattacttattagacggttaagtcttaaacaagaagtcttgctctgataccaattgttaggacctcaggcgctaccaactctcctaaaagcaattgttgttaggaaaggtgcataccctcattcacccaagcgcccacgatgaacataaggggagttgatggacgcggccaaccctccgatctactaacaatagcttgtaggaccttagacgctactaactctcctaaaagcaattgctgttaggaaaagcgcataccctagccttatagtgcattcacctaagcgcccacggcgaacataaggggagttgatggacacggccaaccctccgatctgccaacaatctcccccccagcgacacccctggggtttgaacccgtgacctcggctctgataccaaaaacttatgacattttcttttcttactaatttttaacaatttactgttgctaatttttaattctcatattctctaatctacatacacgggttttcaaatcaaatttgaattgaattaaacaatctttacaatgcatagtaatattccccatttaattactaaacactaattgttttgattttcctaaagcctaacccattaacaagtcccaagtgtccaaataacttaattaatctcatgcttgactaatctatttttcaatcaaaccaaactaaacaaagatgtatgctgatatttccatcaataaaatactcaagttaaaacactttaaaccttaattaattctgatttataactaaaacatatttctaactaattacactcaacttttacataaactttaccattaatttgtttcaaaatatcattaggaacccaactataccaaaattactaaattaatcaacttctttacctcaaatctttactttctctctctagattctctctctaacccaggctactgcagagacaaggctccaaaacgaggttgcaggctccaagggtccccaagcagctaagcaagtggtggcaggccataaggctgccaccaatctcaactttccaaaattactgtttaatccttcaagttatccaatattaaacctacagttgccttttagtcctttaggttttcataactctaatcagcccctaagaacctattaagcaagcttaagtcattaactaatcccacttaaccttactccatatttaattcataattaaacaagattaacactaaactagttttaacatctaattaagcacatttaaagttaagtactaagataatcattattgcttatttaattcattagtattgggtattacatgaagtaagaaagaaggcacacaaacatgggaaatgaggcatgaagcaagattattcaagtttgcatggaaatttagaactcaaaatctagtggcaacatgtactttgaatttgaggtgacatttttccaaagtccattttaggcaagctatataacattttgaagttcaggaatttaggaatccaatacttcaaatgatgcataaatcggagctgaaacgaggaagttgtgcacgtttaaagtaaattggttagaaaagaaagtcgagttcaaaattaaaaacttgaattcaaaatggtttttggccatttaaaactcaaaggaatgcaaggaaagactaagtttgaatcctactacctatttcaagcgcgtattttgaacccaaaaacatggagtttttgcatgggcaatgagtgagttcaaaattcactgtgaatttcgaactcaccttgttgatttcgaattggtccaattttctcctacttatgatcttaaaattgatttggaactcacccaaattttaaaatcagtcattgatgttgagtttaagccctgagacatgtcgaaacgagtttcaaatgccttcacctaatttaaaatgctttatactcatatagaactcataattttttaagctttttaggttgttcatgacttttccttgtaataagtagccaatgagagtgtgtcacatgttagttcattgatgatactatataaactctctcagttctagggttttggcatcttagatcttccacgggtgggagtttgacattttatgaggaagaagacgagaactttggcttgttttcttttcttctttattgaagatattgtttttagcttcttttgattcaaattatggatttttaccctattatgaattgtgaatgcgacatcacctccatgagaggctaaaaggctagattgaggcttggagcatgaaaacctaagggctagaaactcataggaacaatgggtaaattgttataataatgagaataattattggttaggttacaatttatcaattttttttatcctattcttgtgagttagtttaaggaatgatacggtaggtaataacctgatactagtgattcttgataactcttgattattagttatcatgatcttccctatcgttatttgccccaaaacaaaggtactataacaagtaggaagggttaaaaagtcaaaccttaaatcagtaatcaatcttatttattttatggttttaggaatttgttttaaaaaggaaaaattaggtttcggatacaattttgagttatagagctcaagttgatcacgagcggccaaggatcccaaaaccgtaagatcactttacttaaaaaaacctttgttctctctattctataacttaagttagattatggaaagcccaagacttgaatcaattgaattaaaaatcgatattcattttgttattaatttagttcttctacttagtttcacttcattcacatattagctttcactttaggattgaaataaaagtgattcatttatcctagtattgacaaatttcataagtcaatctctaaagacgatacccgaggtactacaaaagtcatagtgactctttctttggtttttcttgaccagagttgctatataaaaattattttggacaatagagaagatcattaattttccttcaccaaattttcatcctcttaacttttccacttcacctacattcgaagatcacctatttgaggttcgacacccaactcaccatttttttcttttttcttttttaaaaaaagttacaactacaccctacacttagggaattgccattttatttatacatagtatagtgtggttacgacactaagacttacctttgtggccttagcaaaatcaatctttccactactaggagcaatagacgcatcaagatatcctatgcctctcttgtctccagtagatttctccttactaatgatttcattcaaaatcttagttctaggatagaagatctcaattttagagggaacctcttttctttgttcttcaatttctcaagatagaacattatttctctcaagttgaaatcaatgttctttctctaaaaatcaaaatttttcaagagaatttattttctcttcttttaacacatcatgcttagtttttattgatttatatgcaattgttatcttgttgtatttattcaataacaattgatattttttacatcaattttcaataatggaggcattttcatcaaatcactatcactatcattgaagtaatcattatcataaacaactaaagcaatgaaaccataataatcattttgattattcatattctcacccaaattcagattgactcttacttgactcaaaatcactccaagtcgtttccttgacttccttatttttcttgggactaactttttccctacacgataatcctttcttgaaattatttacttcaagtgttaatgactctttacttttataacactcataattttctttttccaagaagacaactttattgaaaagtgacaatctttcttcattcaaattagcaattatttcttgttgtcttttctattcaaggtacaaagattcacaaaaaaattctttcttcttgagtgtttttattcaatagctagttgattttttttatgcaattgttctcaatcataaaaaactttttcacacaagccaaaaggatatttttttatataaaaaaaaaatccatgaaaacaagatgaaagataggaatataagaaaattttgatttgtaaatttcttcatactttgataacaattgaaagtttatagatcttgcttatggaatacccaaaaagtggtgaatagatgtttgatactttttaacccaaaattaattatttttaactttatcttttgatatagggaaatggaaataataaataatgcacaagaaacaaaaccaccaacaaagcctatcatctcaaagattttgcaaatgtaaaaacgatggagtcagagaccatagagctataatccactaaatataaagaaaaaaatacacaaatttacttgacaattgctactctctaagacttacacccaataaactatacctaatctcactttcatgacatattactatgcttgctccttagtggaccctaatgccttaaggggatgtgaatattcctcacaagcctaaaaataaaaatcactaactttttgagagttttagattaagcgcaaagaatactaacttaaagtataggcacattcgttattaagagaacgttcccaatatgcatataaagagaaaatctagtagacttagaatcaatttagaaatcatattttaccacaaaaaccatttagaaacttaagaatttttagaaaattttgaaaagatttcatattttaacttcaaaaagatttagaaagattttttttttttaattcttaatttgaattcctttccaaatttcttatttatttttttaattcttaatctaaatttatttttaaattaattttatttctaattttcataatttcactctatgtcttttaaagtcattattatcatttaactcaaccatacttacctattgaataccaaattgattctatagcaactttaaatcttaaaaaaagcataaatcatacgaaagtacataaagtcctaaaccaatggatgaaataaaattatcaaattaatataaatagcctaatgcactaaaatataaataaatatattgttattgtttattgtgcaattcataactttataaggatgcatgatcatagagacctataattaaagagtatatgatgagttatccttatttatcatccaatagcatacaagtggaggaaaatgtaatcctcagctgcattctatcgctcacttttatgatgagattacttaagaaatatgcatgttaattaaacaataattgactccttttgaactttgtttgcattttcagttaatatttatagctaatttagagttaattggtaaaataacttttcatttcctttttatttgtgttatttaattatttattttagtttttattatttgtatcattatgatatactttatctatttttattttttttaaataaaaataataataataaattttatataaaatataagaactcttgtaaaaaaaaaaataggactttccattatattcattaaaattgctttaaattttttttaaaattgatattgtaaaattttttaatatctcaaatttggtataataaaaaattttcatatctcaagtttttattgttttatttttttatttaaaaaaaatcagtaacttttcaatataaatctttaagattacttgcattttataaataatgttattaattttaaaatatatatatatatataatttgttctcacttgggtgggttcaattaagggtgaggattacgatgatgcgtcattataatcgatccaaaccccaaagcgtatatagccttttctattggttgtggtcccttttgcattctaaagaaagcaccctctggtcgtctgttttgttggaggtaaaaaaaaatacatatacatgcatggtccctccacagattaaagaacgtatattcaaaccccacttttttcaatggaaagaagctccattcccccaaccaggaacctcgtccgaaacctcctctctctatctaagatgttacgcacaactctgttatatatagctccaccacacactctctttgcttgtttaatgttttaatacttcactatttctattcatatggcagaagaagcttcatcactgcacctcatccaccaactactcctctccgactttcaatctttcgaaaatttaaatgatccatcccaaacttcaacctctgattcgagtatttccacctcagatattattccgctctctaattacttcgatctccatgaagatgaaaacaacccctttctcctccactgttctacttctgctccgtctgggtttttccagtttgaatccaaatcccccaaagcttccagattaagtcgtcggcgacctccactcagcatctcagtttctcagccaaccattcctcagttgccggcggattccgattcaggcgacgtcaagcattataggggggtacggcgtcggccgtgggggaaatttgcggcggagatccgagacgcgaatcggagaggatcgagggtatggctggggacattcgagactgccattgaagccgccagagcttatgatcgagctgctttcgagatgcgtggttccaaagctattctcaatttccctcttgaagctgggaattggtcgggttctgaatcaccagtaatatcaggccagaaaagggtgagagaaagtgagggtgaagag

SEQ ID NO: 12414 - DNA, 4059 bp, Vitis vinifera
  Intron number 2 from transcript GSVIVT01036451001 (locus G SVIVG01036451001) derived from phytozome v7.0 (chr-ID chr1 4; pos 22177266 to 22181324)
ggaggctcagagagctgcaaaagctgcggcaaaaggtggagatggttcttctttgttttaatgaattaatgaaaatgagtgcatatatgacactggagctgatttgtgcaggtgtttatgttttatcctttttattcctgagtaggaagtagaggtttttatttcatatcacaacaaatgtggcttattaaacttcttaattcatgattgctaactcatagcagataaacttcatttgagatttgttttcttgttagtgttgggtccaagctttgcatatttttaggaaattccatgattccttttttgaattataggtgatctaaaaattttcagaattgcttctcctctttggcaaaatatcatcatttaaacttcttatcagtttgtgtttccaaaattcaaagtttttaattattttgatgaatattttttttgaaatttatcttccatttgacaaaaatggtccatgaagaagcaaagaaatgatgggacacttagtttaagtagtatgcaggaatatatattgttttgatgaatatttttgggatttcattttacttttgaccaaaatggcttatgaagaaatgaagggacacttagtttcagtagcatgctaaaagttgaaatcatgtttacatacacactcacacacattcaaatattgtatgtatgattgtggcttcatggttgattatgacactcttggcttaaatatgcaagtagcttaagaaagcagtcctgaaaattttttgtaactaagtagctaactactagaactaattctataatattcacatgttggtcatacacattggtcttacatatttaatcctactaatatttacatttcaagttgttaagcaatattagaattttttttaactttaatggctgtagaaatcatgtatttttaccttgtaaaacttctctagtctaatcaagtgagaaatcattttttctatcttcctttcttccgctcacatggtgttagagcctggaaagatattctaatcctttgctggaaattttcttttagccttcattgccacaatcctttcattaccattattttccttctcaatcttctctttctacctatttgttttttcaatggtggaaatttctaaaaaaactcctgctgaaacaacccaacagcctatccatcacccattatgatagtccaaccctccaaattactcttgaaaaacataatgttaggaattttcttgggtgttcacaagctatgcaacttttccttaagagttgaggaaagataaggtatttgcgtggtaccattaaggaacaaaaaatctcagatccttcttttacattatgggaagctgaaaattcttaggccatctcatggttgatactatgtgcaacttgagatcaataaaccttttctattcctttctaccgccaaagaagtgtgggatgcgggatctcggatatattccaagaatggaaatgtttctcatatgtttgaattgaagacaataattcaccatacaaagcatagagatctcgttgtggctacctactataacactggcagttttatggcaggaattggatttgcatcaacatttacagatgaaagcaccagaggatgtggtgatgctggcagagatgttggaatgagattgagcctttggatttttagtctagctcaatcatgagtttgatgagtttgatgagcatggcaggtttgtaagaagcctaaatgctactttttttgtgtttatcccaaagaagagaagagtagaagatcttaaggatgacgtggtgtcgggacactttgtgtgactctttcccctcgttgtatgccttggcggcttcaaaagaggcgtgggtagtggaggtttgggacacatcgggtgaggaggggagttgaaatcctcgattctctaggcctttcaatgattgggaggtggagatggtagagagattccttgtgacattacaagggaagagggtgattgttgacttggaggataaggtgctttggaaagagaccaaggatgggaaattttctgttaagtctctctatggtgcattggaacttagaattgcagtcccgtttccaaggagcatcatttggagcccttgtgttcctactaaggtgggcttttttgctcaagaagctttgtgggggaagactttgactttggatcaactaaagaggagggggaggtccttagctaatagatatttcctttgttgtgctgaagaagagtctattaatcatattctaatccattgtaccacgactagggttttttgggagttattatttgctctttttggtctgacgtgagtcctccctttgttggttagagagagccttcttggttgacatggttcctttgtgagcaagaagcgtaaaatgcatggataatagatcccttatgtctcttttagacaatttggaaggaaaagaagatcacctttgataatgaagagctttcgattcaaaggatgaaaaattcttttggttgtaatattttgtcttagactacgttgtttatgattggctagattctagatgagggtgggtaagtttttggtttccctttttcttttttgctcttgcctttaggtgcttgttgtatactctttgtacgctttgggttggcctttgggcgccctttattcattatatatactatctttctgtgctttcacctataaaaaaaaaaataaataaataaaaataaataaataaataaataaataaaataaaataaaaaagatcttaaggatgcctataagttttgtaggaggcctttataaattgttggccaatatactcaagaaagttttgggtaaagttgcatctgagtttcataatgcttttgtggagggaagacaaattctggatgtggtgttaatagcaaatgagattgttgattcaaagttgaaaaaaagggaatgtgggttgttgtgcaagctcaacattgagaaggcttattttttaattggggctttttgttagcaattcttgccaagatgggattcaagcaaaaatggctagattggattaagtggtgaatctctatggccagtgtctccgttttagttaatggcttcctcatgggtttattccgaagttttagggggttgagacaggggggcctctctccctctatctgtttgtgattgctatggaggcccttagtagtttgcttttgaaaacccgggatgtaggttttcttacgggttttaaggtagggggaagagagagtgagcttgaggaaatctctcatcttcttttcacttagtaggaagtagatcatagagtaattttgggaattgattagttgtatattagacttttttccctttaatagctgtacaaatcatgtatttatacccagtaaaacttctccagtcttttcaaggaatcgttttccttctctcttcctttcttcaactcacacaaatctctaatatggctatgttgctagtgataatataaataatagaataaaaatatcgaaagctttatgtatccacatgttactcgttttaagagtattcttttgataggcattactggttttgagaatatatataatttgcatgttcaatgaaattgtataggagaattctttggtgtggctcaaatgccctgtcattgggctcagacctcaaaagtgtgactatcacaagagatgcctcataccttgagggttcttttggcacctttcatgcaatcacttttcttcaagtgcttctatacagtttagactaatcaattcattttctagcttctatgttcagtgcaattgccattgatttttttctttgctttttttatttttattttttactttttatgttcttcaaatgaactgtagcctgtttaaattttaggtgcagcatgttatttagcattccttggagacactagtggtggttttgattatgtccaccagttttatttttaatgggatatggtgtttttttatcagcattatcaagttgtaataattaatctttatgtactcaatcatgatagctgaagtaagtaaggcacccattgctgcttctggg

SEQ ID NO: 12415 - DNA, 15166 bp, Vitis vinifera
  Intron number 2 from transcript GSVIVT01028484001 (locus G SVIVG01028484001) derived from phytozome v7.0 (chr-ID chr7 ; pos 8196411 to 8211576 reverse strand)
gctgctgcctctgttttgtatcctgcctacatctctctctctctctctctctcatacgcagactcgtgtacacattcacacatgcagaacttatacttgccaaggaatcctgctgttcatgaaataacttttaaaatggacgaatgacactattctattgatatttgaaacttaacgttataattccatggtgtttttttactcatgctttgtcagggtgctgatagttgatacaagggaagttattttgaatcttagatttttgtttagttggaaccatagaaaacaaaaacatttctttttcataagcaaaaaaatgtaataaatataaaaaaagaagttatacgccaaggtacatgagacttatacaataggtacaaaaaggcatcgccaaaaagagagaacacaaaaaaaaactcccttctttcgctagatcccactcaagctaaaaaaatcaattaaaggcattgggcttcttctagatcaaaggcggcctcctaggccatcaagccaggtggggcagataaaagttgccttcttgaagagccaaacaaggtggcttcaaagaggcaacacctcggtaattgccttgagataaacgcaaggcatagaggcggttgcctttgaccatgagttaagattaaacatacttagattataatttcattcaatccaacattggattaaacaaagtacaagatgaaatattatattatcaatcatagagataatgagatggaggactaccaatctagttttgatggaagtaatgacaattttaatttcaatgataactatgatgataatgcccaaagcttctgtaggatgttcattctcttattttgttttttatttggtttaaatgtctgaaaaatcagaatatgaatttaaataggatgaatatgatgtttcttatgacgtagggtataatatttaaccctttgaatgattattattattttgttaattttataagacattatgagggattaaaaaattaatactattgatttttgaagaaaagccttatatgggttaagtattgagtaggtaaatatatgtatatgttttattgccttactataatcaggctatcattttgtttttcgccttttgtcttaggttaaaaggaatcttatcgccttgatatcatctattacttgtgacaacactggcttcttctatgtataagctacccatgacctaagattgctaaggaaagagtagtttagcgcttgaatcgattgctgcttattttcctctttgattcctttccttcaaattgttcaaaaaatgcatagtggagcgactctccatacattcttacttttccttccctcaaagaagtcatgtcaacttaaaagaggctctttgatcgtaaaaggaaggacccctacaatgtcaaacaaagagaaaaaaagctatcatagtgcacttaccttcacgtagtgaaggagagggtgatctattgaatccacttcatttttgtgaaggaaacatctgttcgccattgaacaccctctcttttgaagttgatcctaggtcaacactttgccataactcgctacccaagtagaaaaaaaaatgtcacttttgattggactcgtgaatttcaaataatggtcacaaggaaggaatcacatgcattggctctagaatggaatataaagatctattagaaaagaccccattcctaaaattcatccataccactctatccccctcttccctcctcacagattttccttgaagtcttgagaaataacatctatattatctagctcctagtcattcaagtgtctagtgaagcaagaattccagtgaccacccttccccaaatcatcttaaacctccactacctaagtctctttcgacaatgttaagacatacaagaaaggaaaagccatacataagagtttgtcccattatctatccttccaaaacttcaccttcctcccgtttcccacttcaaaggatacttaatagctaactaggtcccatcccttcctattgttttaacaaaccgtaacttcatactcttcctgtactttgcatgaacaccaacctccctcttcccctccttactttattggaatgaatttttttgataaggcttgtccttccgaagcataagtctaacatcattttcccataagagccctattaactaaagagaggcttctaattcctaggcccctctttctcttctccttgcaaacaattgaccatttcaccgaatgcatcttttgtttttcgaaagcccctcctccccaaagaaagtttctttgaattttatccctcttcccctccttactttattggaatgaatttttttgataaggcttgtccttccgaagtataagtctaacatcattttcccataagagccctattaactaaagagaggcttctaattcctaggcccctctttctcttctccttgcaaacaattgaccatttcaccgaatgcatcttttgtttttcgaaagcccctcctccccaaagaaagtttctttgaattttatttagctttaatttgacctttttggatatgtaaacatggacatgaaataaatgggtaaactggacaaggtactttgaattagggtaagtcttcttctttcaaaatatattgtcttttccataatgataatcttctataaaatctttctactacactatcccaaattgactttgctttgaatggtgtagaccctccattttgtcccattggcacatgcttttctaagcttttactgcatcttcattgttggtcactgttgctcacattttcactattttcggatctcttttagagatatattttggagggattaggtggatctcgatcatgattttagtggccttaggtttagtttagaagtgttctttgagtttagtttagtttaggtagtttcgaagtgttctttgagtttagtttagaagtagtttagaagagttctttgagtttagtttagaagtggtttagaagagctctttgagtttggtttagtattcttttagtttagtttagaagtcatttagaagtgttagtttagtttagtttgaaagtgttttaaaagagctctttgagtttagtttagtttagattagttctttgagtttggttttagtttagaaagtaggttaaattagtttagtgagtttggtttagcctggtgagtcttagaataagttagagagcttagatgagtctagtgggtttggtttagaattagagtaagtgttagtttaattagagagttttagttagaattggattaagtgtgagtgaaggttagggagagttgtgtgtaggttagtaggttgagtgaaggttaggaagagttgtgtgtaggttagtaggatgagtgtaggatagggagaacttggagagcaagttatgaattctctagaaggtgggtcaagtagtgtacgatagggagagcttacagagcaagttagaaattctctaaaaggtgagtgaagtggtgtaggatagggagagcttggagaacaggttaggaattttctagaaggtgggtaaagtgtaggttagtagtggcttggagggcaagagaaaaacagtggtctccagagagggagagccttgagagaagatgtaagaagcttagagagaatgtgaagtcattttggtgagggagatctttgagggaagaaaagagagaaagaagggaagagaagagagggtagtagagaagtttcatggttatggtggattcacccatggatgaatgaagatcaagagaagtgaagccccatttgtgactaaagtgaagctccatttgtgacggaggagctgaattttccaagcaccagtttggtgctgcatgtgctggtctttaaggtatcattgttgaattctaaggcaccatctcggtattaaaattgttgaaaattggctctacaattggtgaatttgaagacatcaaggaatgctcattaatctcctttgttttgattcttatatacatgtttctatttcttcaatttctcttttgttttgaaatttttttggcatgtttagatttagatttggggggatgaaaagaccactattgattattgattttttttttgttaaattgattgattgttatcatattgaattgttatatggtttagtggattctatgtttttaattttgattgattgagatcattttttatgttacctaagaaagttatttgatatgttaatgataattgacttaaaagtctattttgaaattgtgattttgtttttttttttctttttaattttcactttgatatatcacttggtgcctttttatttagaacgctttcacatgcctacactaattttgtgttatgcttaattgtgaattttttttttcattgatttcttggtgatttagtaacatgtttagggtctttgaattaatctttgatgcatgtttagattactaataaagctagatacagctacatgttgatcttcacatttcacacacactaatgcacatatttggcttggataggtattctttacttattttgattcccttgtttggttgtgtttgtgaaaattgttttcaagactttcaaaatgattttaaggttttcaaaaatggccattctcatttctaatgccctcttgccctcttagttccataggctcaaaatgagttttcaaaaaacatcgatgctacctttttgaattggtatgcatttcaaatttgttttcaaaatgaattgtaattttttatgggaatgaaatttggacatggcttcttatggagttcttttatcatggaaaatttcattcaaattaaattaggaagtggcaattccctacacattcattttcaagttttaaattcttatttttgaagtaatagcttatttcaatgctttgttttgtattcttgagattgatatgtgaatttaaattagaagatgacatgtttgattcatgattgaatttttccctgatagtacaccctttgaatttaattttagacagctatatcactttatttgtattttcctagcataagatataattttatcttcaagtaccttgtacacatgctctgttttggacattctgaatgttaaattgattttaaatatgttagaagtgtgattatgccttggtgttatttttcctttgaaattgacattttaaagacatggtgttatttttcctttgtggagccaaaatagacattttagaattgtgattatgccttggtgtgatctttgaagtgtgattatgtcttggtgttatttttgcatacctaggtaggttcaaattcatcaattgtggagccaattttcagcaactttaatattgaggtggtgccttggaatgcagcaatagtaccttaaagatcagcacatgcagcaccgaattggtgcttggaaaattcatctcctcagtcaccaatggagcttcacttcgatcacaaatggggcttcacttctcttgatcttcatacattcatgggtgactccaccataaccatgaagcttctctactctcccctcttctcttctctctattctctcttttcttccctcaaagatctccctcaccaaaatgacttcacattctcttaagcttcttacgtcttctctcaaggctctccctctctagagaccactttttttcctctttttcctttttttatcttgtcctccaagccactactaacctacaccactttacctaccttttagagaattcctaacttgctctccaacctttccctatcctacaccactacactcaccttctagagaattcctaacttgctctccaacctttccctatcctacaccactacactcaccttctagagaattcctaacttgctctttaagctctccctatcctacactacttcaccaaccttctagagaattcctaatttaatctccaaactctccctatcctacactcatcctactaacctacacgctactctccctaaccttcactcaacccactaacctacacacaactctccctaaccttcactcacacttaatctaattctatctaaaattctctaattaaactaatacttaatctaattctaaaccaaactcactagactcatgtaagcccttaaccaaagctccctaacttattctaagactcactaggctaaaccaaactcactaaactaatctaacctactttctaaactaaaaccaaactcaaggaactaatctaaactacttctaaactaaactaaactcaaagaactcttctaaaccactttctaaactaaactaaactatttctaaactcgaacactactaaactaaactaaattaaactcaagaagttcttttaaaccacttctaaactaaattaaactcaaaaaacactaaactaaactaaaagagctcttctaagccacctttaaactaaattgaactcaaactaaagtaaactcaaaaaactcttttaaactacttctaaactaaattcaaactaaactaaattcagaaaacacttctaaactaaattaaactaaactcaacctaaattaaactaaacttaaaaaaccacttctaaactacttctaaactaaacttagggctactaaaatcatgatcgggatccacctaatccctctaagatatatctccaaaagagatttgaaaatagggaaaatgtgagcaacaatgaccaccaatggagacgcagtaaggctcagaaaagcacgtgccaagagaacaatggagctcctaaaggaagccctaaataagttgttggaagctccctaactctacataccaactctagagccaaatcctccatattagtcacaatcactattagtatcaatttacttttctcttggttaattttcagcaacacattagtacctaacttaaatgtatcatttgactctatgtggcctcacaaaagactaggatgttgttgatagactacagataggatagattcaccatcaccctaaaacctaacaaaaaatcaccctccccggccttctctgaaagactattgaacacctctattgccaaaacaaaaaaagtcgggaaaaagaggattcccttgtctcaaagtcacaatcctctatagttttgaaaaaaccttgaaggagtgccactaacaagtacaaaaaacattgttgtcatgatgcaccacttaattcatttagtccattttggtccaaaccctatttctttttatggataaccataaataaaaaaaaaacccaactatcatggttatatgctttctcaatgtcaaacttaaaaattataccactagagtcactcttcatcatataatcaattaccttattagctataaagtgttgtatcaagaatttgccttccctctacacacattttggaactcggaaacaagctttctcacaacccccttcaacctattagctaacattttagcaaggagcttgtataaaccacccactaggctaataggtctaaagtctttcaggccattcacatccattttttttcttttttaagtaacaccataaacataacattcaaccctttttcaaacttaccttggtcatagaattccttaaatagccccatcatgttgtctttcacaaagctccatttgaattggcatacatcataggaaagtgatccaaccttggagccttgtccctattcaaatctgacaaggccttaaacacatcctccttattgatagacacctctaatccttgagcaacttgactatttttaaggttttaaaagacatttcaatgacactaggtttccacttcccatattagacaacaaattgtagaaagcctgaaccatcctgttagataatgtatagttgtttaggttatttacttttccttttccttttctttccttactgtattgtgggtcccactagcatgtatatatatatctaagtccaatgtgtattctttacagtttttcaataagaataattagggattctccctttttttctctctctcttcacatggtatcagagtctagggagaaaaaaccctaattatttccggtttatccgtgaatccattctgaaaaatctttcagtgaccgtgtttcattccggtcaccctttccatctcctaaagcttccgatcaaccctcaccgccgtcggaaaaccctcaccgccgacgaattttccggcgactttccggcgaagtccttttctgacaccgaccataccatcaagtgcgcaaggaggagatcttcaacttttctcaaagcaccggaggaagaatcccagccacgcgcgtctcttctctggcggcttgaatctcacgcgccggcgcgtgagggcgcgtggggcattttccggccacgtgcttccacctccagcctcgcttgacgccgtctagccaccctccatctgcgcttgtgtcatctgagccctagaagtgcattttttgggtttttttgtctctgccggccctctaaaccgcctttccggcgacctccggtgacttcctctccaccccgagacctgcaagtgtcttaggaagtccacgataagccgtattatggttctcttcgatccaaacatatttcattcaccagataagtagatatggctactaaaagttcccctttttcctatgtcatatctggatctcctatgattacttctgagaaattggttggcagtgaaaattatttgtcctggtctgtctctatagagctttggtttatgggtcaaggttatgaggatcaccttgttacgcaggaggcggatatccctgaggttgacaaagtacaatggaggaagatggatgcacagttatgtagtgtgttatggcaatcaattgatcctaagattctgcatcatcttcgggcctacaaaacatgctttaaattttggaatcaaacgaaagggctatacacgaatgatatccaacgtctttataaggtggtttcttctattgtcaatgtcagacaacaagacatggatttatctacttatattggtcagattgcctctcttaaggaggaattcttgaccatgatgcctcttactactgatgttggggatcaacgcatacagattgacaagttcttcatggttcttatgcttattggcctccgtccagatcttgagaccgtccgcgatcagattcttggcagttcctccgttccatccttagatgatgtgtttgctcacctcctccgtatttcctccactcagactttgccatctgattacacttcagattcttctgtgttagtttctcaaactaactctcgaggaggacgcagtggtaaccgaggtagaggccaacgtcctcattgcacctattgcaataagcttggccacactcgtgatcggtgttatcagtcacatgggcaacctccccgcactgcccacgtggcccagtcatctgatcctcagttgcctcagcctcccagttcctccacatctcagggtattttcctcactgacagtgagtatgacgactatctccgctatcaggccaccaagtcagcttctgttgtttctattgcccagactggtaatgcttctacttgtcttacccacacatcttctcttggaccttggattctagattctggcgcttctgatcacatatctggtaataaggatcttttctcttctattactactacctctgccttacctactgttactttagctaatggttcccaaactatggctaaaggttttggtttcactcatcctctcccttccctacttctccattctgtcctttatgcccctgagtgtccttttaatcttatttccatcagcaaaataactcgcactcttaactgttctatcactttctgtgataaatttgtgaccttgcaggaccagagtacggggaagacgattggcataggacgtgagtctcaaggcctctatcacctcacctcgccttcacctgcagtttgcatttccactgatgctcccctcctcatccgcagtcgcctgggccaccctagtctatccaagttccagaaaatggtccctagtttttcatctttgtcgtcgcttgcgtgtgagtcctgtcagcttgggaaacatactcgtgtctcgttcctaaagcgtttgaataatcgggcaaagtctccttttgaacttgtccacactgatgtttagggtccttgtcggaccgcgtctactttacgatttcagtattttgtcactttcattgatgactattctcaatgtacttggttatttttaatgaaaaatcgagctgagttattctctatttttcagaaattttatgctgaaatccaaacccaattcaatatttctattcgtgtgttgcgcagtgacaatgtcagggaatatttttctacacaatttacttcatttatgtcccaacatgggattattcattagtcttcttgtgcttatactcctcaacaaaatggggtagttgaacgtaagaatcgacatcttgttgagatagctcatactctccttctccatagtcatgttccttttcgtttttggggggacgttgttcttacagcatgttatttgattaatcgtatgccatcatctgtattacacgatcagattccttattcccttcttttccctgacgaatcactttatttccttcctcctcgtgtttttggttgtacttgctttgttcatattctcactcctggacaggacaaactttctgccagagccacaaaatgcatcttcttgggatatttcaaacttcaaaagggttatcgttgttattcctctgagactcatcgctactttctctccgctgatgtcactttctttaaggactcaccgtttttctccacctctgagtctcttcctgtttctgaagtcttaccccttcccattatctccccacctgatgcagtgccttctcgcccacttcaggtttatcatcgccgtcatcgtgtcgctgttcctccttctttggctgtggtacctgctgactcacctcctatcccttcggcttctcctgtcccggctctgcctccttctgctgacttacctattgctcttcagaaaggtaatcaatctactcgtaatcctcatcccatttacaattttttaagttaccatcgattatcttcaccctattctgcatttgtttctgctatatcttctgtttctcttcccaaaatcacccctaaggctctttcccatccaggttggcgacaggcaatggtagatgaaatggctgctttacactccaatggcacttgggatcttgttgttttaccctctggtaaatctacagttggttgtcgttgggtctacacagttaaggttggccctaatggtcaggttgatcgccttaaggcccacttagttgctaaaggctatactcaggtgtatggttctgattatggtaacactttctctcctgttgccaagatagcttctgttcgtctattgctctccatggctgctatgcgttcttggcctctttatcagttagatattaaaaatgctttccttcatggggatcttgctgaggaagtttatatggagcaaccacctggttttgttgctcagggggagtctggtttagtgtgcaggttatgccgttctctatatggcttgaaacaatctcctcgagcatggtttagtcgttttagttctattgttcaggagtttggcatgttccgcaatacagcaaaccattccgttttctatcatcataactcttcagggcagtgtatttatctggtagtttatgtggacgacatcgtcattacaggcagtgatcagaatggtattcagaacctaaagcaacaccttttcacccactttcagactaaagatttggggaaattcaagtatttcttagggattgagatagctcaatccagttccgatgtggttctttcccaaaggaagtatgctttagacatcttggaagaaaccggtatgttagactgtaaaccggtagacactcctatagatccaaatgtcaaacttataccaggacagggggagcctttaggagatcctgggagatatcggcgacttgtaggtaaactgaactacctcaccattactcgtccagacatttcttttcctgtaagtgttgttagtcaattcctacagtcaccatgtgatagccattgggatgctgtaatccgcatttttcgatatatcaaaagcacaccaggtcaaggtgtgttgtacgagaacagaggtcatacccaagttgttggttacacagatgcagattgggctgactcacccacagatagacgttccacttccgggtattgtgtttttattggaggtaacctaatatcttggaagagtaagaaacaagatgtagtggccagatctagtgttgaagctaagtatcgagctctggcaacatgtgaactcatatggctgaaacatcttcttcgggagttgagatttggaaaggatgaacagatgaagctcatctgtgacaatcaagccgctttgcatattgcatccaattcagtcttccatgaaaggaccaaacatattgaagttgactgtcacttcattagagagaagatcgcatcaggatgtgtggcgactagttttgtcaattcaaatgatcaactagcaaatatttttactaaatctctcagaggtcctagaattaaatacatttataacaagcttggtgcatataacatatatgctccagcttgagggagagtgttagataatgtatagttatttaggttatttacttttccttttccttttctttccttattgtattgtgggtcccactagcatgtatatatatacccaagtccaatgtgtattctttacagtttttcaataacaataattaaggattctccctttttctctctctcttttcacacatcccttcctctatctcttgctccttgtgtagcaaagctccatttaattttgattttggccaaacaattcattctattattctcattagccattttctaaaaaaatttagtgtttttgtctccctctaactaatctctctcaatttctatctccaagagttttcttccaaagaagcccaattgcaatactcttcccttgttactcttctagctttggctttctcaaaagaaagagttacttccctttactaagaatcctaaaagtctacctaattaagagtcatctccttcttggcttgacacatgcattactcaaaatcctctttactccaagccttcaagtctgattctaatgttttaaacttagaggccaaaatcaagctatttgaacctctgaaattatatcccacacaccaccccttatgtgattctttgaatcccttaactgccaaccttatatttccaatcctgaatggtatactccctcccctaatccctccatcatctggaagaagtagagagtgatttgatattggccttgacaaagggcattgtgccaacccactaaaatgaccttcccgttcttctaatacgaaaaattgacccaaccttgacatagactaattgtttaatcctccacaccaagtgaaagggtcgcctgcaaaggaagatcatgcaactctaactcctcaataatctttaaaaatcttctcatggatttagacaacctattttgctgttatgttcccatgagaacctgactttgttgaaatcacttccgacacaatacaagttttcccataaccccttgatagcccctaacttagcccacaaaccctccctttccctctttgaagttggctcattcaccttagagaaaatccaaacaaagccatcttcaatacacttgaagcagcgtgaaatagaaaatccccccatcttcatgccatcaagctccaacaccctcttgtcccaaaagaccagccctccttccaaactaaaaatcttcccaatcttaagctcctcaatatctctacctacacattctgaatttttgtttcttgtaaacacataaggcctatactttgtgatcaaatgagggactttataaccttcctctttcactgtcagtttcttctctcacattccatgaaattattcttaacttcatcagcaaactgtagccagctcttagtctttcttgccattctcacccccttcagctttttgtatcttgtaatttacaaagcattccaacctccctggttctctttcaaatcttgaacagtttttcgtcttcctcttttcactagttcagatctttgattcctttttctccatcatctttttaaggggagctaaaatttctggttcaaacccctctgttgacaactcttataaattgttgaaagccatcgaactgttgtttggctaataatcaaagggcgcaaccttgccaacattgatgataatgttataggacaagtgggcactttgggggaattatgatcacatcctttgaagttgctgcctgtaattgttgcctacaatttttgtccactgtcactacatgtagttgcaatcactgcctatagctgatgcctgcattcattacttgtagttgtactggaatcactgtgtggagttattgctaggagtccatgtctggatgttgaactaattatcttagatattatttgatggcagtcttgggtgatctatagttcctgttctagggtccctttaaaaagctatctggaatcatctcactggtctacaattttttcccctggttgacttttgcctagaacaaaaaaccctataaatgggcctgagagatcatcatttgacatgattgatattttctagaatcagcactccattttagaagcctatcctcagaattcttcatttgaaccctttcagtagactagtcgttctcttcaacccttactttcctattactccactttgctgtccctcaattttggccatataatgtctatgtgactaacctcctgtaactaaagaacctaaaccaactgcccttaagggctgctcaactggtaacagactggaaaccaacaaaccacaaaaaacaaaaataaaaaaccaaaaaaaaaaaaaaaaaacacactattgaagagaaagaaaaaggaatcatagttggcacttgaattcgtaatccatgcactctgtccattttgcacattttgtttaattactttatttttcgattaattttgtctgcattcaattctatctctctgtgcatctctccttaaccttataaaacgttagtatact

SEQ ID NO: 12416 - DNA, 4831 bp, Vitis vinifera
  Intron number 10 from transcript GSVIVT01035664001 (locus GSVIVG01035664001) derived from phytozome v7.0 (chr-ID chr 4; pos 3118486 to 3123316 reverse strand)
ggagaattacttccataccttagaatctgtaactggtaagcacaaaattctgtattttttaaattggaattgctttttgagaagttttgtttacattgcatgctattgagtattctgtgtttccccagataatacagaatctcattattgagtagtatgagctacagactgggtttttttcaggattgttggagacagttaaggaggattttctgagttttttcagaatttactaacaatggagccaatacaactttcatcactctttatgaaagtttggtaacgagtccatataagatcatagccaaggtgttgtcccatctctttataagaaggtactagatgagaccattcatctttcttaatgaggctttgttgagggtagacagattttagatgtagtcttttctgcaaatgaaaaaatggatgagaaaagaagcttaggagaggagggggtcgtcttcaagattaactttggaaaggcatatgattatgtggattgaggtcttcaaaaccatggtttagaaagaagaggtttcaatccaaaatgaaggtcatggatttgttagtgctttagttagtttttctgttttagtagtggaagtgcccagagggtgggttaaggcaacaagaggaaaaaggtaatataacccactttcaccatttctttttgctattatggcagattattgagtagattaatgctttatctgaggatagtgacactccaatacacgctttatagcatacaataatatgctttgtctgtcattctctaatataatttggaaatagtttacttacttgcagtttgaggagatcgagttttgtaagagggagggagagagagagagagagagggcaccaacaaggaaacaagataggttatgtttttaaagaacatttcaatcattcctgttactggggatagggaaggaactaatcacaaaaaagcagtatttctctctctttcatttgataatttagagattaaaaatgttggaaggagtagcagaaatggaggagatgaccagttaaagctcttgagcttgccatgttttaattgcaaatttgttgtccacatgtttaattgaactcgtctcccctgttcccctgtttttgttttttctccccaattttttcagagacaattaagatatttacatgcactttttctcaattcttcttgcgggcatttgaaaatgatggcaacacgaggagccttccaacatctgtcatctcttcattattcatctagtcttcattaagacctttgtactttcacgtatgtaatactcacccagtcttttattttgcatccatatcaaatttataaagctcgctcgtttttcaggtgtagcatgcagttttgattacactatctgcattgtttttcggatttctgtgtgtgtcgtatgctcatccaatctgttgttttgtgttcatatcaaatttatattgattttatatatatataaaaaattattttatatcaaattcagtctgtgtttcacccaactggtaccttcaactcatcatttttttttttttttcattttccttttaatggtagccttattattattacagagaaaagatttaggctatgtttggttttagaacaataactttataatacataaacttctacctaattttaatgatatttgttttttttattttttataatgaaactaaatatgagaggatcatttttcttaatatttcttttatttccttagtaccttttggaaataaaatataatctcgagataacattgataacattgatatgaagatatcttttcattgaatttgaatttgatgaaaggtataatgcattggatatttttttcatttcattcattttgaagcattatttaaaatattacttacaaacaagatattgtatccaggttgcaaattccacaaattcatcaaggcataagatgattaaggctgcaaattctacaaagaaaagccaaaaggaagggtgtacaaaagctatagattgggcacatcaacaagtatatttgtattagtttttccttttggaccagctttgttgagttgaggagactataatctctcacactttggttgctatttaatttgatgtgatgcattgttgtaaactcatatatatttcgttgggttatttgattaaaatggatgaaatgttcccgatttgtaaacctttttactttttttctcagagatgttataaagtttggctttgaagttaattgtatgtgtaaatactctactctgtaattttttttcattaaaaaaaatatatatatatatttttttcacctaaaaaatacatattttggacaaaaatgcccttatctttttcttataaaaataatattttcttttaaaacaaatgtataaataattgaaatgttgaagggtatttatataaaaaaaaattaatcacttttcagagttctaaaatggaaaagattaattttacaaatttgaaaatttttttttttcaaatgtaaattcattttctctacatcatgttctcggcgtgtaaatagaaagaggtaaaattagcttctaagaagctatgaataacatttggcacaagctatttgtctgaaaacatttctttttcaagggaaaaatataatttccatatattttataaaatgtagagaattcaaaagtcataaaataattttttggaatcaaaagtcctattaaatacgtaatcatcaaacttaacaaatttatttcaaaaaatctaaagataatttaaaaaagaatctatttagaaggtagagtggaacaggatctaagaatcaaatctatttcagagttacaacggaacaagatctaaggagatgttgtaggtaaacaattctgttatagaacttaatataatagtaagataatgatatttcttatcaaatatttgtttaatttatatatatataaaaaaaattctatattttaaaaaaaattataatatatttttatttcttttaaatcaccactttaacttcaacttttaggttatgcttggttccgaaaaatgctaaaataaataaataaatgaatgtaaaaaaaaatatttttctcgtgtttgttgttgatgaaaaatataaaaaaaaatcaaataaaattaaagttaattaaaaacttacatatatttttaaattatttaatctttatattgatgagttaaaataaataaaatgagtttgaaataataaataaaaataatttattgatttttaatctattttttattttcttatattttatttccttgtacttttccttttatattttatttctcttacactttccttcaaattttttaaaaattgaacacgagcttaattaaaattaaaagaataaaatgtataaactatctcaaacagaattcaataaacacaaaggaaaacttcttattatactgggagtgtttagtgtttactgtgtagatttttaaataaatatatttaccattttggatattttcttattaatttaagatcatatttaatccatcacaaacaaataaatgattaacaaatcttagtatttatcatttcataaatcaaattgaaatatgtaaatttaatattaaatcatgattattttggtgggtgtttagaatatttgtcttcttttttttttcttatttatttttttcttctatttttttttccatttttctcttgtacaaaacaactcgtccgtgtaaaaggcatccgctagtcatataaaaaaaactgttaaatcatattattcgtgaaataaaatattattatcttaattttttaagaatcaaaataaaaaatttattttattttgatggatttgttttaccattcattttttttctttattttatttttaaaaaataagtataaaaaagaaaagttacatgaaaccaaaataaaagttttatttttatgggatggttgtaaaattcacgtttttttttatctacttattttatcttctcttttattttttcatcttctatttaatcaattatttctacaaataataggtgaaaaaaagtgaccggatatatccggtcaccagcccgttggggttttaaatatttgaaaacccccaacaacgtcaagaaaagtatggacggccgaaattccacgtggcagagatctccaccatccattcattggaaacatgctcgaccgataagcaaagggtttgaacttcagtctccgccccttttatgtttgaacagagctcagaccgtttcactttctctctctctctcttactctcagtgcatctgcagatctctctccattctggatctgcaaatgtgtgccgaatcgatttcttccctcatcggattctctacttttttccgtttcaagctcatttcggttagttctttaatttatatatattttttttatttttcttttttgatttaatttgatgtaacttgtgatttgatatttgatctttgtacagggcttggatatgaataatttgcgtagaggattgtattatccaatctgaaatctatttgttttttattttcaacacctacctcacttaactttttctttttaaattcctcaccggttagtgttttttatttctgtagattatcggcttaaaattgtagatttttttgtaggaatttgttgtggattactgttttttttttcctgtttggttagtttatttagaatttgttgctttattgtttgggatgttcagtgtactatttaaatctgagttaggtttgatatttgggttttagtgtaattcaagatcatctgttgcgatttgtttaaatagcttgtgtaaggaaactaccttgtag

SEQ ID NO: 12417 - DNA, 4960 bp, Vitis vinifera
  Intron number 19 from transcript GSVIVT01010758001 (locus GSVIVG01010758001) derived from phytozome v7.0 (chr-ID chr 5; pos 22323868 to 22328827)
cagacacaggtgtatccccaacagattttgttaaggtaacaatattactcatccaagaagctcatttctgtagttattaattgctttctgatgaactacactaacaggactattaccagcattgcttgtgtattttaaaagaaatgaatgccagtgtcttatattcttctgctatttttatcataattttcaaaactttctccttttttcctattcaatagataaaaaggtttgaattccatttgttatggccaaaacagcccaaaacataatgaaacagcttaatatcacccatttttgttttatattcttctcaatctgaaatcattttagttcattctggaaatttaggtctattttggccattagactaaaaatgtttattttaacagaaaccttacttctgtcaattcttttatcatgatttataggtaacttatctaatttaaaagaactatgtcttcaaactagggatcatgtgagaccgtgttttgtcattataaactaggactacatgcttcctactttcttttccaaaaatattaatagttttatatgatatatttttttgataggcaagtaaaatgagaatatatattaaaagcaccaaaaggaatagcaccaaagtacataggacatatacaacaaatgccaaaaggccaagcaaaaaaaaaaaaagcaaccacaaaaaactactccctccctcaacatgaacccaaccaatctacaaaatcaattaaaggcatgaaatcctcatttatgcacaactgcacccacaataagagatgaacataggtttgagaagaaaaaattgtatctcatacatgctcaaaattgggtttacaaggctatatatagatctacaactattgtacaaaagggaaaaaaagaaaaaagacaacttgttggagaataggatattcattgcgggcccaaatccaacaagtttaagtttttaggaaaattggttgtttaacctagtatcaaagtcttgtttgatggaaggtcatgtgttcaaatctcaatactgtttgtttatttttctccaatttattaagcctgcatgtaagcctaaaaatgaaggttacatgtgagggaaggtgttggagattatgataaacactatgggctcaaatcgtacaagtttaagtttttaggaaaattggttgttcaacacaactatacagagaaataataacctaaaaatcaggaaaaaaaaaaataaataggacatggtattaggctttaagactattgactctactaattttattccccaattggttgcaagaaattaggaattgactacatcaaattaggacatattactagaatcctaatttttccaaaagagattggtaaggaaagtgcttttgaggctttggttagacttctcatttttaaatgattttcaattcttttctttccatattgtgcaaaaaaatgcataagagagtgactctcccaattgttttttctttttttcaacaaaaaagacatgccaacctaagagagtctctctaatcatggaagaaaggacccatgatgcaccaaacaaagataacaaccaccaccataaaaccctagtcttgacatagtaaagaaggatgtggattcttcctcgactttatagagaaaaaatatgttaattaacaatcatcctcttcattcgagctaatctaaagtcagcaccttaccccaactagatgggacccatgtattccatattatccccaatggagagggaatgacacaagctagctccaaaacaaaataaagatctttgacatagaaaacttcattaatagaatccctccaaacaatcctatcctccccttccctattcactaacttcccttgcaatttgtaaagaaaacgttctatatcgtccaactcccaatcattcaaattcctggaaaaacgatggttctagtgtcctccttcacaagtctagtctcatgaatctactgtccatgcctctttcaaagaggctaaggcaaaaaaagtggggaaggagacaaagatttctcaccataccacatgtctttcccaccccccttcttctttcccatatttaccacctattatttgcttctagagcacttccctttcagatgcattttttttttttttttttgataggaaacgacaaagagatatattgatagaaaaaagaagtacaagagaaggatgaggaatcctcccaccaaagaaaaactaaactacaagaatacaaaaacaagaaaaaacaatgtaaaaacaaacaaactctctagattagaccaacccattggaattacacactactagccaatcaagttgtaacacattaaggggaatccccttaaaaaccttggaacaaaaagctcaaagagaagcaaggaaatgaatagaatcccaaagattctttgaattccttgctttatcctcaaatatcctcgcatttctttctcgccacacaacccaaattaaagcaatgcacgcaatttgccacaaaactatccctctcttagataaaccaaaacccttataattgatggacaacatgtcagaaatgctcctcgggggaacccaatccatcttggctaactgaaataatctgtgtcacaactccatcgtcaaagagcaatgtaggaaaagatgatatgctgattttgcatgcttcatgcactgcttacaaatgttaggactaagagctttgttgggtcttctcaattgtagcaagttattagtatttacgttcttgtgtgccactaaccagacaaaggacttgactttgaaagggacttgagaattccaaacgaacttagtagggaaaactggagaagaactaaaaaattgggataaggcaagaaagaaagatttgactgtaaaaagccctgaagaagataaagaccaagatctcgcatctgaaaccgatggtgataaatgcagacaatcaagtgaccgcatgaggccttctaaatcatctatctcagtattggaaaggtcacggtggaaattaaagttcgaagagaagggacaagtagaaccaagaattgaggatataggaatatttttatccgtgactactctaaatagtcttggatattgggatcccaaaggttggtccccccaccaaaagtcttcccataaccgaattctttccccatctcctaccacaaaccgagtatacttggaaaactcctaaaagacttgtgcaatagccttccaaggacaacgatgtgaccgtctgactatagtgttggcatcccaaccattggaatgtgacccataaatgcttaaaataacctgatgccacaaagcttaaccctccctagggtatctccacaaccatttccctaagagagcgagattccttagagaaatcttcccaaatcccaatcccccttttgccttcgaattacacactacatcccaactaacaagatgatctcttttaccttccccaacccctgaccatataaaatccctttcagatgcatattgccaacaccatttgcaataaagggctctattaagcaaagagaggcatctaacacccaaacctcctttcctcttcaccatgcaaacaatcaaccactacattttttctctagagtcccacctccccataggaaatctctttagatcttctctagcctcaatttgactttccttggaatactaaacaaagacataaaataaataagcaagttggataatgtgctttagatcatagtaagcctcctccttttttagaaatattgtcttttccacattattagccttttacaaaaccgcccttccacattatctcaagccactgctgatttctatggggcacccaaatgaaaacccaagtagtcaacaactctattatcttgtagctaatcttagatgctaactcctccattgtaatcctactaattagaattaactcacccttttctaggtctatttgcagacccaaaatggcctcaatccacctaagtaactaacataagtcggtgatcttgagaagcctcacaacatactaaggtatcatcagtaaataggagataggatactttcatgccctcgtcatctctttccctcatcttaaacctgaaaggtagcctccctctctagccctcttgagaagactattatgagcttccatgctagcatgaataaatagggagagagagagagagagagacacccttgcctcaaacctatagagcttcagaaaaagcttgagggggtgccctttaacaagaatagaaaattgataattcgcgtgactatacacttttttgatatcaaacttacataagattccatgggcatcatttttcattatacaatcaaaaacctcattggctatgagcactgcatctagaatttgtcttcccttaatgaaagcattccggtacttttgtaccacttttaccactactttcttgagtctactagtcaatacttttgctaataacttatgcaaacttcccactaagttttctggcctaaagtcttttagatcttttgtgctccttattttagaatcaacacaaaaaatgtaccattgaggcttttttcaaatctaccctgagaaaaagtatactggttaatttgtacaaggtaagattgggtatgctggtttatttatcttaaaataactggcataggggtttcattttcctgacaaaaatagaaataaaaaataaaaaataaaaaaaggtggggcatccctttgtaaacaaatggaataaagctcaacaccagtgcatatcctatgatcaagtgtctacaggctgaataaggccatgggagagttccaaggatgtacgtcatgtcaattactttcattttccatgttcatccttactttccataatctgtattgtatctgtactaattcaatccttcagaattttactacctttgattgattctttttctaggtccgccatcttgaacttaagaaggagaaagaagt

SEQ ID NO: 12418 - DNA, 8059 bp, Vitis vinifera
  Intron number 4 from transcript GSVIVT01029958001 (locus G SVIVG01029958001) derived from phytozome v7.0 (chr-ID chr8 ; pos 2265201 to 2273259 reverse strand)
aggtacgattcacaaccatttgagtatgagaacacccttaatcttacttgacagcagaagttatattgcaaaactgtggaaataaatctgagatgttttcatgggattgttttttccacttcattctaatgaatttatttttctgataatcaccatgtgttggaaagcctagaagggtttgctttcataagtctccaaaaagaattatgctctaagaatgaaagtagcagaattagattatttttatgattggctaccataatttgtttagaagcatgaatgtaaaaagtttaatgaaactttcaatgagaggtatgtgtatatactttttgtgcatgccttgcattgtgagtgtaaagaattctgaatttaccttctagagttttgcgattaatcacactcattttgcttcccacattgatactttaggatctttgtatgttttcaattttgacaataacattcaaatttgacattttcttggtgccaaagcaaacaccaacataagatatgagggggaggttttttgaacctttggaatcaaagaaagactctttcttgttatgttttggaaatatgtgacaacaacatccaacttttgaaaaagagattttgggtaataggatgagatcaaagtctaaaggtgggacaagaatctttagatcttagagaaagaaagatttaatatttagggatattggaaatattgatattatcttggaagtggaatgaagtttttaatagatagacaaatttgttacctatctagctatagaatctattgggttgacattgccaatcatgaaaatttactagcactttttgttgtttagtgtttgaaaaggttgggaagaccagttggttagacttaaggatgtgttttggcctaaatttgcgaaattggggcttatgaggaatttctataaggaatggtttcatttgaaaattgttgtgatggttcccttaagagaacaactaattatgacattgggtgattaagagtattgacagtttgtaaaaaataataaatggaaagccaacatcatgactagagctttgcattgaagtctctgataagctataacttagagttatcatgaacttgtgatcttacttgttatatttggcttattgtgggagatagatgatccatttttagaggagttgtggtgagaggaataaactcttaagctctctttatgtaagagatgcggtgtagcaaaattgagatttttaagtgacaagtttaaactttagcatttgaaaactttataataactaaaaaatttggaccttggaggaaaagaaagaaagaaggcaagtattgattgagacctataaaaaaaaagggggagttttgatggagatgatgcagaaggggttagatagaattaaggggtcttcattttcatttgtggaatgagaataagttgtgctacattatgaagaattggggaaaggtaatggaggtggtgcgggctttttttaggcttgtagatttgttgaaggtaaagttgtgggtggaatgcacctaaatgtcgtgttgcctgcgcggacgaaggtggaagatggagcttggactttcatggttatagttacagtcatcagagaagatgaagaaaaccgccatttgaggactttgagtcaactcgtagtagaggtgagttcatagttgtgaatgatgcacctcacttcactaaagcccgcgccttaggtgcgccttgcgcctcaggctctaggactactttgcgccttggtgcgccttgagccttttaaaactatgggtgagtttgacttagtaggaggaggcatttctcctaggcttaaacaagtagtggggacacggggcatcacaagagtgaatgaggcctacaactgtaagcctctttctctctccccttctcaaatttcaaattcaaatatgtctggtgttttaaaaagaacgaaaggtctaagagggaatcagaggggcctaatggtgggaagcccatctaggcccactaagccattagctataaattaaaaggtctagtcttcggttagggcccagaatggagcgagcctatgtggagaagttggtcttgggtctcttgctaatgcagttgtcaaacaagcccatgagacagaaaggggtacaattgggtcttccaagggtggaccatcagagcctttgtctccaaaatgttagggctcaaattcttcttcaatggatatcctttcaattgtgtctaagagaagagcatccctaattgtcacgaggcgctgaacaaaatgctggcttccgcaccttaaggcgtcgtcttctgtgttgaagggcaaaatggatatggttgtttcgactgaagcaagtctagtaaagggttgaggcactttggtcttcaattagggtgataagttttctctctaagaaatttcccaagtaatcatcgtggagacagggggaggcgtagagctttcgcattgcagtttgtcaaatcaggtgtcttcttagctcaaaaacctttgtgaagggccaacctttggtcaggggttttgctccaaactcccttcccatctcttctgtttctactgttcactttgttcgatatcggcctctctcgttggactcattggagtcaagcctagctacttaggctgttccccaaatgaaatttcttggtgcagagtctagccttattgttggcattcccatttcggaaggtgtggattcccttagagtagtctttaaccaaaaactaaaagattgtttattccataagacaccacttagtagcttagaggagtgttgtgtctcaggtggaggtttgtcccaagatctagaacctctctcgttggaaggttttcatgttgagggcctaatgcctaggaaaatggtcaaggtacattcggtgttggagagtttgaggattagaattgtcaaagaaagtgagaaaggtttggcaatggagagtaggagtgtttaacttgcagacaatgtctatttcagaaggaagagaaagactttttgcggaacctagggggaggcttaggtttgttgaggtttttttcgggctcttttctatttacatgaagatcataagttagaatacaagagggttgggttttaagaagaaaaaggaggattgtcaaaggttttgtgagttctcaagaactagatattgtgatgctttgtgaaacaaagagagaaacttgggataggaggtttgtgggtagtgtttggaaaggaagaaacaaagaatgggttgatcttctagcttgtggggcatcggggggcattgtgatcctatgggattcaaataagttcaagtgtacaaagaaggtgttagggtctttttcgttaattgtggagttgaattttgatgaagatggttccttttggttaactttagttcatgctctgaacaagcctatttggagaagggatttttagatggagctacaagacctatttggtctaacattcccaaagtggtgtgtagtaggggactttaatgaaataaggaggatcttcgagaaattaggtgcttctaggttaaccttgaacatggggtgttttgatgagtttataagagagactgagttgattgatccccctctcagaaatgcggcttttacttggtcaaacatgcaagatgctcttatttgcaaggggttggacggattgttgttgtcaattgagtgagaccatttcttctctcaaagtctccaagaggcgcttcctagatggacctcagatcatagtctaatttgtttggagactaatccttttaagtggggcacgactctttttaggtttgagaatatgtggctgctccatcttgagtttaaggacaattttagtgcttggtggcaagagtgtgaagttgatggttgggaaggtcataggttcatgaggaaactaaagtttgttaaatcaaagttgaaagattagaatagagcagcctttggagatttaagagagaggaaaaatttgattctttgggacataggtagaattgatctaagcgaacaagaagagaatctgaatcatgatctgtcatctgagaggactttaagaagaaggaagttaaaggaattgttgttaaaggaaaaggtccagtggaggcaaaaatcaagggttaagtggataaaagaaggggattgtaattctaagttctttcacagagtggccaatggaaggcgaaacaggaaattcataaagtcattggtttctgaggagggcgtgactctaagcaacattgaaattatttcagaggagatggtaaattttttgggaagctcttctccaaatccgcaggtgtttcttggagggttgaaagtttagattggttccttgtttctggagagagtgctgattggctagattgacccttttttgaagaggaggtactccttacagttttccaattgaataaggaaaaaaccccatgcaccctgatgggtttattattgcaatgtatcaagagtgttgggatgtgatcaaagaggaccttatgagggtgtttccagagttccacagtaatgggataataaatcaaagtactaataccactttcattgccttggtgcccaagaagagtcaaacctttaagatatcagacttctaacctattagcccggttacaagtttatataagatagtagctaaggtcttatcagggtgattatgcagaatcctccatgaaataatctttagttctcaaggagcctttgttgaaggaagacaaattttggatgttgtgttgatagtcaatgaagtggtggatgagaaaaggaggttgagagaggaaggggtggtctttaaaattgattttgaggtgatctatgatcatgtagattgaggctttttggaccatgtgctagaaaggaagggtttcagcccaaaatggagatcatggatgaggggatgctcgtcttcaacaagttttgcaatctttgttaactgaaatgctaaaggttgggttaaggccactagaggtttgagacaaggagatcccctttcttcttttctttttaccttagtagcagatgtttaaagtaggatgatgatcagataggaaaaaagtgggttaattgagggcttcattgtgggaagggataggactagagtgtctttactacagtttgcaaatgacaccattttcttctctaaagtctctccgggacatctacaaaaccttaagttaatcctattggtttttaggcaagtatgaaaattgaaaatcaatttagaaaaaaacaccctatccgttgttaatacaagccaggagttgttatctagtttggcttcgatccttgattgtagagtgtcatagtgacctttctcttatctgggtcttcccttaggagggaattcaaagacgataggtttttgggatccgatggttgagagaatctcgaggagattggatgagtggaaagatgcctttttgtcactgggagagggggagtattatcttaattcaatcaagtctgtctcacatccctagctatttcttctccctcttcaagatcccattattaatagccttaaagattgagaaatagcaaaaggatgtcctttggttaggggcgaggaaaggaaagaaagatcattttagcagttaagatgttatttgtaggccaaaggagttgagagttttggggattgggaagacttccttgagaaatcatgctcttttagggaagcgactttgaaggttccttaggaaaaggagtggtctttggcatcggtgaccaacctttgtacttacaatctcgggtctttatagagttatttatgtgaaaaaccttactgtctcaattatccttggcaattcctgtccactctcatggaatgttaactttcgtcgtaatctcactgatatagaaattgaactctttcagagacttatgtcttcccttagttcagtgcatttgtctctgtctgctttagattcaaaagcttggtctttatcctcctcagacttgtttattgtaatttttttttttttggccttgtccaatttctgagatcctatcttgtttctttcgactaagtttttgttgaattaaaagccctttcaaaggttaaggcccttacttggttagtagcacataggaaggtaaacagtaatgacatgttgtagttgagaagactctacaaatccctttgtcctcagtggtgcattttatgcaaaggaaataaagaatcgatcgaccacctttttctacattgcccattaaatattggacaacacaagctcttctgtctagtaaggttcgattatgttccactagggagtattggaaacatgatgattattacttttagaggtttggggaattcaattagaggcaagactctttggcaaattgcttgcatcactttattgtggattgtgtggcaagagagaaacactcagatttttgaggataaggggagatcaaaagggatgttgtgggatttacttcacttctctgtgagcctcttgtactattgcttttagaggagttccatttagtgttatacaactcaactgacttgcagtttgtgattcaaaagtttgagatagttgggggttactttgtatatagttttgtatagaggggtgtcttcttactttgatcagactctgtattttgcgggaaggacctctcatccttgtaccttttagtataacatatattttgtttctgatcaaaatttttttttattaacctgttgaagcaatctcatgacaaatagaattttttttttttaaggaatctaaacaaggtttagaatattcctccatgtatctctggatcccgtgatgatttgagattttcagatttatgggttaaggatgactctggtattgtcctttcattggtgcctaggggtgaaagaggcccatcaaagtataatgggtggatcccacaacttattgatgttctgagcaacttgaaatgttcttattctcgaagttcacatgttgctaactaagaagtggatagccaagcaaagggctgaacatgtagtactctgtgggggacttttttggttttctttatcagatatgcagtttgttttgctttcttttccaggtatacaagtactttttcctttttgatcacttctcttttctagatcttctgaatatttctcatccttcattgtattctttgtacttaccaagttcaatgtaatgatttatcttgtttctaattaagaaaagaaaaagaaaaagtaaaatgaaaagcttggtaactaccacatgaaggatgaactgatccactctaaactatgaaaaacccatacgataagtgtaaccacctcagcaaaacaataagaagaggatgagctgttctttattttcaccacagccctaacatacagatgcttcaacattgcagcaccataataaaaacacaaaagataaaattgtaacaatacataaatcagggacctaaactaaaggtactagcattgccctaatccatgtgactttctaagaaagaactttatgaaattgaagacgagagctgaagaaagtaagttgaagtttaaaacacagacagaagctgcttgtccttgtgtaattatttgtatagatatacaatattttgaataactgggcattaatttaatatgatttttttcttttggataaatgggcttatgtgcagttacaaatatggttataatcttttactacctacaatccatttttgacacactctctttcacagatttctgctctgcagatgttgggttggtcttcttaatttagttgttcttctattgagattcatgtgatgctaattatttttttaatgtctattattttcttatcctgttttatctgataaacttatcagctaggataagttcacaaaatatctttttaattttattttacacctaaagcagctgtctgacttggttaatttagcaaagaagtcatctagttctgttaataaatatatgttgtgctttattcattttgacaactcaatctttttctttatgtttctgaaattagattctttgttgtgtataggttctcatttgtagattgattgacaggcctttgcg

SEQ ID NO: 12419 - DNA, 3393 bp, Vitis vinifera
  Intron number 5 from transcript GSVIVT01018294001 (locus G SVIVG01018294001) derived from phytozome v7.0 (chr-ID chr1 5; pos 11646786 to 11650178)
ggtcagtctttcaagcctccctgatcaaaggtaccttttcattttgtatcatttggtaatgtactttgcaattttctaatatcttttcctataagtaaaacaagttcaatgtaacaaatgttgcacatcaatattttcacatagccaaaggatgtggcaaataatgtgacgtgttacttagaattagaagttgttgatagatccctacaaagatgatctgttttgtactcaatttcctaacctttttagaattgtgatagttagagtcttgtttatttcatccattctagatttttcttcttcctccttggattggaacttcaatttctgttgaatgagagagtttgctcattaatttcgtcaagcttattttatattatgtcttccttttcaactgtttttaagccctcaattttgggccctcccttcactatctacttcatttggaaacctaaagccccatctaaggggttaacaccacgtatttgctgtgggtgaggagccctttcgaagctcttaatccaaatctttgtgttatgtgcctaaagagtagtgaatcaatagattatctttttttatattacctagtgactttgagcctttggaatatgcatttaaccttactaagatacattaggttcctccttggagtgtgaaagatatgttgtttgtctttaaggatacattggtatgtggcttgccttgcttgttgttgatagtttggagggagaggaatatgaggaagttttaggatgaatagaggaccttagaatttatttgggatttgatacatttctcttcctcttcttgggattctttgaacattctacaacttgattggaacatgatttgtaagtcaaagagggtagcttgtaggatgttctttgtacagactccacctccaatgcattgatcaaattaaactttgattggtgtattctaggtaacccaagctgactaggaattggaggtgtgactagggatcaccatgatatggtgttgagagccttttggaaaccaataggagagaatttggctattgagggaaatattgtagctcttttggaggggctcattgctagagctttgatatttccaatttattgatggtgggagatttttgtaaaaggtgatctcaggggtgtattgtttggagagagatccttggaagtatgacatgtggcttcattaaatcctaaatctagccagccacttggattgttccttttcttgataaccttgttcaactaacgatattgcctattgattacctaaagatggagccaaacgggcgggttcttttgtgggggagattttaccctgttgagttgtatattattgctatgttttacacatgttcttgttttgtctgtgattgttatagctatattgttgcactagttagatatttcctcttttttcttgtcatactttctattttggaaggatctcttatcattcgcttgtatttaaatttaataacaatgaatagattgtttctggttcaaaaagaaatagagacagacagacagacagagactttacctaggctgagaatggattgactactaaatcttggatgaaattttcttttatgtatgtctatgcaatctattattaacttcttcacaactccttccaatgtaaaagaatacgatatttacaacttctctcagacaagagagaaacaaacttaacattatttattagatattcacaatatgttacctatggtaattgggtttatgaattatggtcaactaacagattaaattaagaaaataaacaaagttatctgttacatcagaagaaccaaaatggcaaaaaaaactaaataaatacaataaaaaacttgtgtcttggagtgtggctcgaggaataattctatgtggatgattggttgaaaacctgatagcaaaaactgccctaaccagattaatttcttattctgggataagactgaaagttccttgaaaactttccaaagatgcttgtcacaaaacctgtggaaatgaaaacaatgaatgttgaaacttgtgttttatgttgcatctgttttccaaaaaatgaattctccttgcaactagttcataattttaacttctctttcagatgttttatttttgtttctgcatgcttgtgtatgattaaaaagatgaacaagtttgtttatcaaatacattgtaattaagtaaacataaaactttccctggaatgtttttcagattttctgtaggacagatataggtaaatccaatcaagaatattttccagatctaataaatgtattttttatgaattcataaattatgcagtctgggtattctgattgaagatgtgatgctctcaaatagagttacaagaaagagctaagattcaggaaaaaacttgatacaaaaagctaaactgctctttttgaaatagatgaacatgcatgacactcaacatgtgattcaaaaaaaaaaaatgtgctgcagtataggggctttcttccaactacccacccactccaatactttctcaaccataatgccaaaatcctgtcctcctagggttacctcccagtgggcttccatggtacttcaaaagctactcgcctattcacaaccctgccaaagaggattgtccaagatgcgcttttggttaatatttgcccctggcatagacaccaaacctgatgcttttaggataagtttgttagctaatttgtcttagaagtgtagaaaaaggtattcagcaaactagagatagccctaaccaagtcttttgcccaccacaaaaacttccactgaactctctagcctgggtaaaagtgtattaaggacatccataaccattgaaaacaagaaaagggttaggggatcccttagcctcagtcccctagcagcataatagcatcagtgcaaaccctagtctaccactttataaactatccccttcttctgcagagcatggacctcaatcttcatcatgtgtaatgcctttgttgcttatttaaccacattttgtgttgtaccttcaacgcttccactctattatatatttctttattatccattgaaaggttattatttcacaaaaaagttattacttaggaaatgacctttacattcttcccctgttcatatcatattattatcatttcatatggttaggaccaacccacccaataactttgtatcaagttcaacacctttgtaagactccacattttagttttgtcaaaaactttaaggccatgttaactgctctcttctggtttctgtgatgagttatgatctgtagtttgcattggcttaaacacatagaatgctgccttttgtcttccttcatagaattaagtgcttgtttcaaacagtgatctggagctcgattcaaaacccttttcccaga

SEQ ID NO: 12420 - DNA, 9608 bp, Vitis vinifera
  Intron number 1 from transcript GSVIVT01020223001 (locus G SVIVG01020223001) derived from phytozome v7.0 (chr-ID chr1 ; pos 8876730 to 8886337 reverse strand)
gagtcttgaatataactccaactttttcaaaggatgtttgaatagatttgacctcccacttatatatattttggaaaaaaaaaaaaaagatattggtgggtgccaagcattaagcctttggcaccataccatttgttgtgttacatgtatgtatattaagtggtaatattttttttttttttttaaaaaaagaaaacaaaaatctaagtaaagaaagtaaaaattttaaaaattttcaaattcttctttattgataaaatgggaaatgcacttatttaaaaataatcataatatatatatatataaataattcaaatttcatgcactgtcaataaattattatcttaaagaatttttaaaacataatttgattgttaagaagataaaaattaattaaatatattttatctaatacttgtcataatttaatatactttatattatttatattatgtaaatataaatatgcaattaaaaatatttacataatattttatatacattcttcttaattcaatattttgatcatatacatattatttctatctaaattataatttttataaccaaatattttcgttacatttacatttttttttgtacactcatcacattctgcatactctactcatatttttcggatctttataatatcctggtcataggataccttggtaaagaaacttggtgtcctgggaatttgattcaatttcaaaatgtgggtccatttcaaccttctaacacatcacaacgctctaggtggtagggaatatttaattttatactataatgtattaatttattaatttttttcccttttctctttcccatgttcttaccaaaaaaataataaataaataaataaatctaattatattgctatgatgacttgtcagtttttgactcctctttttacatgtatttgacagacatttttttattctcttcaaaattgaatcttattcttatcctaaaagactatgcaacgcacatcttggtacatgctaatttatttcataaaataattaaaatatctatttttgaatttttgcaacattaaatgaaatttaaatataaattaatttataatataatgcatctaaaatagaaaaaattataaaaagaaagattatgcttgtttcctataagtaaaaaaaaaaatatataaaaaaaatgattttttcatatttgattgttttatataaaatataaaaaaaaattaaatattattaaaattaattaaatacttatatatttttaaattatttaatatttatattgatgaattaaaataaataaaatgtgtataaagtaaaaaaaataatttattaatttttaatctatttatttatttatttttattttatatttttcttcaaattttcttgttaaaaaaaaaaccattttaaattctaaaaataaatgaagtgggtggattccccctgggtgctccatcaagtactcaataatgtgagatgaagagatgaggaggctgtgtttttaactttttacatttaccctcaagttaaagcttaaaagtttgggtggattcttggtgtggggttggaggaaggaacagttgaggtgacttttcgacaaaaaaggaggagccgtccaagtgggaaagaggagtggctgtttggctggtctaccatgcacgattctcatttcaatcattttttaatttttttttataaagtcaatttctcttttgctgactgccctccaacatggagtccgttcttattgctttttcctttcctttttgacttcagattctttggttcttgttttgttttctaaattttcaagtcagaattgtaatgaaagaacccaccaaatagatgagaaaaaaaaatcaatattgggtttatatatgtacttagggttttttttgtttttttttaatatcttcgtaatttttgaatttgagataaatttgataagattgtgggatgaaatcaaatctctactaatgcaatatcaattcaaatgaatcgaaaaacattagaataccatggaagggagatacacgaagtattagataaaagtctaattagaaaaagtcacttttttaaaactgtgctattttttgtcttaaaaccttttgaaattgtctcgttcatattcttttttttgttttttggatttaaaaaaaaataaatattttcatgattattgaatttggaatgaatttggtgggtttgtgggattggtggatgaatgatttaattgaatagttcataggaaaattattagagagacggagacagatgtgaatcttagcaaatgatggttagatgaagggagagcatgtgggtgggcaagacttgggggggatttgacatgaaaaagctgagacttgaattagggtaaaagcaaagtggcctactacttccgtctactccaaggaaaatgcgtcatttttggctatgcttttctcttcatttcctttatggtcggtctcttcccttatcatattaatgtgcaaaatgggcatgttctattttgtttctttgtgaacaaattaaatcttatcctattcttctttccttaaatatcatctacaataaatttgaatggcaaatatgaatggtcgccgttcttctactttccccctcctcaattgtaatgccccaaatatagtttgaggggtaaaacaataaataaaaataaaaataaaataaaaaaattaaaatgggtaaaaacatctttttaaattaaaagctctacagaaatcaaaccatataagataatataggtaagatcttaaaattaatataatttagataagattttgattcttaaattagtattttatatttattaaatggttttgaaaaatctggatttagggtgtcagagatgtaaaatagggagtatacgttggctaatattcgtggtagtggaaaaaaattataaataataaaagatgttggaaaaaaattataaataataaaagatgtttttgtagatgaaaaaaagagtgtgtggtgtgtttaattcgcaaagcaaaaataataataataataataataataatgggaggtagactcacgtgacatgagggaatgaaaaaaggaataataaaaaataaaataaaataaaataaaaaggcattgagaatttgacgaagtacaaagttataataataataataatttaatataagaaataggaagaatatactttcggagttttactttaatatatgtatatatatggaaaaaacacaagttttatgaaaatttggaaattctttaattaaattgttattgattaagaagttgaaaataatactaattataataatattaacatagaaaattaattaagattattaataataacataaaatgttattaaaatctataaatttgttaggtatgaagtaggttcttccgcaagaaatttttgaggatcttgagtgtttttttaggaaaggagacttaatgtaaattttgtaaaataaaataattttctttttatatattattttgaaatgtataaaattttatttttatttatatgcataaatcaaatatattttgcatgaaaaaatattctaaatgcaagaactttttttttttttttttgtagcaaaaaaagtgaagatattttgttttttattttattttattttatatttttgggtgaatttgaaatagggaaacaaagtgtttgactttggtttatttgacttagtcaacgaatataatagttgacatttttagttttagtcaatggaagaaaataattgacttttaggctattgttaacgggatataatagttgatctttatatttcttagtaaagaatataattgttttgaatcctaacttctaggggtttggttagaggttactaatactaatagtgtttggttttgtccaccttaaaaggaataaatttgaagctaatcacccaattgtaaagtttcacctaattgggtaccatttgatatttaataactagagaaaaaatattttaaatgtatttaatttgaatttgatatgaaactgttttgacataaatatgaaaatgtttaattgaacagttttgaatgtaatagtatgtttgaactcaaaagtttttatgaaaaaaattatatattatatcttttgcttgtaatcataattaatatttattattgagctttgagttcattatctttttttgacaattttttaggtactcttaatttgggcgaggagtgacggttaggataagattttgtcattgttaggattttgctttaaactttatttttggattttgtttaaaatttaatagccgtttgaattgttaagtttaaagttatttagacaataacaatttagttaatgtgttagttttaaagttgagatttgagaattatagaattttgttttactactctgaacaagaatttggtgagctttgagcttttgagcttgagatgtgaaatgatcatcatgtccttagagtgagttttggggcatgacagagtggtatcagagtactaggttatgatcttattgggaacttgttatagtttactttggggatagatgagtcacattagtttaagtttcaacttcatctagtgcaatttttttttaaatcctaaattgtctaattggttttttagtgactaatccaagctcaacacactattttgttttagtattttgttggttaataaggtttgcctattgccagcatggactttgatttgattgttaccactcctacgggagcttttgttgtgatcaatcaaatgcttagaagttgttttgtgatgattggttatacaaagatgtcaattgactcagtaatccttgacttttaggattttgttttgattttgagtatagatttagcttcataccatgcctctattgattgttttaggaaaaatgtgacattccaaattcttggtcaacctgagtttagttttgaaggaaaacatgtagatagactattgtgtatgatctcaatcttgtgagctagtttcttacttaagatgagttgtcaaggctttttagcctatgtggtgagtaatgaaaatgatataaaattggaagacatacccattgaatgaattatcttgatgtttttttttttaaaaaaaatgatttacttagcttgccactagagagaaagaggtggagttcaccattgatttggtaccaggaacaactcctaactttaaggccccatacaagatgatacttatggaacttaaggaattgaagatttaactttaggagttgttagataagggttttattaagtctagtgtttcaccgtggggagctttagttttatttgtgaagaagaatgatgagttaatgagacttcacaatgattataaagagttgaataaggtgataatgaggaacaaatactctcttcctcagattaatgatttgtttgactaacttcaaggtgcatgtgtgtcctctaagatcagtcttcaatttagatattgtcaattgagggtcaaagacgagaatgtactcaagactacttttcaaactagatataggcattatgatttttttatttttggcttttggttttattaatgcacttgctgcctttatgaacttaatgaatagggtatcaaactctatatggatcaatttatggtgatttttgttttttggtgtacttaaggagtagagaggagcatgagtgttatttgagcattttattacatactctaaaggataaacagttgtatgctaaacttaagaagtgtcagttttgcttagatggagcatatttccttagacatgtggttaccatggatggcatctcagttgaccctaagaaagtaggagttataacaaattggaggagacctggtcctatgattgagatttgaagtttttgaacttgttggttattacaagcggtttattaaggggttttcgaagattgccctacctttgaccaagttgactaagaaaggagttaagttgagtgatttaatgattgtgaatgtagcttcaaggagttgaagagtagactagcgacaactcctattttgactattccttcaagtttaggaggatttgtagtgtatagtgatgtctctcatcaaggtttgggttgtattcttatgtaacatgagaaaattgtggcttatgcttctagataattgaagccttatgagcgaaaccacgctactcatgatttggagagttagttgtaatgatttttgcatttaagatttgaaacatttttttttttgtgaaacttatgagatattcatagatcataatatcttgagtgtacaagatctccgaactcttcagacttcattttcactgagtgaaattgatttgggaacattcaaattaaaagtaaagttttctaatgtttttcctcttgatcctagaatgttaaaaatatgtttttttttcttctgttgcataggatctagaggtctatggtgtttttgcatgcacctatatgatccaaggtaaagaaatggagaaatccaaagttcccaacaatccaccaaggaaagatgaagttatataaagatttgagacaaaattattggtggttaaacatgaaatgagatattgcaccatttgtgactgagtgtttggtgtgtcaacaagtgaaagttgagcatcaatgaccaacaaggtctttgcaaccactttctattcttgaatggaagtgtgaacatattttcatggattttgtaacaaggttaccaaaaaccttgggcaacaataatgctatttgggttattgttgattgattgataaaatttactcattttttgcccatgaaagtcaatttctctatgaatcaactaacttttcttatgtcaaggagattattagaatgcatggggtacttgtttctatagtatccaataaggatactatgttttacttacttggtacttcaataccaagtaattgcatgttcttttcttgaggatgaaattgatctttgttcacttcaaataaataaacaaccatgacaaaacttaatagatatgttttgttaatataaaagcgttttaaatttttttctatgtgctaattgatgaaccaacacttcatttgaaaattgctcattctatagattgagataaaattttgatcgtctaaagtgtttcttttacattaatttttttgaataactaatcattcttgtttgcactccaagagttacaacaagaattaaattattggtttcattttcttaagatctttcatttctagttcttttttcaaataagtagttgttcctactagcatttcaaaagtttcaacaagttataaatttgattgttgttttcttaatgaacatatatgcgcaaatagaattatttacataaccttctctcattaaatattcattaaggtgatgtaccatatgtgtctaaattgctttaatccataccaatatatttgtaactaattggatagataccgagatcttgaaatatctttttctttttgaaagaagatgtaagaagaaataggcttgaagatgaatgataaaatagttgtaaaggcatatgcattttgttaggatactccatgtgatcacatgttaaaactcaaatataagtttttcacatgatatgtgtaggttcactatacaagaagtggcaaaatgcttatatgtcctatctttttcttcaaaatgattatgtggtttgcctgcaaatttcaagtttttcaactcgattttttcacctttttcgcactacttttccaagataaaggacctaacatgtgaattctctaaaaaaaatttggactaaaattggtacatctcatggtctaagtttgattctatttaggtaatttgatatatgcaattcttattattttctcccttatgatccaccatgtcctttaccttcatgtatgcacgatattattttcattttgacacaatatttatcaataaattaatgaattgttcaacatgtcttaatttacttgatagcttagttgatatcagtttatttgaggcttaatgggacctaataccttcccagtaagtaatttgaccccaaacccctttcctaatttgtagaccatttttcttttaggagtcatttgagatcttgtagggtctcaattactgaagctttaatttgatattttattttcccaaataaataaattaataattgttttcagataaatcaagtgcagcaccataacatgacgagatcaatgcatgactttaattttaattatgcttaattatcgatttaaaatttattacttaatttaactttatatattaaggttatttgttaaaatcaagatataatttttttctacactattaatacatatgtttatctttattaatattgagtaatgaggttatgaaatagaaaaaaatggagaaggtgacaaaagctactcgaggaaatcaagattttacatttataaaagttaattattttgacttattactttcaagtcgtttaaaactttaagtaataatattacattattttattaaatatacttaattactaaattatatttacttatcaagttcatttatccaacactatctaataaggaatttggtagaacttaatggttgtttgatagaacttaatacttattaaaacaattttatatcaagttatgcttaagttattgctccatgttaattcattcatttaatttatcaaaatcatttatatctttaagttctgaattattttatcaaacatattaataatttaaattaagtcatatttagttattaagttaattttatcaaccatattcttagtagtaagattatgtttaaatcattaagtgagtatttggcaaaccaatttaaataatttaaaaggacttaataacttaatttaaattattaagtaaattaaatatgtttagtaaaataacttaatgatatgacttaaaagtaaaaaacaactttaaataataagaaaaaataatcaatttattcttaaattcatatatttattttactttttgacatcatttgtcctagttacctcaatgatctctttcgttactggacctcctttgccttagttataatttataaagataaatatgttaatttgattatttaaaataaattttaaattaattttatcaaaaaaccttaatatttaaagtaagaattaagaaataagttttaaatcaacaacttaaatgtaatttaacttaaagtcaatttaagtcattaagtaataagtattaccaaataccctttaaattttattaagttattaagttgattcacacattaaatattacaaagaatgaatattgtaaataaattgtacaaaaacgagatattattgtataattattttagaattaagataataaaaataataaaaactgatataaattttaaaattaaattatttatcaaatgttggaaaccggaaaccgacttaaacatgattgaaaatcttatgagtgaaatcggccgagttacagcccaatagttcaaaaattgggccggcccatacttggcccattatttgcctacttaactgacgaagccccattctgcgtcctgcaaacgctgcgtttcagtctcggtcgagctctgagctcaagggaaaaagctt

SEQ ID NO: 12421 - DNA, 6565 bp, Vitis vinifera
  Intron number 6 from transcript GSVIVT01023507001 (locus G SVIVG01023507001) derived from phytozome v7.0 (chr-ID chr1 4; pos 10758764 to 10765328 reverse strand)
aggtatcaatgttatcacaaatatactttcgtatcaatgttttagtctacaccagtcctattttgtagtcataatctcttttgttctatttctacctgttatttgattttccttttgtttattttaatgcaataattaggttagggcattaacagatgtacttatataaatggtcctaaaggccttctttgttcttcctttccccatgtcatgcatatacatattttttggatcagcaacagcaaattcattgcatcaaaatggttagtacaaagaggattacaaaatgttccaaatacaaaatgtagcacagaaatcatgatacaaacttaaggtagtaaaaaatttcttacaagagaaacggactgctttgctctttgttggctaaattttatacagcttgatcagtctagtgtggaacccaagaaaaagagtatcccaataaaggtgtcaaacttaactgaccaatttagatctaaatatattcttagagttttcgagtcacgtatcatacctagaattgcttggttgattcattcttgaaaacttttattttttatttttaatcaaaaacaaaagatagattaattatgaaaaaagtataagagaaatgattaggggtcctccccacaaaatatgggatattgatcaaagattaaacaagtccactatacaaggagaattgtacacagaggtatagaccacttaaggattaacaaaggtaacatttacctaaaatcggactcaacttctcttattgttatccgctcaatttgatttataaactaaaagtcaactaagttgaataaccttgagtggaatgcctctaaagatggcaacacaagaggcccataaggaggaacaaaagtgaagtaaatcccataacatctattccattctccacttttcctcaaagatcctagtatttctctcttgccacacaatccaaagcatagtgtgacaagagattttccaaatggtcttgcctctaatagaacaccctaaatctgtaaatgagatggtcatcatgtcacatatactcctgggtggaacccaattcatcttggttagactgaaaagcttatgccaaagccctaatgtcaatgggcaatgtgaaagagatggtcgatcaattctccatttcccatgcaaaagatgcatcaataaggactaaggaatttataaggttttctcaattctagaatgacattagtgtttaccttcttgtgcgtcactaaccaagcaaaggccttgacatgtgatgaggcttttgattgtcataataatttggctaggaagaatgggattgaatttgataaatcagacaaggccaagaaaaatgattttattgtcaataaacttgaagaagataaagactaagcttttgtatctgtggtagatggagacaagtgcaaaagagtgagtgcatgagtctatcaaggttttcaatttacagattagtgagattatagtagaaggtaaggttctaagaaagtgaagaggagttactaaggacaaccgatattgtgataactctataaagacatgaaaattgttaacacaatggttgatttcctcaccaaaaatcttcctaaaaatggattcttgcctcgtcacccaacacaaagtgagtatatgaagagaagtcttgaaaaactcgtgcaatggccttctaaggacatctttatgaccatctaactagaatgttggtgttccatccattaggatatgtcccataaatgctcgaaataacttgatgtcaaaaggaaaaactttctctagggaacctctagagccgcatcccttagagcacaatttcttaagttttctcaatcactaaacatttaaactcttttggcctacacaccatgtcctaactgataagatgatctttttacccttcgttgtccctgaccaaagaaaatccttttgcaatttctcaatctttaaagctattgatactgagatcttgaaaagagataagaaatagctagggatgtgagacaagcatgattgaattaaagttatttttttttttataggtaaagatacaattcatataaaaagagacgccaaaaaagcaactcaaggtatacaatacctatatgcccacctccaaaagggctaaaaagaacccagatgacccagaaaacaaccttaagtagagcccaaccaatcaataaaattaactatagttagaaggtcgtcaactataaacaacttaacctctgaccaaatagaaagagtatttcagactctggattgacaacacatcatcctcaaaggccaatctatttctcgccttccaaaccgtctaaataatgtaaagaggagcagctctccacaccttctttcgcttttttcccacaaaagaaccatgccaactaagtagagtctctctaactgaagaaggcaacacccaagacaccccaaataaagtaaagagtaaatcccataaagcccttgtttttgaacaatgtagaagatggtatatggtctcctctttctcaagacacataaagcatctattttccaaggcccatcctcttttctgaacaatatccagggttaagactttgccccacatagcctcccatgtaaagaaactaatcttgggctgcacacacacattccaaatgcagctagagggaaacaaggaaggacaacctgcttctagggcaaagtagagagacttgaccgagaactttccactctttgttccagtccacgacaccatatcatccacatctccaagcactctcttcccatgtagccgctcgaagaatctttccgtctcctctacctcccaatcattgaaagctcttgaaaaacaggggttccaacccccccaacccccctcagccaaggggtcccaaatatccgccacccacgcttccttatcaacagacaaagcaaacaaggaaggaaaagacacacataaaggggaatccctgcaccatctatccttccaaaatctcactcttcgcccattacctacaataaataacatcctggcgcccaccaactcccaatccatccttattccttttcacagccccacaccatgcgcctctctcacttcttgagagcacctaccccctctatcttccccatacttccctctaatcacttgattccacaaggcctctctctcatttgcgaaacaccaattccatttagaaagaaaagccttattgagaatggaaagacatttgacccccaaaccccctttcttcttacttaagcacaccaactcccatcttactaaatgaggctttcgctccaaattaccactaccccaaagaaaatccctttgaatttgctctagtctccgtctaattgagcttggtaagcgcaatagtgcttcggattagagtcaccttccctcccttggataaatattgtctcttccacatggctaaccttctacggaaacgctctttcactccatcccacactgttactgacttaaacagagcacccaagggaagacccaaataagtggacggtagactacccactctacacccaaagtccaaagcaagatcatcaatattctctactctctctattggaatgaattcacttttttccaagtttattttcaaccccgacacggcctcaaaccacataagtaaccaactaaggtaagtcagatggtcttgagaagctttgcagaacaccaagggcccttttctctcctccaaagacaaaagggcccttttcccatctagtctccttgaggcgctatcaactactggatcctaaaatctacatgagaatgagttttaaaaatgtagactagagtacaactaattgaaatggacatgcaggtcatttaacgtcatttaatgggattgagacaaaatgttataaatttggtgtagctacaacctttttggacactagctggtgctgtttagttggcaatgaaggttgaaggtcaataaagattgtccaacaactacccgattaaagagcaagggggcatgatcaattgggggataataggtgacatggagatgtcaagtagaaatcaatagcagcaactgatgatttcagaattctagattgaacacttacttccaagctcgcaaccaaggccaagagtgtgcaataatgagaaataatattcttgaagacaacttcaactcatttaagcctacgagacacaataatatgttataaatgtggaaaaaagggtcacaaatcttttgattgctgaaaacaagccaacaacttactaattaatgaagatgaaggggagaataatgataatgagaagatagtgacaaaagcttagggtgatggagggatgctggaattcacagaagatgaagtcacataggaagaccatgatcttccgaatttagtagtaagacgttccatgttaaaattaaaacctttaaaatgcgattgacagagaaacactatttttaaaactaggtattcttcacatgggaggctttgcaatgttattattgatggggagagttgtgagaatcttgattctaaaaaagtagtgacaaagctcaacttggaagtgttgccacatcgaaagccatgtcgaattagttgctttaaaaaggaggtgaagtggaagtagtgcatctcccgttcccttctcaattgggataaactattcaaataaggttttatgtgatgtggtggaaatggaagcttgccatttgttacttggaaggccatgacaatttgacaataaaattgtccaccatggagagaagaatgtttatggtttctacaaaaatggatttaaggtagtatttgcctcgaacagtttgttaagtctaaagtagaacatgaacaatcttatgtgaatgttcaatgctttttcaaagagtgcgaagctaatggagttgcctttttgctgttggcaacagaagtctttgaagatcaacaagatgtttctaacaaagcaaagacactattggaaaatttcgtataagtatttcctatagagcttccaagtggattgcctaaaaaaagaagcatccaacactatattgatctagtaccaagagctagcctaccaaacctgccatattacagaatacctccaaaagaacatgaagaacttcaaagacaagtacaaaagttgctgcaaaagggatatataaggaatcaatgagtctatgtgcatttccagcactattaactccaaagaaagatggtttggagaatgtgtgatgtaggacaaccctaggatggttgcctacacttaagggtaggtggactagggttttatttttagggtgtaaggagaggaacaatgaataaattttatggtagagaaacttataagataagaaataaagagaaagaagaaacaatgaaaaaaagatggaaaaccttagagtctctctaaggctttctaggagtctctctaaggctttctaggagtctcacctagaagaaaatcaatggagtctcaccattgagggtttcaactttgcaatgaaagaaaatataatattattaatatcaattcatccccttgatttacattgattaacatatttataggcttgtctaagaaatccaaagtctactaggactctaataacctattatgattctaattctaattataacatccaaaatctattaggactctaataacctatcatgactcaaattctaattatattgtaacttaactagctaatcctaattagactccaacaaatatcaatcctaattcaattgtaattagtagtaatccaacttaaagtttacttaggtcttccctttcctcattgaataaattttaaaaggctttccccccgtcattcttgctcgttgttatcaatcttggcaatgtctaagagaatattcttctttttctcctttaaattcccaaaggacgccctattccaatatttcaatttagatttaacaaaagttagcttcttcatgaatttaagaccttgccaaccaccaccttaacactcccaccacccaaaactaaatcttaccttgaaaacagggtggaacagctacacgttccttgaatacttctaatttgcatagtgcatgtacaaatttcaaagcttttgcaatttgaagtggtatgcttggtatctaatttgactctttcattttatgttttggtatggtatttggtaatacttttttatggattagaaattccagcatcatatatgtggaaacatcaaatcttaaagttgggatgaaatcagctggacaaatatgacatttcgaagcataaattcattgtaaacccacaaaataaatatgacatttcaaaataaatccacaacataactttcttaacttttaaatgtgcctatattttgttttttcttttttttttcttttgtcttctgttttttaatcctctgtacttgaaattaagcatggatgctctttttgtccacagatttcccaaggcaaccacatccttgtgtttcaattatttcttcactctaaatttttgctgaaattattgattttttttttttggacattttcatggaaaataacaatcccattctacaggtaaaacaggctgtgcttggcgttc

SEQ ID NO: 12422 - DNA, 2665 bp, Vitis vinifera
  Intron number 4 from transcript GSVIVT01023682001 (locus G SVIVG01023682001) derived from phytozome v7.0 (chr-ID chr1 1; pos 9123685 to 9126349 reverse strand)
aatctcaggtactattggatggaagtgaagagcataatgctttgtttcattgggtgataagtaattattttcatgctttgggcaattcattttaaaattttaaaatatttaatttatgcattttttgagttctgtgggtttagaaaattcctgccaaccaggtcactgtaggtaattgttttcttctttggtattttcacaggctctgccaataattattttcttattttctgaaatttgaaatttaaataatgcatttttagacaaaaaaatttaattgctatctttaaagaagcactttggtaatttcttcgtacttagtccacaactttgttgtagaaagctcatccgatatattattttttttccctagttgtttgatgtgattcctgtcttgaaattgatccttttctcatctgcatgtcctgaattgcttgttatacaatcttaacattcatattctggattgttagagtggctcttttttgtgtaatttgttgcataaagatgccatcacttgatcctgcttctggtcttgacttcctttatttaggttgctttgctatcttacctggaacatgctacttctttggtatacaaaacttagtctggagcttggcatgtaagtatgatttggtcaaaacctatctatatctgttggagcttgataaactagttgctaaatcatgaccaagtatatctttgatggtgagcctactagaagttaactacgaaaggtttatctttgaaatgctcaaggtttaatggtttatcagccatatcctattgaagtttggactgtgaacgacttatgaagcgcaagcaatcacaagagtgctcttaaatacctttaattgagggaatcctaacatttagaatgggggagagatttttggataacaaattttaaatgaaaatacttcatgcaggtatgaattttttcccccaacaaaaaatacaaaagaagaagaataatttgtagtgagtttaaatggtgccttaagaactgttagctttttctttttacttatatttttctcccttctttctttgaggaagaatagaagagcttcactgtgaagaagagactgttaacttaatatgaaccaagttttttgttttagttcttcagcttcaattctattgctttttgtttttagctttggctagaatttaaagctgaagccaaagccataattttcttaatgacaatcttggtattatgaacgcttcgttgaataaaaaactttctgcataagctaaaaaaaggggcggccacaaataatagtttgtccttgctttcatagtaaactcttttttaagttagaagctcttctggtaaaatgacccagtaaaattactcaaacacactcgaaaactcttattgagccaaaagaatgcttttggctcctggtaagccaatccaaatagagtttcaaccattaaactttcaaacaagattgcttcctcaaaccaacccttggactctatactaaaactcttcaagttttagatccctgttttgcctcttatacttgctttcattgagcaccaccacaaaaacaaccattgtgattaccctccttaataaagtatgattgtgtctcccattcaagtaaaattgaaaggcaatgacaccggttatttgacatatcaaaacaacctaagccatcatcaaaagaatccttttatgattcactactgtgaattttcttaaaccagcacatttcagatgcaagattaattgcacttgtgaaacaattcaactctttgaagcagactatgtgctagacctatttttccaaccttcattgattttttatgtttgaatttcttcatgctcattaattcaacatctattgcggaagtgtcaattggcatttggttgcttaaagggaaattcttgagttccgtagtgatatctttgtaaataattttatgtttttaaaaatttcgaatcactcatgatgtgaatgcttaaaagcacttgtgttttgattaataataggaattttagtagtgggattaaatggatatgatagaaagtagtagtgggttcatattcattataatatcatgtttagattaaactcctgggcacatgaattttctgagtatggtatacttctatataagatcttgtaatctagataataatgctatggttatatttttttttgataaataagcacaaattgtattaacatattgtttgttaatatctttgttagtgttttgttcgtccactgacaaattttaccttctgacatcaaactgtttgtttatgtattttgaactctaatatgactggtgatggaagaaaggactctgattgaaacttccaattttgttggtcattcctcttaataacccataatttatattcatacatatgcacagaatctgtttatatcaccatctctgtattctttaccacatatttagtcggttaagttgtcactttaatttgatcaatcaaccagtaagactgatatgaataatatgccctcttgggttgttgaattttggatgatgctgataattatggttatacagcgttagttgcttgtctttggcagcattagtttgattttatcatcacagacatgtttgaattctgacttttttccactttctcttctctctgtggacactctgttaacag

SEQ ID NO: 12423 - DNA, 2104 bp, Vitis vinifera
  Intron number 8 from transcript GSVIVT01016980001 (locus G SVIVG01016980001) derived from phytozome v7.0 (chr-ID chr9 ; pos 3144145 to 3146248)
acctctctagggcattagtatgcaatttactctaagtgctattctttaaattttgtgccttttattttaaaagaatttggtatttagtccttctttgaatcaatgctacaaataattcactgtactataaacattattgatgtttgattgattatatatatttccactttaaggtaaagctccttagtgaactctcgtgaaacatgtggtctttggtgcaagggttgatggaaacacaaattggaggtttcaattgttctatctctaatggatgattaaagaatatgacgccatgaacttgttcttattcataataatatgttgactatgcccagtcaattgtttgagattccaattggaagggcctaggtggtgagaagctataatttgagtatggaaagtcaatcctgaaaccttgtaagtgaccaggtttactaaactgcttgtctaggaagatatagctggcacatggaaaatatctatatattgtttaactagtgtatgagaagttattaatgggtaaccatattgtgttaattcttttttctcctcctttcaaggtatagaaaaaacaattttcttgaaacctactttcaaagaacaactatagtttgctcagttttttgtagtcttccttacttgtccagcttgtattgcttctcattaaggagtttctcttgttgttttaattagatttatatattgtggaaggatgtgttgtccttcttgatatttttaattaatagaaaagatttagtgtgtttctgataaaagacctactcatctgtctaaattttcctatacgtaaaaaaggaggggggaccttgtggatggattgtggactattatggattcatctgtaactatatcagccttttttttcccacctgtttacattttcctttgctctttcattacacaaagtttgtaagtctgcttgttggtgtttccaactgtttttcactgatcaatgtccttccacttataactgctccactacatgcgttctggtgtagcttgcctcagaatacaaatatagggatgggctgagtcatgcatgctcagatctaagacagaaaacttacaatccgattatagatcagattcttcgccagcaagaaaaaaaatcaaaatccatgagctacgaggataaaagtaacaagccttagcaaagaaagggaagaaaataagaatttctggaatctgaatactattcacccaaagtcataccttttgagtcttataatatgtaaacttagcatacttagtctcttggttgagctggaaatccttttattcctatgaaaattagtttcttactcccttgaactctaacaaactcataaatgatcttatgctcagtccatttccttggaatgaaacccatacctataaaatcccataatattgccccgaattctaaacttggtaaaattcctaaaaaatctctaactcgctgaaatccaaataaactaaattgagtcatacaacagaataaattaaaatattatcaaattggtcctaaagtccctttttagattttctgcttttgcctccaaaagttgcatcacagtcttcattgaatctcatttccttctcaacttatttgccctggttgggattagatcccttgtgttgcattctatgtatgtggtgtatacatccatctggtattaagtaattgggtgatgaaactatgcatgatttgcatacttagggtttggtatttctcaataaagccttggtgagcagattatgaagattacatctatgatagaagggttctatatctgttatttttcttgaataagctttttcaaggttggatttcacttgaaatgtttgttatgtttttttcccctcccattaaatagcatgtttttatgaatttattgattacgttgaggcagatttgctaccatggtgtatctaaagggctgcaaatgttcaacctagtgttttgtttcaatacattgatattgttttatggtctaatttattttgactgccttaccagatacatgatcttcccttctgcaatttttatattgaactattttcttttacagctagcattttcttctacaactctctttgagccgtt

SEQ ID NO: 12424 - DNA, 7645 bp, Vitis vinifera
  Intron number 2 from transcript GSVIVT01033753001 (locus G SVIVG01033753001) derived from phytozome v7.0 (chr-ID chr8 ; pos 18091471 to 18099115 reverse strand)
ggaagttggaaccactcaaggctctacccaaaaaagtttctctctgatgttttaaaaattgtaagcctcatcactcaaaagtacgtagaaataaactactgtatgtttatttgaggaattaatatatttatggaataatttgagtttattttaatttgttgcaataatcacaaaaatagatatattatacggaatgctaaagattcctctccattgtattagaagtgctcttaatttttggaacggttattattgatttatgtctctgtttcatgatatccactctaacattttaattatttttcgtttagaattaacctttttcatatagaagatgacaagttgttattagtctactctaactgataaattgattttggttttgaattcttaatacaatcaaacacaaaatccgaattcattgtcaacctaaatcaaccgtaaattccatctttaagggtggatgatcatcccctcttactaatttatgaatattagtgggtccatcaaacccaaatattctatgtaatttcttttaaaaaaaaaaaaaaccaacgtggcttgttgatacatgtagaaaagacggttttcaaaataaaatatttctaaaacaaattgaagaggttaacatatataaaattctatatatttttagttaaatatcttaaatttaaattttatttatttttagtatgtaccattaataaatgatggtcataataaggtttataaattattttcaaatataattaaagacaaagaaggtagattttgtgagactgagcttaacaaataggtcgattatttgtggcattttgtcattatcgtaggctcttcactttcattacatcaatatgcattgcctcgcaaaatagcaatagaatttctctaaacatttttaattgactaattagacaatatcttattttaaacataggagttactaagagttaaatttgaaaaaaaaaaccgattatatgagaaatgctttaggaagttataggggataacctagattgccatcttctttgaataaattaggtatacagacattccaacctattttagtggaatgatgtgttatttgtttacaataaggaattcaatgtaaattttgacgggatcgaaaataatttttttctaaaaatatgtataatagtgagaaatggaagcattaaaagaaaaaaaaaagcgtattcaatgattttggataaatttatgttttcataaagacatataagctaagtgactcaatttaatatataataagaccattgttagatggtaaaatttatacattatgcctaaagttgattctaaaaatgttaaagtgattttttttaataaaaattagatatttaacaaaagtttaaaaatcatatatttaaacttattcttgatttaatacttgaaatgtgcttctcttaattttttttaatataataaattagtgaaaaacatcattaaaagtaatttttaatctttatttaaataataattaatttttaataaaataatttctaataaaaatagtattaataaaaatatttttaccataaatacttcaaaatataatcccgagatatttttggtttcaattatcaacttctttatatacctaatttctatttagaataaatattccaacaagggcatattctcacaagacaagctgtcaggattctgagattctcccatgcatatgtccaaccacactcaaagattaccacagaggacatggcaattggcaaggacgccagttctgcccattacttcatagctttattcgcagttcaaaagtacatatgcatactggctaacgcggaataattaatatcaattctatacaattcaaaccacaaattttcttcaggactttttttttgggtattgaaaaaaataaattcctatgttttattatcacctggggaaactcgcacacaaaaaaataaaccgtgtatcaggttagtggggagtccaacggggtccatgctctgatctagtgttttgggcggcttaatttttttaaaaatactataatttcagaaaatattttttttaaaatcttatatcttaaaaaatattttcaggtccatcacactttgcaatgaaattgtattttcaagataagattttaagataaattataatgtgacgtttttttatgaagtttatatggcataaagtgctataattttgttaatagttttggaactgccaatttttacaaataatttttttaatttactataaatttattaaaaatcctagttttgggctagctacaaaagttcgttctggaatttgggcttgaactgtccaggcttaggttaaattgatgatgtaaataaatttaagttcatttgaaagagtcaaaaaagttaagcatataagaatttaaaaatgattttgtttttgtttttcttttttttaatagtttttgctattgttgtactgtaaaatttaatatcctttcttgtggttacatttgcactatataaagggtccacgacgaggtccggggctgcgtgtacatgcccaaggacaaaaccgaattggctcgaactgtcttatacgcccaaaagtctggtgaattgggttttcttctcattccaagacctagcccactctaccatactatgatacttatgacgcaggcccaccagggtaattcgcatagctatggactacctgaaaggacaggtcaaacatcaacccaattagtaatttatttcaggaacccatcatagagggtttttacttttcagagacgcaacactgcatcctttgtgggaatcaggaaacaaaagattggtttaaataatgatttcaggagcatgataagagaatattccaacacagtggaagaaaaattattgcagcttgagagaagactggacaagcaacgagaggaacatgaaaaggaaattgatgcgcccttattagctttggaagctctgtgacaggaaaacaagatcttaaaggcaacagctacggccattccgtggaatctcgaccttccctccagtcagctgcacccattgaagaggatgtgagagcaaccaaaccgactagtatacctaaacaagattttggaccaaaggaatcaattccaccattgagtgactcaagttcgtattcgagcaccgagcaagccagcgacggttctgcacaagccatcttgtacattccagacaaaagtcgatttatagattggaacgggaatattgaacatgtaatatgatgttcataatgttaaacgatatggttgcaacaccatttacttctttgattctgaggcaggtggctccacgacatttttcaatacccaaattcaatatatacgatgggaggggtggacgtatacgaagatcagaggtcatccagataggggttgttttgatagtgttacaacatctttttaacgatggatgaggaaaccaaaagtggttttgaagtagaaaagatgattaaatagcaattactgcatgactcccatctaaataacgaacaaaagccccatgtcgttgaggcattgcgtttttatcatttgttcgtctcaacatttacctatctttatcttaaattgacatattattaactttcttacaaaatcttataaaataagatgaattgtccattaaggtaaaactcctaaaaaagattaaatgaccaaacaatttgaaatccccgactaaggtgagatgcataattgaggagaaatattcacaagccaaggtgaaatgcctataaaaacaaaatgtttagcaaggtgaatatccataaagatgaaatgcccaaataaagtgaaatgtctaaccaaagtgaatgatcaatcaaggcaaaatgctcacaaaggcaaaatgcccaccaagacaaaatgtccacctatagtcaaagatccaacaaaaaaattcaaggggagattgtatactttcaaaagttgaaaagtccatccaaagctatacagttcacttaaagttgaaaaggccaaagaaaaatcaaaggactattgtgtgctttctaaacttgtgtacactttatgatcataattttgacttcagaacaaaaagttgaagtatcacacatttcttgaagttgtataaaccataatataaaaaaaacgttaattaagagttttgaaaaacttaaaaaataaactataaataaaatataaggaattgattcatccaaaaaatggagactttgagttcttaacattagaagaagggtaaaagaatcagtattactaataacacgagctaaaaggtcatgtacctaaaagcataaaagtcccatagacaagtttatgatgattcaagttaatcatttcctatcaacatttgaaaaattaagcactagtcattatccttataccatgtggcatcacaatgtagctagaaaacctcacttaggggcaatgagcttcaccaatggcacaaaatggcaagttaaataattttttctcacctataaattctctagagacgaacatataggtgagaaaaataggagagggttagtcatattctttagttggaaactttaacatgtgaagtttaggattgatcaataagtctcttgtgccatggagaaggcaattcgtgttcgcatgaatataagcattattttggtttgctttaaaaggaacacgagcccaaccccgaattcctcgagaagacaaagcctatggttgaatgatgagaccacatgtggcaaggataatactatataatgataaatctatgataaaaaagagatttttttttttgttacaacatttaaaaaacttaatagtaaattaaaaatgatctatcccaattaaaaaataataaataaataaaaacaagtccttaaaatgaagacccgagttcttagagacacaaaaaatgatgtaaaaaataattagccacattcccctagtcacgtggcattatgcggcaacacactcactaataggcaagtagcctgcaaaaataaaacacataaaaataaatatttttcttgtctaaaaactccttaaccattgtgtttataaccaagaaaaagagtacaagtgaagtggctaggaaaaacttgcatcagataatataagttattcgagcttgagactttagtaggagattcgtcttcgtaaagacacaaacctcaatatcttcttaaaacgaatcccatcaacaaacaaatgcaaaaccctaatgaatatcgtgtacaagcaagtacaaaattatgtctatgaaaaacatgagaataattttttattattgattctccatcagaaacgttataatgatatttaaatagtttttggtatgtataatttaaatccttatggttatatttgcgttatataaataccaaattttttaatagtttttggtattgtataacttaaatcctatggttacatttacgttatataaacaatccacaatgaggtccgaggctttgtgtccaaggctaaaatcgaattgggctataactaatgcatcatctatgcattactcaagggctctttagcccaaccccaccagatcctggtatattttgaacaagcctaacaacgtaaattgtatggcttgaaatggtgtataggagatggtagaaaagtctacttctggatagactactgggtatatacgttgcctcttgtgtcttttgtggatgaaaataacttacattacatcaattgggatgccaaagtgcatgattttctaaattaggatgccaaggaatggaatctccaagttatttcaacattccttccatcaaatattttagcatatgttaaagcaattccaatcccttattctcccattgaggataggattttttggattttttctcaaaatggtaagtttactcttaaataagcaacttgggcaatgaaaaagccttcgatgcaccctagataaaaaatgttgcattggatttggaagtcaaatcttttaccaaaaataaaaattttcccatggcttgttattaaagacgtcctccctacttgtgagtttttaatatttaaaaggttggaaattacaaacatgtgttatctatgcaaataaaatgttgagaatattaactatattttcaaatattgtccttttgttcaaagaatttgggatcgtcactacaagaaatttgaccttcagccacaaattttttggccatgaatataatttcatctctaaagatgatattaggagacgaaatttgagtttgttacgaaaatttgtgtctaaagttttagttgaatataaaatgaggccaaattatttgtgacgacatcataatttttaacaacaaaatagttcatggtgcaaaatatattgggagacaaaaagctagtatcgtcccaaaaggtaaataatgggtaacaaaattatgttgttgtaaaataattttggagagaaaaatcctaataatgggagacaaaaatattgtcctaataccactagatgaatgaactaagagaattattggagaagaaattgttttattgtaaaaactcaatattggagacaaaactatttcatccccattaaaatgcattttccattttcaaaataaatttatcacttttaaatttatttatactattgaatacttaacatgatttatttgttttttgagaaagtttcatgatactttaatattcatgaaacaacacaattattattaaagaaagtaaatattatttagaaataatgtgataatgttattattataatatatatatatatatatatatatatatatatatattagaatcaagaatgaaattatcagtaattacagatatatcggtacttccatttcacggatatattggaaatatcagagaaatattggtggagcaaaaattatttaaaattcataggaatgcttggaaaaactccaaaaaatgataaaattaataagcaagaatacacattttagagttattttgtaagtgtaattgacatagatatgatcaaaaagaaaaacattggtagattgagatatatcgatagattcgatatttgaattttaagaataataaatatgaattttggaagtgtataaaattagaattgaattaagaaatatttgatttattgaataaaaacaatttatacataaatataatacaattgacattgtaatagtctttgatatgaaaatgaagattaatgtggttttatcatatttttagatgaaaggaacccattttgttgaagataatatttattttaaaaattttaaaatacttttattaaaatatgtttttattacattttaaatgaaaaattaaattaatttatataaagtattttatttgagatttaatttctaaaattttattaaaaatatgtagtaacaactttttccattaacattaattaatttaaataattaaaatatttaataatttatcttattaaattaattttaatttataaaatattttctaaaaaaaccgaaatttgaatggtagttatttaatcaaaataaagatgataattaataattatttatatttgttctcatgatttgtcttttttttttttttctttctattaaatttaaaaatcaaaagggccacccaaccactttttcactcgggcatcaagaacccctttttaaaagttgccctccataccagaga

SEQ ID NO: 12425 - DNA, 11318 bp, Vitis vinifera
  Intron number 11 from transcript GSVIVT01013898001 (locus GSVIVG01013898001) derived from phytozome v7.0 (chr-ID chr 16; pos 6390194 to 6401511 reverse strand)
taggtactacaataataagttgcaaagaaccgaaggtgtgttggtttctttcttgaggttaatttggtgaaatattttatatttttcacttttagttgattattatgttatttattatctacatgaataaaattttaagttgttggttgtagcatgtcatacatatgcaatccaattaaagtatccatacaactccaagccatttggcttttcctattctttttattaattactgtctatgtttatatatatatatatatatatatatatatatatatatatatatatatagttagagataaggatcgagaaaattattagggaggaaggggtaaaggggagagtggtccttgtaatagaaagctaaaaaatgaaataagatatggaaaacaaatcattctccaatctagcaaaagaatgctaaaaggaactctttccaacttgaaccataagaaacgtaatgagagatgtgacaatctttcgaaaacatgctttaaggagctcttggtaactccttggtcacaaacatccaaagagtcctagggtaagtaaaactctctgaagcattccctgcactatatggagcagccaacacacttacgggagagagattacctccctatatgagtttgcctaaaagctaggaaagagataagcaacatatttgtaattccccttggagcagcccacacacatgggatagatagatagataggttttcaactttcttaataataatcacattagataaaaataagaattagttgaaaagtgaatttttgtaagaatatttagaagaaacaaaaagggattagtgttgaacaaaacaataacctcacaagactagtgttgaacccccactattcctcccctttcatctgatagtgcacgaagaactgttgcaattaactgcgcactcaagttttcatagttccctctcaaggttttgcaaagaatggggtttgggccgaagtggttgggatggatgtggagttgtatatctacaaccaagttttcagtcttggtgaacggagtaccagccgggttctttccaagttctaagttgttgcgtcaaggggatcctctttccccctatctatttgttatgggaatggaagtgttgagtgctctaattaggagggttgttgaagggggttttatctctgggtgtagcatatggcgaggtagaagacaagctgtcaatatttcacacttactctttgctaatgatacaatcgttttctgtgaggcaaagaaagagcacataacgcatttgaactggattctcttttggtttgaagctgctttagggttaaggattaatttggccaaaagtgaaattttaccggttggggaggtggaagaggtggacgagatggcagtggaactagggtgtagggtgggacagttgcctacagtctacttggggctgccattgggggcaccaactaaggcctctttagtgtgggatggggtggaagagagagtgaggaggagactgaccttttggaaacgtcaatatatatccaaaagtaggagaattacacttataaagaccacgatgactagtatgcccttgtatcaaatgtcccttttccgcatgccaaagatagtggcaaggaggttagaaaagttgcaaagagattttttgtggggagggagtaatctggaaaagaaagcccacttagtcaattgggaggtggtttgtgcggataaggaaaagaggggcttggcttaagaaagctagcccttttgaacaaagccttgctttgcaaatggatatggagacttgcttgtgttaaggaggatctttggaagcaggtgcttatggcaaagtatgggcaagaggattttggttggaggacaaagaaggcaaatggggcgtttggactaggggtttggaaggagattccgaaggaatctgtttggtgctgggaaaagttggcgtttaaagtgggaaaaggcaccaaaatcagattctggactgatctttggtgtgggtgtacagtgctgtcccaaagattcccgcatctttatgctatggctgtgtacaagaatgccacagtggaagagatgtgggaccagaatttcggccaaagcggctggaatttaaggtttcttagggactttaatgattgggaattggacatggttgacaatttgcttcttgctttgaggggtcacaggattactatggaggaagactcggttttttggaagaaaggaagaaacgggcagtttagtgttaagaaagcgtacagcttgttggcaagccccattgctgccgtttttccaaaaagtaatgtttgggtggatagagttccaaccaaaattgcgttttttgcgtgggaagccgcttgggggaaggtgcttactcttgataagcttcagaaaagagggtggtagcttcttaattgttgtttcttatgtggttgcgaagaagaaacggtaaatcatattctaatatattgtacagtggccagagtgctgtgggatattgttcttggtttgtttggcgctcagtaggtttttccatgaactgtaaaggaggttttattgagttggaggggcgcctttgtggggaaaaaaaggaaaaagatttggagatacattccattgtacattttttagacggtttggaaagagaggaatagactaacttttaggaggagagggggtgttagcaattcagaagcttaaaaattcttttgtttgtaatttatggggttgggctaaactgtatattggagaggagccgctctcccttataggctttttggaatggttagcttctagttaagggttggtgagtttttgtttatctttttttggttgcgaggccttagtcgccttgtatactccttgtatgctttgtgacttttttgcctcttgttaatacatgctgcgtttatctataaaaaaaaaaaaaaagagacaggatgctgagagatgattcctctttctacttaagatcttcaccccacgcccttttcttgcctccaaattctttagaggggagctaatctccttctcaaatcccgcactgagaactattgtaattagttgcatactcaagtttacgtagttccctctcaagataggatgctaagagatgattcttctttctgtctgagatcttcaccccatgcccttttcttgcctccaaattcttcagaagggagctaatctctttcttgaatctcacaattggcattcccacgaagttgttaaaaatgtacgaacttgctgggaaggctaataggatcctcttcttccaagatgcaagcatgctccaaggccttagagggtctcaactcctcagccctaattgctaactccttacctgaaggatcctttgaatcacttccaaacatctccaacactttaccatcccgaagcaacatttgaagcgatcggctcctagagtccaaaagccccaagctaggagagttaggatgcctattcgcctcctccatgagggcttcatcagtgagtgccacatgagaacacgacgcttgcaacaaaactttcctttccacctcatctttgacacaactcctaaactcagtctcttgggtcttagtagaagagacagcctcttcgagaagccgtagcgaacccatcgatcccttggccacatccaaaggaacactgcctgcctctcctccttaaaacctttttcctttccaaataaacctcttcctgtgtctggcctacttttaaggaatgccacccccctcatgaatccataaactgtttgggctgcagaagcaaaaggtccaataaggcctccaaggccttttggatcccgatccccacttagctgactgttgaacccactattccttgtcttatgagcctctataactggcttattacgaccttgggtctggagggacgtgtggtcaataggcccacccctccactggggatccaaagaaagaggcctagactcccaccaaatgcatcactccttctccaactgttgaccagcatactggggatccactcactttgatcttggtcttcccctacccttgcaacttttgaccaacatacaactacatcttcccttgtctgaggatccctgccaaaagtttgcaacacgacactgcctgcaacatgcattggttgcctttcctttcccactctcacaccggtgtgtgaaccacccttcccatcttctctttcctcttgactgcaaggctcatttcaactattggttgaagccaccactgaaaaactaggtggagcttcccaccacaactaaacggagaaactggagtaccctacttgtagagaaccgtgcaagactctcacgtcgaacttatccaaaatcctcgcctacagtagatcatgggacaagagcgtagtgtcctcatccacagtgacaaaacccccacaacggtcccctacttttttaaacacctcctgaccccatagttgtagcggaagtcttagctccctcacccaaaggtccttagtagacccccctttacgcagacaccctaccttaggatgccatcttattagatgcagaaaattctccttgaaccttcttgcccctctaacgggcaccctctttgccttaaagctatcttcaaagtcaaacaagagtagggctccctcgaagactcagatcttcaccccccttttcaaagaccagagactcatcacaaagtttctcaaccaagaaaaatttggtagctggactgatgtctcctcaaaccaacctaccaaacactgccttaacttctcctccctacacttcacctcaccctccaattgaagttgagcaacttccctaaacacccctgggtctttcctaaccacttctgcaaaggacccaacaacagtcccttcggtttgaagactcttcacctcaacaggggagattgctcccttaatctctgaagagggaacgattcctaaagaacaaagcttctccgccataatagaccatcccccaagatggctcctcctttcaaggaagatcaatgaaaaccttttcacctcctttgtaagaaccaaacagaacaaaaacctccctgccccatttgaacgccgctccagcttgaacttcctcccaccctccttccaagacatatgccaccttgctaagacttcatctctacggtaagtttccaccctttccaaaagataacgtaaactcaaatccccgaacctaatctaggttgtaaggtctctccctctttcctcaataatgcctctcaacttccctcccaccacatctatagaaatatcaaaggacttagagtctacatcagaccaacatcgccttccatgtgccgacataccttcatctttggcatatctttaatttgagttgtaaaggatcaaatacctggacatatacctgcatcttacgtttatacctaaatctaggcaacataggtccacattgactatcaactactcttgattggaaactgtctattgatgagagtcaaattggctgaacagccaaagcattgattaattggtaggacagctcaaattctgttgacactgatttatctagtttttaaatagcctttcaatattggtgtcatgtttactaatgtgtgttgcaggagtaccaatctgtgcattgttattgatccttggcataaaacttcagacttatagttaaatattcttttcaattgatcttaaagaaaaccaaggtttagttagtgtttcactcttatgaatgtttatacatttgtggattgggtaggttctctatagggcgtggtagtgggtttttgtgtctttgtgcatttttttgtcttttgtgttctttgtatacgacatgtatactttctttctcttaatacaattcttatttacctatcaaacaaaaccttggcatgagcttcataagctcatccagtaaaaattggcttcactcttaggattgacttttctctagcgagttatttggtgattgatagtgactttttagctattataattctattctagtggataaagttaggaggggttggtattgttgtaacatatagaaaaatctctttttaattgtgttaaaaaaggaaatttcttttctcttgcgagttattgctataacatcttatcaattgggacctagtgtgtagtcaagaggagttggaggtttgggctttaggaagacttctttggggaatcgtgctttctttagaaattagctttggaggtttcttaaggaaaattttgccctttcgcatcaagttattttgaatttattggacatatcctaatagatgagatgccaacattctggttagatcgtcatattgatgtccttgaaaggttattgcataggtatttgaagatttctcttcatgcacttactttgtgataggtgatgaggtgagagttcgtttttgggaagatttgtagtaggaaaatcaacaattttgttcatgatttttaggtctttatagggttttcacggttaaaaatatcattatatcttgaaaccttaatttttgttccaacctcactgatttggaaattgagaaccttgagatactcatgtcctcactcttgtgcacttgtcgccatccatcgcaaattcaagagcttcatctttatcctctttagacttatttttagtaaaactattctttttagctttgcccaacatatcagatccaatttctctctctagccaaattcttatggaaatctaaagtctcatctaaggttacaacctttgcttggctaatggcacacaagtaggtaagcaaccaatgacatgccatagttgagaaggcctttcaaaccccttaattatgattggtgcatcttatgcatggagagtggaggacgatagagatgtgagatctattttacttctattcttctacctgagcctccagttctaatgcctttaaaggcattcttcacaatgttattcatctcaattggcattcggtgtgtaaatcaaaggggtttgggcaacaatgagggtgagtttagtccagaatagtggatatgacatctatgtatatccttaagtggagtaaaaccattttgtataggtctccttatatagtggaggagctcagtcatactttgcttaatttcttgaatattgtggggaggacccctcatccctctcatgtactttttatacatacttaatacattttttattttttatttagaaaaaaagggtggatgaatgctaggatacaggaaatatatagaggatgacccaatgaaggttagcgagaaagaaacaaaatagacaaagcatccaccgtaagcttcaaaacaattaagaagggtagctatctcctaataaacatttcactaattgagcatctctaaccacctagttgactgatctggatctccacaaaaaagtagatatcatgttaaactgttattagcttgggtggactttgtgggtatgtggggttgtaagtaggtttttgttgaaatttctaccaagaattacttgaaagttagatattgaattaattctttattgttctaaagttgttcaaatgcccaaaatataagttttcactagaaatattctcaaccaagcaactttaatggagaaaaataagtcaagtaagataatatatttttacttgaaaaccctctaaaaggggaaaaaaatcatgggacttctgtccaaagatatttatttttttgataaatgagcacaaatatattaaagggcggaaagccacaaagcatataggtaatatacacggcagcctagaaacaaaaacacatgaacaaaaacctcaccaccccttaaggaacggcaagccattccaaaaaacctaaaagcgaagaggacttttctcccatatacaccctagcccaacttcacaaattacatacaaaataatttttcagcttctgtatagctaaagagccccccctaaaggctaatctatttctttccttccataccatccaaaaaatacacaatgggatggaattccaaatctttttcctctttttccccataaaggggcccctccaactaagtaacacctctttgactgtctctgggaacacccaatgagccccaaataaggcaagggcgatctctcagaggaccctgaccactatatagtataaaagaatatgatttacattttcctcttcacaaccacacaaaaaacaacgattaggaaggtgccagccccgtctttggagcctatccaaagttaggatcttctcccacgtggcctcccaagcaaaaaaaacaactttggttggaaccttatccacccaaatgctctttttcgggaaggtgatggcactaggggctgccgatagcttataagcatccctaatccaaaaagaaccgtggccccctcctttccatatcactgagtcctcttctgaagaaatcctcaagtccctcagcatatgaaacagctctcctatagcatccaactcccaatcattagtctttggagaatctaataatccaacctccttgaccaaggctagaatcccacatttcattgactgtagcgttcctttggaccgccaaggcaaatagttggggaaaagtttgggacagcgcctcattaccacaccactgatcagtccagaaattgaccttagtcccctctccccccttgaaccctatgttatcccaacaccaattcgtgtccttcaaaatctccttccaaacccccactccaaacgttccacgagcctcattagttctccaaccaaaaccctcatggccatacttcaccccgatcaccttcttccaaaggatttttttttcaagggcaaatctccaaatccatttgcctaacaaggccttgttcaagagatcaatcttccgaatgcctagaccccccttctccttttgagtgcacaccacctcccaattgattaaatggattttcctttccaagcttccccctcaccaaagaaagtccctttgtaatttttcgagcctttttgctactagcttgggcattcgaaagagagagaattggtaaataggtatgctggccaaagtacttttaatgagggtagttctcccgcccttcgacaaatattgtcttttccaaagggctaaccttcttctcattctttcttccaccccatcccacatagacgaggccttgtgattggctccaagaggctgtccaaagatatttatgagacatggaagtacgagagtaccattatatgccagtcatattcaacttctatccactcactccataattctgtagttatatgaattcttactcttattgatcatgattccacatgttttcacgtgtgaatacctgtactgtccctgatccgaagctttggtaaaccggactttcaccagaacctgtcaatcctcacaactaaacactccatgagcagtagggaaaggttttctcagggtgtctactgatatgattctgtccatagcacatttagttggctcagaacaatgtctttttcagtttactcaataaagaagacactctactaatgagataaagggcttggagagatgattcctttgatacaatcattcaaccattaagtcttgcaatggtgttctatcccatgtccatgatattcttttaggtatattgcaactcttgaccatgacccgaaaggatttcctttttgacttgatgtatacaggatgggattggctggttttccatgttggttctcttcagggttttttttttttcactacattgtttttttctccacattctgtcaaattttcaaacagccattgtattctctctgtcaggaataatagaaaggctgttttgcttccattctaggtttttgagatataagggaattttttgctttctattggttgtgaactcaagataatgaattctgttttgatcctgatttttcttatgaaatcccattcatttcttcccttttgtgactttcaattttctcagcaagccactccacacctttgttctctggctgcaaagtcccaggctgcctctaatccttttttgcctctaatcctttgttgtgattatcatctatgcaatgccattcccatatgcaaccttgagataacaacatttccttcgctagatttagaggactcttaattttttgcctatgttctatgtccaataaaacaatattcatagtcagatttgtattaaacttattctacaatttttgaatttgtggtttgatcaaatcacaaataatagatattcatatattcaagcagttaatcatttgcaaataaaaatatagaatttgattaatcaatttggtaaatatattaaaatatacttaaggtcaatgtgtttaactgaattctataatccatatgcattaaacctgttttactaattttgaactgttgttggccaatgaaataaaaaatagcagatatttgtatcctaacaattagctcattgtgaattgaaatattgaactagattaaccaacattggtaaatacatataaaacttacttaggcctgtttgttaatgtaataaataatcaatacgaactccattaatcatcatcggcaatcttttacgtggaaaacccttttggtaaaatctcaagattagaagttagatcaaaataggaagcttgaaactttactcacctgttggttgagatgagatttctgttgatcaagtttacataatttgagcctttggcttgctgctagatttcgcaaactgtttgcttctccagcatgattcgcccgagagtttcaagggttattttgagaaaatttaggccagatattaacagctagaacctaaggtctataattacttaccatcctaagagtgtggaatgaaaatggaaccaaaagttttcaaatgcacatgcatggctttgtttttgcagcttcaacattatacccaggagtaaaattactcaaccatactctttcctgccgatttgcaaagggaacttgccaagagacacatgtctagaaattggtctctggatttacaaaaccaacactttcatctgttttttaatttttattcttgctggtggcattacatgatttggctttccctccttgcattctctaacatgtgctttctttgagaaataaacctgatatatacattttcttgtttcatacatgatcagtatagctatcttgctgcccttgtcaaatttttcctcattttttgatcatcctttgtgttttggatggatttctcatccttcacttgtacttaggaatccatattaataaatacttttgtttctgattaaaatataaaaaagacctgatacatactctccatgcagtgacggaagacttctcctgtcccttctgcttggtc

SEQ ID NO: 12426 - DNA, 3284 bp, Vitis vinifera
  Intron number 1 from transcript GSVIVT01035184001 (locus G SVIVG01035184001) derived from phytozome v7.0 (chr-ID chr4 ; pos 10045738 to 10049021)
ctaaagtgatttgcagatttcgttaaaagcccttttggattcatcactcttatatagattaggcataaacttacagaagaaaatatgaaacataacagtgattgatatcttgattgtaaaaaagcatccaagatatgattatgcagaatcaaaattccaatgatcaaatttacatttattttgccttacggcgatttataattataagtaataaccaaaaaagagaggagaaaaaaaaagaaaaaaacacggtgagattggaataatcccccctaaatacatttatcacatccctgagactaaattcaaggaaaaaaatgaacttgattcagcttttcccttcaaaattttagttgtggtatgaggactcttgctgtacagttcctttttggttccctttttgagtattgataatcaaaattccttcatgtgggtgtctctagattggcaggaatcaagggagatctcttcatattgtttctttgtttcttgtttgaaactttgaataggaataagggagtgaagttgattggtggcaaatattaattataataatataattaatatttaaggcaaaaagccttcaatattttattttcattttatttaatataatttgtatttattcattataataatcaactcaatcttttttttttttcagaaaaatattatttagtaaatgcagcatatacacacttgaggttttatgacaccatatcgtaatgtgcgctattggttgagtgattttcgtagtggtggtaaagctgtaggaaaagatgagatattcaagtaatgtcatgcaagattaagaaatgtcattgaacatgcttttagtgttgttaaggcacgtttcccaatattgaagagaatggtaccttatttgtttactactcaaacaaaaattatcatgacatgcttctccattcacaattttcttcgacaaatctcagttgcggatagattattttctaaatatgacaatgcaaatcaaaatcaaaactcaactataaacagtttttttgcagcatttgatcaagaattcatacaatagttctaagaccaaatcgcaaatgaactctttcaagtatttaattaacttgtcatttttagtttttttaccattgtaagaaatgcaatgtttagatattagcataaaatgtgatgtatttggatatttgaaaatatgtatttgaattgttatgttttttctttaatttgatttaggttttatcaatttgtttaaatattttattttaattatataaaaaataaatatattaattattttttgtaaggatgataatgataaattatttattataacaattttattattttgaactttttagaaatacattaaattatatttttttaatacattaagatattggtttttagtatataaaaaaacaaatagctaaatacttaatagaaataaaatattaaaaaacaaataacttaatacttaatactattaaacattatttggtattaagttaaatataagttctatttagaattaagccaaaaaaacaaacgccacttgagtgtcaaaaataaaaagaaaactgaatcttttgaaagattgatttgattcttttaattgaaaaattatttttgactaaaataaaatcttaaaattaagtttgaagagtttagaataccatggaataattagaaacattttaaggagtctctaagtagccagattataatttacagagtcaaatatgcagtgggctatcaatagtgtcaatagaaaaccttatttttgaaaattttttgtatgtagggatttattaaatcccattttaatctacattaattcattcataaagaatctattagttggaactatgaattttaattcacgtgtattttaaaccaaaattcattttaaaaacctttcgaagttgcataccgaataaaaatgatcaacattattctttttagaaattgaaattttatacttaaaagagactaagataggttttaaatataaaagaaattcattataaaagagactaagattgatattgttattaatgaggtataaaaacaattttcaaaaaagaaaaaaaatgattcatacatatttttaaatttggattaccaaaaaaattggaagtaagcatgtgtgaagtcgaattttcatgaatcaaaatgcattttaagcatatacatgatcaagcaacaaatctgtatggcctttcttacatccacaccaagtcactattcctataatccaatgaaataagcatgagaaagtaatttaaaattggagaaaataatactaactggtgcttaacgatgttctgtagctgaaggaatggaggcattataagtaatcttttcacactgatgaagataagaaatgctgatggattgattctttgatgaagacctcggtagacagaatagcaaactgtgatggtgatgaattacttgtcagtagtgaagatataatcctatgatgattccctcagatgaaggcgtctgatgatgagaagagactctttcggagataagtaaattgacatcgataaaggtgcaaacagaaatttgaaatttcctgagatgaaaacgtgaagatgctgacacaaacttgaaacctctggtttgatgaggattaatatggcactacaagtgtttcttgttttggttgtgagtgaatgattaagatgagtgaactggtaagtgatgaagcccgtgttttcatgttgagacatcaggttgattcgaaaggaagtacgctgctgatgaactattctagaaagagataagtgacaatctctagtggcagtccttctttccaggtcggtgatggagatgtgagtgacgttgtgcccatgatctactgatattcactaaaatggcgcattgttgacaaattccctaatagaaaggatctacgctagtgaagctggtcccctgttctaacgctggatgcatggtgatcaagcgtcgatcaagtgttgttggagatgaagtttgtttcttcaagaatgccaagaaagcttctctgtcggtgatctctttcttctctcaacctccgaagtctctagaacgaccacctttattctttctgatgtgatctttttattcccataactgaaaagattcttcttctggagacttctcttcaaaaaccgcttcatcggatgcatggtagttagaaaatgtgacccacatgctcccttgtatggcttgtggtgatctctctcatgtacaggagttccaattttaaaccagtcagtttcaaatccaaggcgctcacctgt

SEQ ID NO: 12427 - DNA, 6053 bp, Vitis vinifera
  Intron number 4 from transcript GSVIVT01016428001 (locus G SVIVG01016428001) derived from phytozome v7.0 (chr-ID chr1 3; pos 4009345 to 4015397 reverse strand)
taaaggtttggttctatgctattggttgactcattgtcggcatgaacaagcgattggagctgggcttatttaaagtttgaatctgatctaagttttgaggttgcaatatatttgatcagcccattgggcctaatccaattttctaacttgatatataatctggaatgagaattattcaagaacccatggtcactggatgatacgagaggcccactctctaaacaagcccataacatatggattcagctattactcaacgatggcaccacatttactcatcaccagagccagtactgatgtgtttcaatacaaaattttgtgtctttcaataaaggatgtggacattggaaactaaaagaggcagaaactacatattgggctcaactgtatcggcccaattggggttgaggcagtacaaacacagcccaaattggcatctcaatagaatagggatattggccagcccaagttttaagaagccgcatgcccctgaaaattccaatttgttttgtgaatatttggtttaaaagatcagatattctcaaatagaaagaaaatgctgttaaagtatccaaaaaataaagggagatgtaacaaatagtagtaaattaagaattccaatagtttaatttttataaatgaacagctcacataatttcttcataatttcagtttatgaaaatatgtaaaatttatatattttcagactataagttgatacaataattttatgaatatatttaaactaatagttctatattatgaaaaaatgtgaaattttatatacaaaaatgtagtattacaaaatcatacaacaagcgaatagcatatagaaattaaatttatatattgaaattacaaatatcaaaaaaaaaaaaaagaacgacttattactagctagaagctatgcttaaattgttatcctaactagaagctaaacaattatttgattttttttattatttaaatattcttaagtatgatgctttatttctagattattttttagagggttctaattaaattatatataaaagcaatgtaaaaatgcaaagatgagaaattcttatagtttaaagctatgaaaaccatgtgacaatgaggaaatttcataacctaaggttatagctataagaaattatgcgaaattaacttgtctacgtgatatttggtcattagaaatcatataatatattgttattattatttttttctataacttcttgttgagaaatcataatatttttaaatagctttttactataaaaaacaattttactttttttttttttatagcttctagttataaaaagatatataacttatggctacataagtattttagaattacttatttactttatagtttctagctatatcaaagctataacataatttaaatagaatttaaaaaattaaggtaaaatgcaatatattgataatatatttgtggaccctgcatttcagctcatgcgttttccactcgatggcaagctcgatttttatttgaaaatgatttttatttattaaaaaagaaatgacttggagtcaccacttacttttgttttatttttaaaaaggtaaacaaaataaaaaagaaaaccctaagcgtgactccttattttggaaaaaatagtctgtgaaaaaccagatcgggctcaaaggttaggttacttatcgagaatgtatggtaaagaccgtacacctctctaagtccttaaagttgggtatctactaataaaatggagctgacgcggcaatcaataaaaaagtcaatagatattcaaatcgatcatgcacatataggaatcaaagcatgcatagagaatgaccagaatgggagtggatgcgtacctgggctatgaatgagcaatgtgctatcaaaaaaatggggtcagtgtacaataaagagcacaaaacacattacatgcatcaccaaacaaaaattaaaacagttcgaggaaaaactggatttttgaaatttattggaaaattggaatcttagagattatttgaaaattggagttttaggtatcatttgaaaatcagacttttagaaattaaatgtaagaatgagaattttagaaattaaatttgaaagaggtgggaatttttgaaaattatttgagagttcaggatttttaaaaaaatttaaattacaaaaattgggactttggaaattaaattttaaaagaaatcagaattgaaaattatttgaggagcagaaattatgggaattgaattataaaaaatggaaaatcttggaaatcatttgaaggcataatttttagaaataaattaatcaaatgataataatgatgatgataataaataagtaacggaataaatgcgaaaattggagtattggaaattgaaaattaagttcgaaattagaaaattggaatttcagggaactaaatttggaaatcggaattttgaagaataatttaaagtcggaattttaaataaatgaataagtgaatgaataaatgaatggaataatgatgacgaaataataatgattgaataaataatcgtgatagttaggatctcgaaaattggaaattgaacttagggattggaaatttaattaattacttagggatggaatttcaaataaatgaacgagcgaataaataaatggataaaataacgaaaataataatgtttggataaattattacgaagatgagaattttggaaattggaaatggaatttagagattttaaataagtagataagtgaataagtaaatgaaaggaataatagcgataacgagataataaatattaggtaaatgattgcgaaaaatagaattttagagattggaaattttaatttggaagtcagatttttaaataattgaactttaatgattgaaaaattcttttggggttggaagctaattataacatttaacaaacataacatttaaatgaataaaagtgaatagtggaatttctaaggttggaagtcaaatttggaaggcggattttgaagaattaaacttgagtgattgagatttttaaataaatagggaataataatactaattaacaaacataatatttaagcgaacaaaagcaaatagtgtgaatagtggaatttttggggttgaaagctaaatttggaagtcggattatgaggaattgaacttgaatgattgaaaatttttaaataaatatggaataataatagtaattcacaaacataacatttaagcgaacgaaagcgaatagtgggaattttgagatcgaaaattaaattcgggagtcgtacttttgaaggattagactctaatggttgaaatttttgaaatgaataaataatactaattaacaaacgtaatatttaaatgaataaaagtgaatagtgaaatttctggggttgaaagctaaatttgaaagtcggattttgaaaaattgaacttgagtagttgagatttttaaataaataaggaataataatactaattaacaaacataatatttaagcgaagataaatggcttaaagacataagttttgaaaatgggatttaaaatttggaatgtagtaaattcattgagaccaatataaattaattatataaaaattttcatatatgatgattagacataactaaagaagggaaggtgaaatataaattattttaagttaaaaaagtaggtaaaaatgaaataagataaaaataaaaatgaataaataaattaattaattaataaattacgaagattagaggcttaaagatttatttagaattgaagcagccaaatgggctaactcaatatggacatgggccatgagggtggctggcatggagagcatgaggccctccatcaacatgcttgggctgggctccaactcaagcccatatccgtcaccatgggcaagcccaaggctccaaactccatcacagcccacttctccacctgggcatcaccctcagacgaagcttcctaccgccagcctgacgaaaggcgaggtggccgctgagtggggaaggccacgaggccctccagggccttgaagcgcgcgccaccggtgaagactgcgggaacgatgacgaatggttgagagaggagatggccatgagagctggtgacgtcgaaggtgaggagagcaagcgcttcattgacgcggcgcacgcagcaaagaggaggggggaggggggggcggcggctgaagatgatgacaggggttctcggagacgaggcacaggatcctcatcttggctgactcaatggcgccgacagccagcggagaggtggtggtgacgggaagctccaggtggacgccatcttgcattaacctccggagacaccgcgcaccttgcatcgccggagaagaagcccaggaaaaggaaagagagaaacaaacaaaaaaaaaatgtcgacggaaatagggggggtgaagatggccgtgtgcatggatggtacgtggaggggagtgataaatgggtttgtaggtttgagtgttaagtgcaaccgtgggcaatgagggggatgggtatgagtgatggaaaatggcgatttgaagggtgatgggtgcgaagaaagatggattcaacgtgcatgaggcttgacgaatagtgcatggcgttggatatactggagtggtgactgtgtgggtaccaggggtggatgatgagcatggtaaagaaaatgggtgtcgagaggcgaagtatggtggcaagttgtgcactgatatgtgacaaggtaagacctcaagaacagaggaaagtctaaacaccaagacagagcataaattgtcaaagcaaaataaagcaacccaaatcatgcttcacgttttgatcaatggattcaactatgtgcgggcgaacctgagggcgtctcatgaaaatgaaaacagagcaagactcctgcataatagatgatgaagctaaaacagagctgcattgctctcaaaacatccaatattgaaccaataactcaagcatgaactaggaaactaatcatataatcagataatccacataaacgattaagaggaaaataacgagactatataccgacaaagtaaacccaaggatccatggtaaccatacctcccatttccccttccggagctctttgccctctttctgggtgtttcgcctccaggaaagccccctgaagctctcaacctcctcctgcagcccggccccttgcccttctgaaaaccccctgtctccgctatacccactcccctgtttccccctcaacaagcatggccttgcaaccactttcatgggcagccattccctcttgccacacgtcctgtgctgttcctttctgcataagaaggtccccctccccccctctcccctcccttaaaaaaataggaagtttttttcactctcccaggctgtcatcatgccctcttgtttcaaattataaaaatatccaagaggtgaagagaggggatctacaatattgtaaaagaaagataaaaaataaaaataaaaaccaagaaaagaaattcaaagaaatgaattctaaaatcatctattttcaataacctctcattaaggatgtcaatggggtgagttcaagacaggtcaccccatcccaacctcacctcatttatttaaaataattttcatcccctttgcatttaaaaatttaaatagggtgagacggtagggagtttaactttttttttttttttaaataataataaattttaaaaaaaattatttttacattttttaattacattaaaaattaatttattttataaataaataaaacattataatttttataacttattttattgaaattattattattattattaaaaataggaaaataaaaattaaattaaattaattttatatataatcggagagggcaaggcaggacaaggtaacactcaatccaccctaaacccatcccgagtattttaaaaaaatctcaaaccagtttatttaaattttgtaattgccccattaggataggggtcagacaggtacccgaaaaaacttatctcattatcatccttactcatataaaattactcttacaataactattaatgttatatagatat

SEQ ID NO: 12428 - DNA, 6109 bp, Vitis vinifera
  Intron number 3 from transcript GSVIVT01031636001 (locus G SVIVG01031636001) derived from phytozome v7.0 (chr-ID chr5 ; pos 19358371 to 19364479 reverse strand)
ttttcaggtttccttctctcttaagttgttgaggaacatgtttagatgctatattgttgtgcttgttcatatgtaatttcctctttagattagttgctcaattttttgtgtttatattgcagcattgcatgcacttgtgacatgtaataggatacattttcttaaatttatttatttgatagaaactatgctggtatagtatcaaaaaaaagtaaggtttgtacacaaccaagaaggatcagagatccttcaaaaaggaaatcaaatatacaatgtataaaagtataagcaaaatacctctccgtagaaagcctttggctttcacccctaagagcaaataccaaaacttaaggggatacaaaataaatgaatcctttggctagctttattgacttcctcattaggtgatctaggcttccacaagcatggttgcacccctactcaaatccacaatcttgagtatccaatggttatatctccctgatcctctaggactctcaagtcacctaaggcaaaactgtggtggaatctttcttctctccctcaactagtaaattgattattctacttctcttgcaactttgagacccgtgagtaagtgaaacaattttttttttgcttcaatagctaagataaacccttgtttcttcaagacttgaataatcttactttaatggttatgactgggtccttcaatattcatttggatgacccaaggaacattattgaaattaagttttgtaatgtcaataggagggatttgttcagcttgcatgtccaccgctctcctaatttggagatagactgaactctagtgcgtaaaatgatgctgagcagaactccttagaactccttgttaactaccatccaaatgaaagtgaagaaacacatatttctcactgttctcttcctttccttgaaggccttcatgttcttttccagtcaaatatcccacaaggtcactgggatgatatttatttatcaattgcaattgagtcttggtaaacttcttttctttccttcctcttatgtggcacatggtctctcaacttgttaaactaacagtaagggtactttcctattgaaggatcaatgtacctatttttttgtcgatggtatggtgcacccttacttaaaggatgttgcttagttatgagagaaacttttttttttttgtatctagagagctccctttcattaagcgcattgatccaggagtggacatcataatcatcatcatctaaagacaaatccagatcttgttttatcattagcttagctaaagtggaatagtatgattgaatttccagatatgagatgaaacctgctttcagtccctacccctgtatagttttattctatctagaattagatcctttctgaaccccctatgattgctaccaaagagaagctttttcctatactatagttacaagtttttgttgtgttttggaatcagggaattcaacaagtagaagcttctttgttaagcttcagacaaagaggttgggctgttcacttcattgatttgacttcactttacttaagattaaagatagggatcaggtgggaagtgaagacttgttctgtagacagtgagtgagcaacaagctattgctttgacgagcaacaagaacctgctcctatcaaaatgaaaagcagcaagctctgcatggagaagcaagcccctttcagagaaagccattgtgtactagggcattgacacttgtgcacctgtaaactacatgctttagctttgaggcccctactttcttcataataaaataaaaaaataccaaagaaagggaagaagaaatccttccagttttcaaaagtgaatttatagatctgacctagattccttttgaacctaggttttcaaagcttttgggcatttcattcctttaggacgtctgcttctctagagtacataggcttcttcatgttttttaataagattgaaatgtgatatatttgttagtaaaatcttatgaaaaatgaaaagaagggtacagatggtagtttgtattattattaaagatgagaatcatagtgggttttaaaaacccatcatctcctttagtttttcaaaacccacattttgtgggttatagttccctagtggggatagattcattcccaagaaaaggaatggtttggatgggaatacaacacccattcccactcctcaattccacaaaccaaatgaggcctaattgtcacatgactttttaagcaatggaaggtttctttgagttcatagaggagtccagtttgttggatattccattgtgggaaggtcctttacttggtgtgggggccaatatgggcaatccatatcaccctaagactgcttcaaatttcaattaggcttcctgcatatagttgctctcgcttatggtccaagatgaacttcatcatttgcatattccaccactactgttggatagctttgtttagtggtccaaaggtccctttcccctttttgtctcaccaccctatttgcaatgttcaaggtctcctcacttgttgagtgaaacatgtggagaagaaacgttgaactcacccattcactgtagtttgcctctttggtatcactattgaacgtattttcaccatcggggaaatttgtatcatatgcatgaatcttcctcctttgctttgttgaggttcacatgcataaattttccccccttttggctgtataggccatcctcataggtaattttgtgcagttgatgatgtaccagccatctgattccatctctccaactttggtgtgattggagatccaataacgtgttctgttaatttcaaccttatacttccactgccatctcattccctgctctcaaaagtttttctttcaaatgatgcacaacctatttatcatcagttccttagtttctacccagttcttgggtgtccatggtgtgcgatggtctaactgcattgttcacgagtgagaagccaagctaattgcaaacattgtgccaaatactgtagttattaatgtcttcatctttcttctttttcttcttcacctttgccttcataactggcttttctgttgcctcattagctcatagttgttgctttctattttttttttctttttttcttttcttttccttttttcatatgagaacatattaataatgaagaaattcttcttcgtaacctttgccttctaactagcttctatgtggcctaattagctcatagtttttaattttcatttttattttttcaaatgagaaacatatgcttattaataatgaaattccgggaggaaagatctatccttcagactaaacagtatatgataattatgaaagaaatggatgaccctcaaagaccctaacaaggaatcctattcgtcttgggaaaccctcgagtcaaaattccttgatgaaacccaatcttatcatatgacctgtcctctttgttactctttttgcataatggatatctctctttgttccttcctggttaaagggtttggactttgtttttctttggtttcctttcatcatcgtatttattttattttattttttattttttattttgcattcttgcctttcatcaggaaaatttttagctggaaatccagttctataaaaaattttgagatttcatatggtttgtggtatgtaaaagggttaatgcaaacaatttgccacagaaaggagggcctttctagctctttgctcaagtgttatgcctttttctttgagagtgaggaacaagtggatcatattttctacattatcctaggccttggggttatgaaataatctattttggttggtgggtttgtctaaggctctccccatgggtgttgcaaatttaatgcttattgtttttaagatttcagtgtagtccaaaaggtagagatatttggtggggtttatttttgctactttgttggttacatggtcagagaggattgctattttgtaggaacctgttccttccttacatctcttagggaggagggtggggaatggggtaaacttcagaaacaaatcactcaatgatatgaattttaagtacaaatgaaggacgggaaattgttccaaaaatacaaaggctgatcaaataaagaggaaatgccttacaaaagggataaaacaagaacatgtacaaaatatagcaacaatgtataactaaagggggtaaaaaatcccctacaaaagaaaccatttgcttggccttcctgttgttatgattatggtagattgaagaggttttcgatagtagtatgtagcaggctaggttttcaatttcctggaagcccctcctctctttggggatacataacctttgagtgggagggaatttgataatggttatctcttggcatcttaaggaagaacgattcttgcctgcttggaggtgggatgcatgcatttacaaaatactagttctttccatggtgttggccatccaaactgtgggttgttagcttagtgaggagcttcatgactagagttatttatttatttttattttttacttttgttttaccttattattattattagcagtagtagtagtagtagcagtagtttaagggttggggtgggtttgtgggaggttctagttttgagtcacagtggggatagaaatagaaaaagaaaaaaagaaaaaaaaagggttaacccatcaaaaaagggggtctagtctttttggagtcccttggtggttgatttatattttctcttccatcctctgttgctccttatttcccctttttatataaaatagttttttgtagaggtggcatttgtgttgtattgtatttggtccatctttgttcaagataaatatttatccttaacttgttctatgcacctaatctaaatctaaatttggccttaaaataaaaaatgttaaatatctgtagccacttaaaagttgtttaaagaattttattaagcttttaaagatatttttattttaaaaaatgtggcatattttgaatttgaatttgaatttggttatcagttgttctcattgacaatttccatttttaaaaatgtaataaatgcttgaacttgaactattcttgcttctgtatgaaacatggaatgagagataaatgtagattaaaaaatggattgatattttggaatgcagagtccttttccttttgcaatcgtatctttgatggtcctatataagtggattgggttagggtgtctactccttgtccatcttgatcctggtggagtgtttaggttctaagtaaggcgtggtcaccctttttttgtgtttccctcaccttactttttggtcttattggctttgtgtatgcattgtgtatactcctttgcacctccataggtgcttttaatacaactgctcttttatctatcaaaaagaaaagaaaagaaaaaaaagaactactcttctaaagtgatggaaaagactttatttgtagggtaaagctaaaatggttgagtagaatactctttcaaactggtcttcaaacctctatttaaaatggaaaacgttttctttgtagtggctttatttgttagatgagaaaacagctgaaatactggtacttatactacatttgaaatctaaactcagacactggctggtgcagctagtttaacaatattagtatgggcctgttcatgtgttgctggcacataaagttgcagaatctccccccccccccctcctctctctctctctcaacacacacttctccaccgcgtatgtccttatttatttatctgttatactttttattttgtctaatctaagctattctatatgtgatatctatggctgtcagtgatgattcagtcttgcagtttagtacgaaaatgagttcttttgtaaaatcttaatgctgccacagtcattattaatgtgacataatacttggatttaagtaattacgtttggataactgcttatattctgctagttttaagttgaaatgctagttttcatctggtaaaatagttggttcattgcatgcttcacctcaataacttattggtttagatttctaaatatatattttttttcctttctacatccaaatctagtgtagattttcctgcaaaatatcaagactggacgg

SEQ ID NO: 12429 - DNA, 11016 bp, Vitis vinifera
  Intron number 1 from transcript GSVIVT01020635001 (locus G SVIVG01020635001) derived from phytozome v7.0 (chr-ID chr1 2; pos 3615420 to 3626435)
aaaaattaaaattatttttcttaatattttttttggtctccatactttttgtatgtttaagtcaattttttttttagtgatataaaaaagatttgttaaacattattaagagagagaaaaggttatctcaccaaaataaactctgtggtgagataatagtgttatctcaccaaaacattattaagcaaaagaattatcattaataggaagaatatcgattcataaaataaactctaaataaatatcaagaaaggttatctcaccaaaataaaaagtaggtaacatctttaacatgtctagattaacatccaataggccaaattaatcaattatattccgattaatatcaaatttattcacaagtgggttactttactaaaaaatcagcaaatgattaaaacagaaaactctacaaaataaatctaaaaatctagaagttaagttttatcatgaaattttcagagaacatctcctatatgtctagtttatcatctaagtgaccaaatcaattaactagccctcatttagtactagatttcataatgatgataataagtccagaacatggcatatttttaaggtattcaacaattgatttttctaattaacttaaagatgtactaaaatcataaaaaaaattcatacactagcttaatattttattttatatgaaagataattacaggaaaatgtcacattcataacatatttaaaaataaataaacatctcttagctccaaaagagcacttgtgcagcggatgtaagaagaaaaaaaaatatctctcattttagaaatcatttattaatattttatgtatcacaaattaaatttaagaagcatatatatatattaagagaaaaatattcaaagaagttaaagtgatcgtttattaatttaattttgcaaaacaaaactgagtgtaaaaaacagagtgaaaactgaaccttctaaaatattgatttatatcttctaattgaaaaatcatatttgatccaagtaagattctaaaatcaagttcaaggagtctagaatgtcatagaatagttagaaaaaatttaaagattgtctattgtcatattcaaatttatgaatgcagaagtacagtgaactatccacaatttcaatgaaaaactatgttttgaaaaaaaactttgcatgtagggatctactaagtcccattttaatttccacgaatttattcataaagactccattgattggagttatgaaatttaattcatgtatattcaaaaccaaaattcattttaaaaccttttttcaaatatttggttgcatgaattttggaaaattgacctttctttacctaattgatctaagattaattttaaaatgaagttagaagattaatttggctatataggaaaagttgaaaacaattttaaaaaatattaaaacacatagaatctcaaacacaaactattaagaaaaagtgtaagtgtgtatatgtaaattatctagtgtgccaaggtgaaactcaagtgtcctaaatattaacctaaggtccagctacatttaaaactaattatgtcttaatttgggtcttaaattatgatacaaaagtgtcctaagtgtgtctaatcaagcctaaacaagtaatcattaattggtgtcaaacgtatgtgaattgtgataggtaagccgaaaacttgcattagtcaaaaatgaaaaatcaaggaggcatgaaacccaattaatgcatttattcaaagcccattgtcatgtagttttccaatggcttattcaaataaaagagtttgaagaaaagttaactcaatctcaattataatttatcaaacaatcaacattcaatcaaacaaatttctaaatgtcaaatctaacaacactcatgtgtggcccgatttatccacacccaacctattctaatgtattcaaaagaaacaaataaagaagaagatatggacaaattaaatcagaattaggacaattagataattcatctcaaggtgtccaaaattcaattaatgccttgatgttctccaagttgtgtttgacttatctctgctatgcaactagtaaagtcttcatttctattgaatttctagccatcgaaatcccctatatgtagccacttaaacttcggccactaatcatacattatagcattaattcatcgcatgcattgtggtcactttaagccattaaattttccatgattcagctgcgcaaagctccattaacggctgcatattcagccattaaaatcagccttaaatctccatgtccaaccttaaattttagccaattacatagcaaacctctacttgaatttcaaccgtgattttcattaaaaattcagcaaataatcatttgaatttcggtcatgatcttcattaaaatttcagtaactatccacttgaatttccataatatccaaccaccatattcaacaaatgtagccattaaaatcgatcatgcagtatatccacatccaaaccatagaaacaatacccaaaaatggcgaaagaaaatgaagaactacatgataatgaagaataatagtgaatccattgcaatcatacttgagtgtgctctccccctaatggattttaaattttgaccccatggcttccacgtacaaagaaagaaaaacacaaacaaaaaatagactataacccaagaggggccaagcaagcaaacaaactactaaatgaggtccctctttatgttttaatcaaatggccagaaacaggtaaaagaaacaatggacaaaagtgtgattcttgtgcatcaagttcatgataaacatttttgatctccattatcaccaacaatacaaacagaaaatatatgtgtaccaagcattcaaattatgccttccactgttgtctaagaacatacccgagtccattattttccgacgatgaatacagtatggatcttctaaggttgtggagggcaccaccttctttctaaattctctcagatgatgggagtcaaagagagacaggtttgttcttattccaaaactaatgttatctattaatgaacagacatacgatatggatttataccctcctgccttagggaccataccctttgcctattgggccttacgagtcttagatctatcatctaaggcccgtgaaggctttgggttctacacataggtggcccatactgtgaaaaaccgatataaaataaatatcaaaggcgaatagcttagtcatgtaccattgctaaatatgtgtgagtctatatcttaacaatctcccacttagaccacatatattacaaaacaatgttcatgataggactttattgagctcatcttactattctatcttaatatctttaaacaatccggtctaccagtattgctaatgtaggattaaagcggtcttcgttaatcataattataactagacccatcaatgatcacaatattaacaaaattagcaacatggatcaagtatggatgtgtagcatggaaattacatagaatgtgatctctaatatgtctatttccaattggtcccactttatgactaaaaaatagtcaaattccactttcaacacttgatgctaaactacttctaaaagtcatcatttcaattcagagtattcaaacacaatagtcttttaaaatcaaggtctgtatagataacacaacatgatatcacatcaagaaaacaaacacaaaatctaaatacaaactcctactatactgacacatcatcaatgtgtacaacacccatatatgtgacatgctcatgatatactttgggtggaaaacccttagtgagcggatccccaatcatggagtttgtgcttatgtgttcaatcgatacttgaagactctgaactatttctttcacaaccaagaacttgatgtcaatgtgtttggactttgacgaacttcgattgttcttagaatacaatttgtggccttattatcacaattgattctcaatggtttctcaatcccatcaataattcgcaattgagtgataaaattctgcagccatatcccatggtttgatgcctcatagcaagctatgaattctgcctccatggtggaagaggcaataagtgtttgtttaacacttttccatgaaactgttcctccagccaacatgaagatgtagcctgaagtggatctcctactgttaagacatcccgtgaaatcagagttcgaatatcccacgatttccaaatgactggatctgctgtatgtgagcatatagtctttagttctttgtaaataccgcataacctgttttgcctttttctagtgatccatacttgggttactcaaatatctgcctaacattccaacaatgtacgcaatattcgtacgcgtacaaacttgtgcatacatgagacttcctatggtcgaggcatagggaaacctctccatatccttcttctcaagttcatttttcggacattggtgcaaactaaatttatcgccttctgctataagcgtgtctcctggtgcacaattgctcatgccaaatctattcaacactttatcaatgtaagccttttgtgataacccaagtatacctcttggacgatccctatagatctgtatacccaacacagaagatgcatcaccaagatctttcatatcaaatttactagatagaaatcatttggtttcatgtaaaagtcccacatcactacttgcaagtaaaatatcatcaacatatagcaccaagataatgaatttgctcccactgaacttgaggtttatgcattgatcaacggtgttctccttaaaaccaaatgaaataatcacctgatcaaactttcagtaccattgtcgggatgcttgctttaaaccatatatggacctttttaatctgcatacaagttgctttgaatcattagactcaaagttctcctgttgcaccatgtatattgtttcatcaatgttaccattaagaaacacagttttaacgtccatttgatgtagctctaaatcataatgagctacaagtgccatgatgattctaaaggagtcctttgacgaaattggtgaaaaggtctccttataatcaatgtcttccttttgagtgttataactgattttgaatggactaaattgtgtaggcagaaagatcaagaccaagtgcatgagtatgtctttcgacaactctaactttagtgccttgagtctagtcacaagattagacatttctataatgtattcccttatattctctttccctttataccacatagagacaagcttactaagaatagtgcttgtcttaaccttttcgtttgcagcgaatcggtttgctatctggtccaagaatgcctggcttgggtttcctcaggtattgcaccctttatagcttctggaattgagtgcttcataatcattagactcatgcgattagatcgctcccatttttccatagtagacctttgctcagtagtgctagcactagtaagatctgaagggtgatccactcttaatgcatagtctgaatccatgcacccgagcacaattataacttgctccttccatttcttgaagtttatgccattaagcataggaatgttattgacatttgcagatatagaagatgctgaaataataatgaagctcacaatcagtcatataaacatcacacatacaggaataaataaaatttaaacatatatatgcatgtggacatacaacaagatacctagcacaaacatcaatattcagtctttagacgaaaatatcaacttgtaattgacatcattttacaaattaattcataaatattgacaataaaaaaaccgaaaataatatgtttgtctttggactaatatatcgaatgcaagataaaccttatatgtcacatattcataattactttatttattattatataaaaaataatcctcctttgggttgattattttatacaataataacatgcttacacatttcaaaataaataaaattatgtaatacaagttactttggcaacaaatatacacaattcatttattttaaaatattaaacataaatacaacaagcagtaattcaataaaaaaaaaattatgcacaaacccatgtatatacgcaatcctagataacaattcataaccattcataaggctttattcatgaatgcatgatttagtggcccatttttttttttttttttttgcatgattcataagacattaaaaggtacctaattactttacatgtagcatataatataaaattcccacagcacaaataggagtataggcatttaatcctctaattaatccatattttattatggcataattttaaaaacttagaaattttagacgttgtaaaagggatcctttttgcatccaaccgacagtggggctagagtgatcttcgaacgacgccaacggtgaaatgacaccataatagtgggaattagtggcaccaacacggcgtcggaatggatgcctacaacgcccaaaatcggcgcttctcattggcatctgaaatgcctgaagaacagcgcctgcacgccatctagatcacctttaaacggcgcctaaaatggcgctgctccattcggtgtcagcggcgcaaggcagacgaggcttgcaacgccttcaatcgcgcctgaacgacgtatgaacgctgcttgaaaatggcgcttcagcagtgcctccaaaatggtgcttcaatggtgtctgaacgacgcctccaatggtacttcatatggcgcctgaacgatgctacaaatggcgcctccaatggtgcctcgaacgacgcctgaaaatggcatttccaaaggcgcctgaacggcgtcagaatggtgggtgaggcgaaccttaaatggcgtctgaacagcgcctggtatggcgcctaaagacggcgcctgaagcacttgtaatggacgcctgaatggctcctgtaacgcctgtaacgtacgcttggatgacgcttgaagtgcgtcttgaatggcacttgaatggtgcctcaaatggtgccttttgaatgcctgaaaacaccgtcgaaatgatgccaaaactacttccattttgaacgactgaatggcgtcctaacggtgcctgaaattgccccaatttttttttgttgtttctgatttaatacgagtttttggtgaaaaatggggggctctgataccaattgataaacattttttatctccattatcaccaacaataaaaacagaaaatatatctataccaagcgttcaaattatgccttccactattgtctaagaccatacctgagtccattattttccggcaatgaatacagtatggatcttctaaggctgtggagggcaccaccttctttttgaattccctcagacgatgggagcgaaagagagacaggtctgttcttattccaaaactgatgtcatctattaatgaatagacacacgatatggatttataccctcctgccttagggaccataccctttggttattgggcctcatgagtcttaggcccatcatctaaggcccgtgaaggtttgagctttacacataaggtggctcatactgtggaaaactgatataaaataaaatcaaagacgaatagcttagtcatgtacctttgttaaatatgtgtgagtccatatcttaaccgttcaaacatatcaaaataagaaaaaggaaaaccaaaaactgagcaaacatgcaaacaactagttttagcaaaaccttcctatgactcttaatgtccacaccaaacatcaaatgacatctgattgacagaaaagaagaagaaggaatgcatgataattgaaatgaaccgaaaaactacgacaaccatacctataacaacttctctaaactatgttgaccaagcttcaagcaagttgcatcccctcctatagctgataaaaacaccaaccattcttttctctcattcaaatgtcatctcccttattttcctttctattttccttttgtttttggtatctctctctctccctctctctctcttcccgagctctctttgaattttttcctctgtgtctctttgtccctatctctatttttcctctaaaaatcacaaccttgttttttttcctcatcagaatccttcatcttgaaggcttctctctatttcttcgaaaatcacaacttgctctttcctcatgcactccatttcccaccaaaactcttttcatcttctctttcttcgatgataacttttcttacctttaaaaagtctagtggatcatgccttccattgagatggcaacccgttttcctcatgcaaaacaaaaaaaataataaaaagttagcaaccattcattaataaaatgaagaaataaaatttgagaaacttaaaagaaagtaggatcttataattaaaaattaaaattatgtaattaaaaccaaaatatcaatcatatgcacattagaaaaaaataagatattatttcatgcaacttaaaaagaattaatttcgtcaaactcatgcaattttgtgaaaataaataaatgaatggactaacaataaataaataaatatcacgtatgcaatcaaatctaaaaattaatataatgcaacaaaaaataatgcaaaacagactattgaacttacaccactaaaaaaaaaaatgaaaaaaccatctcaagtaatcaagaaccaaaatcaagtcccaagatcgcctaaccctaaaatcggacaattaaacttaagaaaacaacctaagtgaactaggcttactaaaatatctaagtggaacctatcccaaaaagatctaagcgagacctaaattgagctcgaaagagagccaaggtcacaataagggtccctgaaggtggcttagaaaaagaagttgtatgagcgttgatgggccaccaataactaccgtggagttttgaaagagcacttaatagtgcaagtactaagaggacaaaatggatggtttacaaatccctcctatgcaaagttgccaaaataggatttagggttttgggaaatttgcaaaggaaaccaacggaaagtgattcattctggtactacaatccatgtttccaataccatgcaaggcttcttaataggattggaagcacaagcattgtggtgttgtccttgcctcttgaactggaggccggtttctcattcctccttcccacgaatcctacataggaaggtccgtatctcagttttaacgacagtaagatggcagtctttgactgtctctggcccttcactagacaaacacgtgtatgatgtttttaaagaagacacattttgccaattttggtgaaactcaagaaaaaaatttgaagttaaaatttatgcatggttgttgcaacctaatcttgcacgagttaaaattgttaattattatcccagtgaagtcaagatagatatgtgagtatcattgtaccattcttagctttttaaatcaactcatgtttcacaaacaacttttatttgtttcaaatgaaagaagtcaacatttgtaattactatttcaacaaacaactttaattagattgatttcgaattgcaatagtgacgtattaatgataacataattgataattttaacttaatatacaaatttgattgaaaataaattcgataattcttggaagcttattcactcgattactaaatcaatagcccaaggaacatatttaagtatattaaaaagtctgtttaatagtgattttaggaagcgtttataatatttttaatatttgaaattttatatcatttaagtattaaaaatgatagaaatgtttcctagaattattgtcaaacacattctaaatcaattgctagattaatatgaaagggtaattttttttttttgcaaaatttaatttcttaattatatgatcatcaaataaataaaagataaaatgttattataaaaaaaatgaaagcaaaaatttgaaagaatatattgattaaacttaaaaaaaatacacaaaataaaaaaataaataaatgattataatataaaagatcaagtaaaaaacaaataaaaatacacaaaatatttttattcaattacatattataccaaatttgcaggactaaaatttataatatttttcaatgttttctaaatcagaaaagttatatgtttataattcactagtcgaatgaatgatcaaaccatgggtgatgtcataatatgtattttatatttattaaaattaaaaatatttataagaaattaaaaatcaataatatttaattttcttttcatctttagtattatcaagttaatatatataaatatattaatattttaaaattttgttaaataaaaaatatataatgtgttgaaagttatttaatttacctaactatatatattaaaagttatttatggcagtaaaaaatattatattattttatttatattatttaaaattttattattataaaaattttgaaaatgttattgctatataatttgttgttgggtgaacataggcaaaaaaaagctggagtagcagtgtggtgttgtccttgcctcttgaactggaggtcggtttctgattcctcccacccacgaatcccccgtgtaaaggaaataaaatagctttataaacaacgggtccaaatcggcagcctggtcagttcaaggacagtacgatggcactctcgtgctgcatctgccgagaaagtatttttgaagaaaaaaatgatcaaagcagctcttctcttaagatatttaccaaactagttttcactctcacatgattggtatgggtttatgcacttaaaagaaaaaaaaaaaaagttgaattaatgttgtacggatagactattttgacaaatattttcaacgtgagattagattgataatttttttttttttttttttccaaaaaaactacttttaccggaaacccgcatctgcccacaaaagtacaccacagttgtctgagaactctctctgcccgttcatgtttataatattaggacccactcttatacacataacttgtagcattcttgttcattctggcttccttgctgcgcaaagagtccaacaaggtgaggaagaagaggggt

SEQ ID NO: 12430 - DNA, 5687 bp, Vitis vinifera
  Intron number 1 from transcript GSVIVT01015299001 (locus G SVIVG01015299001) derived from phytozome v7.0 (chr-ID chr1 1; pos 2482099 to 2487785)
agcacgccattgttgaaggttcaacctgaatccatgccatcataatttctaagtcaacacttcatatatgaaataaatttgattggtggagtttgcagttagaagtcagattctttacctaccttccttgctttttttctctttctccttttatttctttttgttcgtggaaatgctcctttttttttccatgttctaaggcctgtcagttgtcatcatttcaatgaattgccttcttgtttccccatttttgaactgtgaaatgaccacgtgagtgtactcaaattctggctgctggtgattgtttggaaaagttgtaatttcacataattaaaaagaattccaagataaaacattggactgcaatatggccacaagctttgtggatgttgggccttgttcaggggtccattggcgcttgtcatgaagtagaatccatggcattaattcctttcttccaaagagaaactaaactgggtaatacaaataggtctgttttagaattattcaaacttcacactttcactctactccaatccagattcaattgagatctcattagaagggttccagggctaacacatgggcagagtcctgactaagtgttagaagagagagacactttatctctctttcaagccactcctaccagctcgatctgttgggtacattcagcacatgaggaaggcaccaaaggtggaacacaaagaagggagatttgaagagtgcatagaaaacttcaaccaaaacaagattaccttcaagatattaagattgtcggttataccagtaagttaattggcattgacaagtcaataatggaggaaactggcattttgggctccttcataacattgaaaactgaactacagtttgaattaaaaaggaatttcaaggcaaaatgattgacaatttgacacaagcaaagtaaaagaaagttaacctaaacaagaatttaaaggctgcttaaaagttgggacatcaagtgcaacatctaaacagatggtttacataagtcagcctctggtaacaggaaacaattttatttctttaattgggaattaagggaaactcagcagaacttttttcttgttgtaacttgtttgctcagatatgaacatttctagaccatgcttacaaggtgaaaatccttcaagagaagctgaataatgatatttgcttacaagattagcttagtttcctttcagatacatccaactgattagaaaaatggtaagcaaacagagtgatctttgaccagatcaaggagacaattcaaatttggctcttgacatagatgttttgtatcatagttgactcttttgcctgccaatcaaaatggttgttactacaagtctatggccatctttctagaaagttggtgggtaagcatgaagtatgtcagggtggctgattgttgatgatcccggaaaaatgcttctttttgtttttttttctgtattagatgccgaatcctcactaatattgaggttttccggttcaatttttaacacccaattgttcaagaccaagcatggccatatgttattctcttccatgacctaagagtcgagcaaagagaagatgcctgtgggcctgctggtaaaagtgacgcaaagaaagtttcattttttaatgaagttacacgacacggttcttattttattattagtttactcaagagttgttcaatgaatctgttgattcaaaatcacggtatggatagatgccagggacattcggaatttcatatctgatgacacttttttagttgggaataggaatgaggtcagttatttcatatattttgatattaaaaatcagatttttgagattaataacgtttgggaaatcattcctgacttgggtttgattctgttcaggagcttcaacaccatcttcaccctccaatgacagacataaattctacaaataagtttttttttttttttgataggtaaaataagcaattaaattaaatgtgcatcaaagtatacaagaccatgcaaagagcgccaaaagacaagcaaaaggaaaatagcaacagccaccaccacccaatacaaaaccaaagccctaacaacctagtaaaacagaaagctcccagatgaccgtcttcccttctcatcacctgaacccaagaaacttcccactccttggatcatcaccatcgaactgacaacagaagcactttgatccctaaagctgtctagaaacatccttgtctttggcccttatgacagacaaccgctccttacccagccaataaaaaggctgacccttttggactggcttgagtggcaaaatgttgggatggaagagattccaagttaaaatttccaaggggaagaatacaaaaaaggcagcagcaggtataaagcatctgaaattcctattatcttcaagtttcctattgcatggaatcacctttgggcttaagaaaaattagtgaaactaggagcctaggccatacctaggtgattaaacttttcttggtgaggggcaaaggaagagaaaagcttctgtcttggtaagtcaacactaaagcttttttatattaaaaatgtgcagaaacagaaagattaatgtgccttaattgaagtactgcagctctacttcaatctcttacactcgctggggaaataaatttacaaggcacatgagaaaaaatttaaagcaacaattgattttaatagtgttttttttctttttctttttttttttgataggtaaaaacaaatagaatatgaaaaatataggtgctaaaagagtgtcccaaagtatacacaaaaccaagagagaagaggaagaaacaaaaaccatcacctaccctcacttagatcctaaccaatcattaaagctaattagagataatgagcctcatctacaaacaccctagaccaagaccatggattacaaatgaaaaggtttttcatcatttgattcaaaaactccactttatcaaagacaatcatattcctttccttccaaattgtccaaaagatacatgagggggcagccttccaattctttttacgatttcagcccaaaaaggaatcataccacccaaaaaggaatcataccatctttctacctaaagaagatggaacccaagacactccaaagagagtaaaaagcagctgcccatagaactcttatcttaacactatggacaagggtgtgatccacggattcttcttcattatgacatttgtttgccagagaacaccccccctcctctggacctaatccaatgttaaggctttctcccacgtcaccattcaaacaaagaaggtcattttaggtggcacgcatgacctccaaatgatactcatcagaaacaaaattgggtcacccgactccaaagcataatagaaggattttaccaaaaacttactgctcttcgactttgtccaaaccaccctatcttcctcatccttgtacatcctttgatcttgaagcttcagcaggaattgctcctgattttagtgttttttttttatagataaacatcagaatatattagaaaaggctaaaaagccgcatgtatacagggggtatacacaaacgcccaaaaaggagaactgaacaaaagagggggagagcctcacccaccctcaagtggccgcaagccactccaaaaagcctatgagaataggtatcctcaccaatgtacaccctagcccaactccacaaattacatacaaaaaaattcttgaatttttgaatatctaaacccccccccccccccctaaaagctaacctattcctttccttccaaaccgtccaaatgctcctgattttagtgttaatgctcacatgatgccaaattggatgcaaaaccaaatagttctcagtcttggtaattgggcatttgagattttaggatttaggaagccaaggtgttgataaaacatgacatgttgtaagaaggcaaaaaaaaaaaatctaaaaacatgtcatggtgagtaatagtcactcaacatttggctcatcatatctccagcttatgctttatagtagggttttttcacaataattaggatgcgacatatcatatcataatgcatagtcatcatccagcatcaatatacagaaaaagataaaaaaaattcttgttaaaaattccatcttcttgttacatgtttggaaccttttcttaaggaaacagaatagcagcattcattgattcagaaatgattattcggcttatcctttaacaatatcccttggactgcaatgtgcatcaagcttgatatcaaagcgtaaatagaaaagcttgacaagaggccataaggcctagctcagatgacaagggattgaggatgttccaggtttgattccaggcaaaaaggaaaaaggaaaaataggaagtaaaaaaagggctcaagaagaaagctctttctctcttatgttcaggagcatataggaaaaaacccagtgggttctcttcatctttaccttattagcttagactctccattagccctccaaccatggatcctagaaacaagcaagatgttcactcaaccatgattgttaatgcaccaaaagaccatagtttcaaggtcttgtaaaattacactatatacttgtggccaaggccgcaaaggtgcatcttttgtgggggattgcagaatcaggtttcatatgaggcttattttccaccaccagcatgacctaagtttaataacttgaaaaaagttccaacatgtgggttccctttcgatacctcctctgctcatggagtaagcctcctttttttgccaggttctgtttaacacatctttatttgcctatcaagaagaaaattccaccatgtgtatcaccaattacagtccctttcatagacaggtataatttctttacatgtatctctactcgcttccttgtgctcttctatcttctatattctctccgtgcttggaaaatccattttcactacataataagaacttatgctcttagtggcttaagtgtccaacccctatatgcaatatggacctataagaaaaaagaaaaaaaggagaaaaagtaacttctgctatatctagaaaaaaaaaagcaaaagaaacccaatacagaagaaagatctagcaaacatttattgtacgctcaattaaaagatgtccaaaggaattaccagattgtttatcagaatccatacaacttgaattaaaccaagcaagcaccccattacactaataatagtagagcaagatcaaattctcatactaaccaatctaagatgaaggagcagaagaaggttgaagagtaacgttattaagacgctcaagcgtcaagataagagcttgggtacccaaattgccctccccgtgagccttgagtgagagatagagctgctgagcgagtgccaaaccaggaagagaaagccccattttttgacactcaatcaaacatatccccaaatccttaacaaagtgattcacaaagaaaccagcctcgaaatccctcttcaaaatcctactcccatacaaatccaacgactttgagccggcagcgccggtggaaattgcgttcaaaaacaaagccacatcgagaccagacttgtaagcatacatcatcccttctatcagtccaagcatagtcgaagctatgatgatttggttcgcgagcttcgcgtattgcccttttccagggccacccatgtagttaaccttgcccag

SEQ ID NO: 12431 - DNA, 16458 bp, Vitis vinifera
  Intron number 7 from transcript GSVIVT01010209001 (locus G SVIVG01010209001) derived from phytozome v7.0 (chr-ID chr1 ; pos 17518996 to 17535453)
gcaaaaaatattactacaacaccaaaaccaaggtatcataaaatagcatcaagtgatgctctctctctctctctctctctctctctctattcaatccttgattgaattgaaagaaacacatttgatttctcaaactatctgggtctcccactatggaacatgatcaagtttcttgtatattagactctgatgtgattattattatttttttttattctagtttgtcacaaaaaattttaatgcatgaaggttgtctagtgtgcattgtttatcctgataaattgcatatgcagtgagattcagttacccatgtaaatttttagctataaatacgtgtactgtattcgtagtgaagtaaaggtttgaaatagagctgtgtgcatcaatagtgatctagattgatataattttcttctcgaagtccctgtccaagagctgtatgcatctttatgaagacatacttatttccaactaatgtggtgtaagcccaagttgggtttaaggtagattctttgaggaatagagccctacagttcctgagggagagccatgctttatgacatagggccatcttgaggatctactagatatactccaatggttaggatgcccatgatgtagtcaggttgttacgtctttgccttaagggagaaatttaagaagttttctgtgatttttcctgtcatacttattttttctattgatgatagtagaaaggtaaaaatcttaatttttatttatatttttgttttaatgaggatttatggtggatagaacaaccacattgtgctcaatttccaaatctcttcaaaattgcctattaaaaaaaaaatctctttagatttctaagagttaaaggccccattgtttcatcgattctagcttcttcttgttgatttagaacttcagtttttgtcaatcttattgatccaggaaataaagattctgaacttctcgtgtcatcttttatccttgtatgctttatcatcttccttcctttttattttttttgatacgaaacttatcatcttccttcttggatgtgagggtttggtctccttaggcttactttctgcagagtatttcctttagtcgttttaagcccccttgattttaggctctcttttctcaactagtttcatttgggaatctaaggcctataaagtcaaaaggcttttgcatggtaagtagccaagaagaagtcaacaccagcaatttgctacaggtgaggagccctttcaaatctctcagctagaatcattttttatgtgccaaagtagcaaagtttaattggttgatcatccttttttacatttcctagtgatattcagcctttggcatggtttgtgtgcaatgtttttagtacaatgttgtgtcaccatagggcaatgttgtgtacaatgtttttagaaccagattggtcattaatccaaaaaagttattggttcatgattcatgttggtgaggttagtggtttaaccagggtcaaactgtgatgctaacatgactttatgaatatatatttatattttattaacatttaaaataattataaaaagtttaaaatacacagatgattaaaaaccttaataatatttgattttttaaattttgatatcatctaattaaatcatgataaataaatataaatgtattaatatctttatttattaaataaaacatgtataatatttaaatgtgaaaaatatcaaaagttacgtatcctattattttataattttaataattattacattttttacttgtattattttcgtatttatccttgtaaaaatattgaaaacaaaccaaattattttatatgtgttttgcaacagttttttatgaacaagcataagttgcctagtgctccctcccacataaggaaaagatggaagtgaagaggagtttaaatatcctactgtagctgatttggattaataggctgtagcaggctgttgatccacttaaagaagcagcccaatgccatgggtcttggcccgttgttttgccaaaaatggtagagcttggacatttatgtgaactcttgattgggaagagatggagctaaagaggagtttaaagaccctatctagttacatgatgatattgcatgtaacaggccatgcagctagccaagaagtggcccaaagccatgggctttagtccatctttttgcagaaaatatgggaactggtctggcagctcaccgattctgtggttcaactgctgattagtccagttcaatgctggttcaacatgatctccagctcaaaaggctaaccaaactggaccaaactccgatcaacggttcaaccgattgaactggcaggtttggtctgatttttaaatcaggttgtgtgccttctttaaattgttgggacagggattgattattttgataggaaataacaaagaaatatattgatagaaataagaagtacaaaagaaggatgaggaatcctcccaccaaagaaaaactaaacaacaagaaaacaaaaacaagaagctaaaatgtaaaaacaacgaatcaatctctcttggctagaccatcccgttggagctacacactgctagccaatttagttgtaacacattaaggggaatgcccttaaaaaccatggaacaaaaagcccaaagagaagcaagaaagtgaatggaatcccatagattctctgaattcctacctttatcctcaaatatcctagcatttctttcccgccatacagcccaaattaaaacaatgcacgcagtttgccacaaaactattcctctcttggatattccaaaacctttataattgatgaacatcatgttttttttttaataggtaaatgcacaaagatatattagaaaaagggtgcttgaaaggcgacccagagcatacagggagtatacaaaatgcttctcgggggaacccaattcatcttggctaactgaaataatctgtgccacaaccccatcatcaaagaacaatgtaggaaaagatgatctgctaattctccatgcttcatacacaacttacaaatgtcaggactaagagctttgtagggtcttctcaattgtagcaagatattagtatttacctttttgtgtgccactaaccagacaaaggacttgactttaaaagagatttgagaattccatacaaacttagtagggaaaaccggagataaatcggaaaggtggaacaaggctagaaaaaaagacttgactgtaaataaccccgaagaagataaagactaggatcttgcatctgaaaccgatggggataaatgcaaacaatcaggtgaacgagtatacttggaaaaatcctgaaagacttgtacaatagccttccaaggacaacgatgtgaccatctgactatagtgttgacatcccaaccattagaatgtgtcccataaatgcttagaatgacctgatgccacagagctgaactctccctaggatacctccgcaaccatttccttaaaagagtgagattccttgagaaatcttcccaaaccccaatcccccttttgccttcggtttacacactacatcccaactaataagatgatctcttttactttccccaacccctgaccataacaaatccctttgcaatctctcaattttttgcagctactgaagcgggaatcttaaacaaggaaagaaagtagctaggaatgtgggaaaggcatgaatggataagagttatcctacctccaaaagataagtaagccttttgcgattcatctaatctcctcgagattctctcaatcactggatcccaaaagccacaagcctttagattccctctcaaaggaagacccaggtagagagaagccttgcaatcaagcatcaagtccaacctagagagatgatcttgatcaaggttgatgccaaaaaggtttctcttgtcaagattgaccttaagcccagaaatttgcccaaacactaacaataaactcttgagagtttgcagttcttccacacaagtgttagaaaagaagatggcctcatttgcgaattgcagatgggacacccttgttctattcctacctaccctaaagccctccaacaaacttctttcctctgctctcaacaacatcctactcaacacatctgtgacgatagtaaatagaaaaggggatagaggaccttgtcttaatcctctagttgccttgacccaccctttagcgtttccattcactaaaattgcataagagaccgaagacaaacaacctctcatccaggtcctccatctaggactaaaccccttcttctccaacacatgatccaaaaaatcccaattcatatggtcataagccttttcaaagtcaattttgaagacaactccttcctcccttgatcgtcttttctcatccactatctcattagctataagaattgcgtccaaaatttgtctcccttgaacaaaagtaccttgagtagaatggatagtttcatgtagtacacctcttaatcgccttgatagaactttgactattatcttatagagacaagtgatcaagctaataggtctaaagtctaagactttctttgtctggatttttttgggcaaaagaacaatgaaggaggcattggtgctttgattaataatcctgcttctgtgaaactctgcgaacaccctcactaactcctctttgatcacatcccaacaatcttgaaacactgcaatggtaaatccatcaggccccagcgccttatccctatctaactgaaaaatgactttagaaatctcttcttcagtaaaaggggaatccaacctagaagcactcttttctgagataggggaataggctaagccttctactctccaagactcttcaggaggactcgagtagagcttttcaaaataaagtaagaattcctctatgatgctcttagaattattcaacactaaacctctttcattctccaaaaacttgatgaatttccaatttcgtctgccattagccactttgtgaaaaaactttgaattgcaatccccttctttaaccatttcaccctagctttttgtcttcaatgaatttcttccatcaaaatgaattcctccagctccccttttcttaaagctctttgagctgaaagttcagaagaaagaaccccttcttgctcaacgacatcaatgttagctatttcattcaggatgctttttttcctctcctttagcactccaaaagtatccttattccaatatttcaatttggccttaacatattgtaacttcctcataaacttgtgaccttcccaaccatttccttgaaaacctctccaccaactactgaaacaatctttgaaactaggatgttgcagtcacatattctcaaacctaaaaggagttgggccccacttgaaaggattggtatccaaaactattggtcaatgatctggaacttcgtgaaggctttgagggaagaaatgctcccactcatttgagtaaagaaaccggtccaatctcttacacacaggtgactcttgcatgtttgaccaagtgaatggggcgttccgtaaaggggggtcaactaattcacaatctcttataaaaccatcaaagtctctcatactagaagttaaactagagccacccaatttttatgaacttctctttataacattaaaatcattgcccacacaccataaaggaaaagaaaggccaaaaatgtctaagagctccacccaaaaatccttcctaagtaaaggactgtttgggccataaactgcggatagtcataggggttcacatccatccaacaaaaacttgattgagacagaaaaggagcctattaccacctcctcattgcacagtttctttgagtcccaaataatcaaaatcccacctgaagccctgcacgtcggaagagcagtccactccttattcctaaccgactaaacactaccaacaaaccttctgtcacactcctccctttttgtttgctgaaatatcacaacatccgggttctcaagccgcaaaaaatctttaaccacccttcgttttttcctagatcccaaacccctagtattccaactgatgattttcatggaaaaactcgctaacccgaaacctccatactagttccaacaggtctcaaatagttgtggagaatcagttcttccgcctggaatacaccttaatatccagagaacttaagacctcatgaactttagccattttgttgggggaaagaccttctatttggaacccgcccaaaggggaaaactcggcttcaccctgtctaactgtaaccaggttgggggccttaataggcgtgctaggcatggtcttaagggggttattaccctcggacatttggttcagacaagctaactaggactccacaacatctaggttaggattgccaatagtctcttgacataaagcaccatcatcattttttttgaaaaatatttaagaaataactcgagatttcgtaggatactgagactgaattactgaactgggaagagcgggaacagaaggactgagaggtggaagtgccaaaccaaaggggaggggggttgacaaagatgactgagaatgtggagaagaaggtacctcaatattttccactaccatcattccacaagtccccacagagttgagccatttttctctctgattattggattagaacgaaaaacagtgattgaagagccacgatgaacaaaacccttagagcctactctgtcttcaacgttagaggatttgggcaatttctccttcccctttgaaagtatagaagccttaagagaagacctttgcttattatccgcatcttctcttttcgacgaagcccctttccccgaacacctttttcggaactttgatgatcgactaaaagtgagtggacttgcattgaaccttcgatccatctgtgttcccgcttcgaaagcatcttcctttggaagagcatcacaatctgaagatggcttctcatgcattagaggcttgcttcgacttcgaaccccttgtcggcatccagaaattgaagggataagagtagtccacaacttctttgaaccaaacttcatcgcggagcccctcagctgagaaatggagacctttgagactgacttcccctttcccattgcagaggagtcttctctacgtaaagagcccttctcagaaatgggctgctttcttcccatttcttggcccaactttgaaaacgggccttttaaattatcacccctctccagcccaagtttgcctctaccagtggtttgggtttaagaggagattgggcccttctctcttgctttgcattagaggcccgatgcccttcctcatcatttgagtgggccttgtcccctccggcccaaacttcaccatcctgctttggcccagcaggccctgttctctgtttatttgaattcaaattaaacgaagagaagggttggaaccaactgttccccacttccgatcttctcttgccatgtgtccccacgggtactgcttcagtcttttgactatctccaccctctttcattttgccagctggccccatcataagaccttcctttagctgttgatctagctttcccaaccatccttccgccatctgtccacgagtgaggctcataatcctcccgagttgactcacccatttctctaccttgcctatcgtcttcaactctagccactgcaactgaaattgtaaacgcccatcccccatctaacacctcgatcaatgcgggaagaattgactgctccttcatttaaattctcacccttgccttgtaaagatcatacaatttcagcgttcgccaatcgatctctgtcactgtcccccactactccacaattttcttcagatgttcctcagaccataaatgaaagggcaatccccgtaattctatccatcctcctctgaacttccccacgacttctgaattttcccttggcgaccaccttctcaaatgggctgtatatcctcccttaatcttgagaaaccttaattcctggagagaaaaagattcctctattgtttctacaaaaaataaaccttttccgtcagagaaggggacgatagtcaccacacttttttgccctaatctttttgccaaagcatggccaacctcaacccaattatcaaaatcagcagggcattcgcacaccacaactctggcccatctcccaaccggaacaaggcctcctctcctcggtcctttttctttgattacattcgtgaaggaccggtacaaaggacccacatgtttgtgatttattctttcatccctgcactgccttcccttttcatctatattcgaggaggggaccaccggcattgaagacaacgcattttttaattgctcccattccctacccttctctccctcaggtattactaggaaagttgactttctgttggaggtgaactccgaaagccttataaacctaccatggttgttgaagcaaacctccattaaatgaactctggattttcctctgcattttctgttgaaacccatgtaactttttagcttgaaggccttcgtcaaatgtttgatcaaccagccagcctcttccttctcaaagcctaaggcaaaaacagagcctctactatgctctataagcgagcaccatattccaccgaacttgccttcgaacctaaccaagaaggtcttcctctccacatagaccttcaatgtcctcaccattctctccacccaatctagagccattaatcaaaacaaagagaataatttggtagataaaaattaatctagcgatagggattgattattgagatagagattttagcccttttggagggcttgctgcaggtcatggatttgaatcaacccaatttatgagtggaagggttttgtgctattgtgataccatgaatgtccaagtcaaggaaatgtctttggaagtacaacatgtgggtttgtcaaattttattgattattgagatagagattttagcccttttggagggcttgctgcaggtcatggatttgaatcaactcaatttatgagtggaagggttttgtgctattgtgataccatgaatgtccaagtcaaggaaatgtctttggaagtacaacatgtggttttgtcaaattttagttgtaactagtaacttaggctttttctttctttctttcttctttattttttctattttttattttattttttaatggtcacaacatgcagctaatgatgttattgttccattaacaaaatgtggagccaagtggagggtttctttcataggggatctttcgcccctataagttgtacattgtttctttattttgtacatgttcttgtttcattcttgacctatgtagcaatctcgttgctctcggtaggtattcctctcttattttctgattatcctttgtatttttggaaggatttttcatcatttacttgtacttaataattcatattgatgaattatttgattttgacaagaaaacaaagagttctttatctagtgattacattcatcaggaggacactttaaagctagctactttgtttgttcctaggctgggtaagtaagatacttttctcttcactttggaggtattcctaaatcccagtctttagggactgtatactaactttgacaagaattttgatgatggggcaaggttgagctatcttcttgtctccacttgaaaatgtgttcttgtcacccaattatgaatgagcgttgagactttgggtagaagattctttgtttaagttcatttctaagagtcaaaacctttcatctagctcaattgattagaaaaagggcatctccaaaaatcaaaacctctgcatggttagtagcccataaaaaggccaatgcaaaatgtttgtgtcatattcagagcctttataaggcattagccctgataaatttgtctagtgtttaggtagtggggaatcaatggaacctcttcttttttcattgggctttggcttcttctattgcaaagcttttttcttaaggatgttgctagtatgctgattatttgttttgagggtattggtaggggatagaggagtacagttctttgagggcgttttgttcttgtcatgcttgtgtcttatatttgtagtggaatgcaaggtttgttttgtagtaccagatgatatccatggaagagttgtggcatatagtctgttgtctgagctctctttgggcctttgtctccaaggagttctgtagcattattttgagcttcatctcattggaacagaaagctaattgcctggttaataaaataaaaggaagttgtttgtctttgattatttacttattgtagttggatcaactgatcaagttgaatttagatggtgacccttagggagtgatgggggaaagccttttaaagtttattcaaggaagaaagggaagacctaagtaaactttaagtaggattaatataattggaatttgagtcatgataggttattagagtcctagtagaataggctattagagtcctagtagaataggttattagagtcctagtaagttattagagtcctagtagactttggatttcttagagaagcctataaataggctaatcaatgtaaatcaaagggatgaattttgatgaataatattatactttctttcattgcaaggttgcaaccctcaatggtgagactccattgattttcttctaggtgagactcctagaaggccttagtgagactctaaggttttccatcttttcttcattgtttcttctttatctttagttcttatcttataattttctctaccacaaagtttattccttgttcctctccttacaccctaaaaataaaaccctagcccacctacccttgagtgtaggcaaccatcctagggttgtcctacatcaattttggtatcagagccaaaattcttggcttgaaggcatatgcaattaaggagcggagcaacttatgcaagcatgagttccaaaaaaacttctagcaatcaagatgccgctacaatacgcttggaggaaatttcagccacacaacaatcccatcaagatgctataatacaactaaatagcaaacttgatgagatcatgaagttattagaaaagagccaagaaaaacgaccaattgaagaggagattgcaagtcatcaatttagacaatcgccaagtcgataacgcgaagaacaagacaattttatgatggggaatcaaagaagggccaaactttttgagctagatgatgatgtgacaaaaaaggtacgtcttgaagttgctgaattttatggaaaactaaatccaacagcttttcttgattggattatgtcaatggaagattactttgattggtatgcaatgcccgaaaatagaaaagttcgttttgtgaaggcaaagttgaaaggagcagcacgtctatggtgacataatatcgagaatcaagctcatagaactggccaaccgcctattgacacatgggacgagatgaagttgaagatgaaggagcactttctcccaactgattatgaacaacttatgtatacaaaattgttttcccttaaacaaggtaccaagtccgttgaagaatatacagaagaattccatgaattgagcattcgaaatcaagtgcgggaaagtgatgctcaacttgcagcctgctacaaagctggacttcgaatggagattcaacttgagatgatagctgcacacacttataccgtagatgacgtttatcaactagccctcaaaatagaagaaggcctcaaattccgggtttccaggcgtccaagttcacaaattgggagcactttctccaacaggacagcaagcaaacctttaagcacgtcaaacttcagaactcctaatcatgtgaatggtgggggcaacactcaaaaaacttcgaatgtggcttataagaatggtaataagggtaaaaattcaatgagtaatggagatagaaaagtagacgtgactcctttatgctttaagtgtggtgggcatggtcattatgctgttgtatgcccaaccaaaagtttacacttttgtgttgaagaaccagaatctgaattggaaagttacccaaaggaagaagagacctacaatgaagatgaagttagtgaagaatgtgactactatgatggtatgacggaaggacatagtcttgtagtacgacctttattaaccgttccaaaagtaaaaggagaagaagattggcgacgtactagcattttccaaacacgtatttcttgccaagagagattatgcaccatgatcattgatggaggtagcagtttgaacatagcttcacaagaacttgttgagaagctaaaccttaaaacagagagacatccaaatccattccgagtagcatgggttaatgacacctctatcccgataagttttcgttgtttagtaacattcctttttggtaaggactttgaagagtttgtatggtgtgaggtcttacccattaaagtaagtcatattttactcggaagaccttggctctttgatagaaaagttcaacatgacggctatgaaaatacatatgctctcatacacaaccggacgtaagaagatccttcgtccaatgaaagaagtccctccaattaagaagtcggatgagaatgcacaaccaaaaaagagttacctaatgaactccctcctatgcgtgacatacaacatgccattgatttgattcccggtgcatcattaccaaatttaccagcctacagaatgaatccaacagagcatgctgaattgaaaaggcaagttgatgaattacttactaaaggctttattcgtgaaagcctaagtccttgtggagttcctgccctactaacaccaaagaaggatggatcatggcggatgtgtgtgaatagtcgtgcaatcaacaaaatcacaatcaagtatcgatttccaattccaagacttgatgacatgctagatatgatggttggatcagtaatcttctcaaagattgatctaagaagtggatatcatcaaatacgtattagaccaggggatgaatggaagacatctttcaaaactaaggatggattgtatgagtggttagtcatgccgtttggactaaccaatgctccaagtaccttcatgcggattatgacgcaggtattaaaaccttttattggacggtttgttgttgtctattttgatgatattcttatctatagtcgatcttgtgaagatcatgaggaacacttgaagcaagtaatggcactcttagggctgaaaagttttacattaatttgaaaaaatgtactttcatgagccctagtgttgtatttcttggctttgttgtgtcttctaagggtgttgaaacagatccggaaaagatcaaagctattgttgattggccagtaccaacaaatatccatgaggtgcgaagcttccatggaatggctacattctatcgacgatttattcaaaatttcagctctattatggccccaattactgaatgcatgaaacctggtttatttatttggaccaaggcggccaacaaggcatttgaagaaatcaaatccaagatggtgaaccctcctatcctacgcctaccaaactttgagaaagtatttgaggtggcctgtgatgcttcccatgtgggaattggagcagtccttagccaagagggacatcctgtggctttctttagtgagaagctcaatggggcaaagaaaaaatactccacatatgatcttgaattctatgcagtggtgtaagcaattaggcattggcaacattatctcagttacaaggaatttgttttgtattcagatcatgaagccttgcgatatcttaattctcaaaagaagcttaactctcgacatgcaaaatggagtagttttcttcaactgtttacctttaatttaaggcattgtgcaggaattgaaaataaagtagctgatgcccttagcaggaaggcccttctcttagtaaacatgtcaaccactacaattggatttgaagaattaaagcattgctatgacaatgatgctgattttggagatgtttattcctctcttttgagtggttcaaaagcaacatgtattgatttccagattttagaagggtacttgttttataaaaatcgtttatgcttaccaaggacttctctacgtgatcatgtcatatggaaacttcatggaggcagaatgggtggacattttggacgagataagactattgctttggtggaagaccgcttcttttggcctagtttaaagaaggatgtttggaaggttatcaaacaatgtcgagcatgtcaagtaggaaaaggttcaaagcaaaatacgggtttatatacgccattaccagttccttccaaaccttgggaagacttgagcatggattttgtacttggattaccaaggacacaacggggctttgattctatatttgttgtggttgatagattttccaaaatggcacattttatcccatgtaagaaggcttcggatgcttcttatgttgctgccttattctttaaagtagttcgattgcatggattaccacaatccattgtttctgatcgcgatgtcaagtttatgagctatttttggaaaaccttgtgggccaagctaggtactcaattaaaattttcaagttctttccatcctcaaactgatggacaaacagaagttgtcaatcgcagtcttggtaatctgttgagatgcattgtgagagatcagttgagaaagtgggataatgtcttaccacaagccgaatttgctttcaatagctccactaatcgtactactgggtactcaccttttgaagtggcatatgggctaaaacctaagcaacctgttgatcttataccattacctacttctgtctgcaccaaccaagatggtgatgcatttgcacgtcatatacgagatatacatgaaaaggtacgagaaaaaatcaaaatcagcaatgagaactataaagaggcagcagatgcacatcgaagatatattcagtttcaagaaggtgatctagtgatggttcgtttacgaccagaaagatttcatccgagcacatatcaaaagcttcaagctaagaaagcgggtccatttcgggtactaaagcggttgggtgagaatgcttatttgttagagctcccttcaaacttgcattttagtccaatatttaatgtggaagatttacatatctaccatggccatcaccacgatgtaagtgaagagttggatcttcaattaccacctactcttagcccacgtcctgagattgagtatgttcttgatgatcaacttgtgtctactcgacaaggtggataccaaaattttttggtgaaatggcgaggcaaaccacattctgagaatacatggattacgacaacggattttcagaagattaaccctgatctctatgaattgtatcaaacatctaactcgtcagagccgagttctttcaagccggggagaattgatgggggaaagccttttaaagtttattcaaggaagaaagggaagacctaagtaaactttaagtaggattaatataattagaatttgagtcatgataggttattagagtcctagtagaataggctattagagtcctagtagaataggttattagagtcctagtaagttattagagtcctagtagactttggatttcttagagaagtctataaataggctaatcaatgtaaatcaaagggatgaattttgatgaataatattatactttctttcattgcaaggttgcaaccctcaatggtgagactccattgattttcttctaggtgagactcctagaaggccttagtgagactctaaggttttccatcttttcttcattgtttcttctttatctctagttcttatcttataattttctctaccacaaagtttattccttgttcctctccttacaccctaaaaataaaaccctagcccacctacccttgagtgtaggcaaccatcctagggttgtcctacatcagggagtccaggtcagtttggcattgagggtgagttagcagatattacaagggagagtattgtggggttcttccaaatcgctggtattagatagctattgatgcttggcttttagctttttgggaaggtttgagcatgaataatttggggctaagagatcctcttgtggaaagggactcttggttattctttctattctctgtttatcattttttaaatgtatatacatgctccctttagacatctgtgaagttaagttgaatacataaagtttcttttctaatgttccagtaagtttctttagtcatgtttcttaatcaattataggctgttaatgagtcccattttacatttttgtaataataataaaacaaaaaactagtatcaaactaaatgcaaaaattgattctgtagtctttgtttctgatcttttagtgtttatgtcaacagcatctgaacaccatcttccttgcttgtttattttctcaatcagttaagcagctggcaaatcccaactgagttgactga

SEQ ID NO: 12432 - DNA, 11777 bp, Vitis vinifera
  Intron number 4 from transcript GSVIVT01020163001 (locus G SVIVG01020163001) derived from phytozome v7.0 (chr-ID chr1 ; pos 9543487 to 9555263 reverse strand)
cactttctaagacgtaagtgctttgtcaacccttttgattgtttggtataatattttgctgatgtatgttttgtttcaattcagaattttcttcaccaaactcggtgaagatgaatttttttttattgcattgagtgatatttttatgttgcatctaccctactaatattcatgaggggaacttgtcttttacctgttatggaacattatatagaagtgattgcaacttctaaatgtttttggaagtaccccctttttattgttgggtgcatattgagttcattacacacacatatatccgtacttacattcatttacaactgtggtttattcatgtaagctactgtttatacatatgtggaacaaagaaatcccagacaagccactttccgttaataaaaccttgtcaaccaaattagtatacttattatggaaagataaaagagactgaatccaatagtttagaacctttcagcaaccaactcactagcacccactctcttcctcttccactccacccacaaacttatatctgtctatgtaaatgttatttgggccgatgcctaagtcatcaataccatgctactagcctactagataactgaactaaagtgaagtatgaaatgtcccccagctggtccctttctttgtgatgtggtaacattgttcatagtgctcaaggttcaaacagtttccaaccaatgtagtgtttagggtttagggtcatcacaaattgtgtttagggttgggttaaatgggagattgtggaaggagctaaagggcatgtggtggattctgacgagcagaaggggtttggcttttgctgctagagtctttggacgactattgcaagtggaaggagaaaaggttgttcaagggagaaatgggatgggttgcaatggctttgaaataaaaagttgcagtatagtgggttgtaatggcgaaaaagcagcagagattaagccaaataatttaataaatatacaggaggtcacttccttgtcttggaaggagtttgctttgcagaagctatcaagagaaatctaaaagggcaggggtcgctatgtagttatacatggggaatggtgagtattgatttggtgagtaggtggggactaaaagccaactctgcaccaaagttggctaatgtgtaacaatgggaaaaacctttattggaaaacctatggatgatttttttttttttttgataagtaaacaagatatgcattagaaaaggctaaacgccacaaagcatacagggagtatacaagacggctacagcctcaaaaagaaaaaaaggaccaaaaagaactacctccccttaagtggaagctatccactccaaaaatcctataagggagaaagactcctcacctaaatacactttggcccaattccataagttacagacaaaagaattctttaatttatgaatattcaacgcaccccccccctaaaggctaacctattcctttccttccaaaccatccaaaaaatacacaacggaatggatttccaaatctttttccttttcttccctacaaatgaacccctccaggagattaaagcctcctttacagtttctgggaggacccacttaacatctatcaacccaaaaagaatatcccctagagctctagtcactatacagtgtaaaagaatatgatttacattctcttcttcacaaccacacaaaaagcaacaatttgggagttgcacccctcttatctggagtctgtccagagtgagcaccttcccccacgtagcctcccaagcaaaaaaacaaactttagttggcaccctatccacccatattctccttgcgggaaacattgtggcatttggcttgtccagcagcctgtaagcttccttgaccctgaaaagaccatttcttccctgcctccacataactgaatcatcctccaggaaaggcctatgacccctcaaagtatggagcaaatccccaaccatatccaactcccaatcattgaagtccctcacaaaaacaagattccaatctccttggcccgaatcttggtcccacatctcctcaatcgtagcgtccctatgcgcggcgaggacaaaaagatgattgaagcattgggacaacggagtgtcagtgcaccaactatctttccaaaatttgattttggttgattttggaacccttcccaactagaaaagccaaattttcccagcaccattcagattctttcataatctccttccagacccctactccaactgcctcactagccttctttaacctccatccataatcctcttgcccatatttcgtagtgatcacttgtttccaaaggttatccttttcataagcaaacctccaaatccacttgcccagcaaggctctattcagagtggctattctccttaatcctagccctcccttgtgtttttctgtacagaccacattccatttaactagatgaacttttccctccaagtttcctcccccccataggaaatctctttgggttttctccactcttttagcaacggacttgggcattcggaaaatagacaagtggtatattggcatgctagccaaggtgctttttataagagtgatccttccccctttggagatgtactgtcttttccaaagcgaaagtctcctcctgaccctctcttccactccatcccacatagaagtagccttattgggaacccctaaggggagtcccaaatagtgagagggcagagaccccaccctgcaccctagcttagctgccatctcaagaatctcctccacttctccaactggaatgatttcgcttttggctagattaattcgaagacccgaagccgcttcaaaccaaaagagaatccagcttagatgagaaacttgctctttgctcgcctcacaaaacacgattgtgtcatcagcaaaaaataggtgggagatattcaaggaagttctactaccaccccgaatgttgcatcctgatagatatcccccctccaccgctctcctgataaaaacgtccagaacctccattcccataataaagaggtaaggagatagaggatccccttgacgaagccctctagtgctagggaaaaacccagctggcactccattaacaagaatagagaatttagcagaagacacgcagctccacatccatcccacccacttggtttcaaagcccattttttgaaggaccttcattaagaaattccaattgatgctgtcataagctttttctatatccaatttgcaaataagacccttttcttttctcttctgccacgaatctatcacctcattagcaattaaggacgcatccagaatttgtcttcccattacaaaggcattctgagcaatagaaaccaccttaccaatcacttttttgagcctattagctaagactttagccaaaagttatagagcccccccaacaggctgataggtctaaagtctccaagatcctcagccccgcttttcttaggtatcaacaccaaaaaagtattgttgaggctcctaacaaaggaattatgctcatgaaattctttaaacatctccatgatctcctctttggtaaactcccatgcgttttgccagaaggctacggtaaaaccatccgggccaggggctttatccccactcatctccatcagcgccgaatgaatctcaatctctgcaaatgggatttccagactctctgcttcttgctggctgatgcaacccacctgaattctaccaatatccgtcttccaaaccatatcttcagaaagcatctgctgaaacgaattcacaactccttctctcacctcctactcctctactagccactcctcattaaccttaattctgtccatagcgttgtttcttcgatgagcacttgccattctatggaagaaccccgtgtttctatccccctcccttaaccaaatctcccttgagtgctgtctccaatgggcttcctccaacagcacctatttcttaaaggaatctttagcttcttttttaattcagcttcctccacagtcaagtttctctcactttccacccgatcccaaaagtctacttgttgtaaggctgaagctttattagtttccagcctcccaaaaacctctttgttccaaactttcagcttctttttaatttccttcattttaacagccaatctatagctagcactgcccttgacttcaattccctaccaccaggttctaacaatgtctttaaacccctcaaccttaagccacatattttcgaatctaaacggggttgggcctcttcttattccacccccctctaacacgattgggaaatgatcagaaattggccgagacaacctgctctgagtgactccactaaactgatctaaccagcttagggaaactaaaaatctgtctagtctcgcccacgcctgattattaagccccccattccaggtgaactctctcccctgaaggggcaggtccactagctctagatcatccacagtctctgcaaatctcctcatggctgagctgattcttctgtggctgctcctttcttgttgaaacagagtgatattgaaatccccaccaagacaccagggatcatcccaaaggcctcttatcgccctaaattcttcccacataccctccctttccactttggtaaatgggccatacactcccgtaaaaacctaagtagccccattttctatagtcttgaatctacaagacaatgtgaaatgaccctcctcccaatccaaaatatccaagaccctcttgtcccagcatatcaaaatgtcactcgcagccccctccgcatttagggctctccaatctataaatctccccgtgcccagacttctcacaataccctccaacatctcctgaatcttggaaaacctatggatgatgaaagtggtaatgttgaacaattccttgtttttgtttgagctgttattcctgtggtaaagcaaagagttttagaaggagattgtctttaagtggggtcctcctatgggacgatctgacatttagagaaaagaatcatgggtgaaattgcctaggctgctggtgcaattgtgggggagagaaaatttcaaggaagtgagtgatataagtggaggctttatagtggtggatgaagaaatagagatttgatggaaatttcttgtgggtgagaatcttggtaaagaaacaataaaaaaattaaaacacacacacacacacacacatgcgcgattgcatgggatagggaggtgccatgtaagttagggttggtagttgattttgcatcctttcgtattccattatagtggaaaaattcaatatggtatttgcttttaaagatagcagcagcattgagagctgcatcaagcgttcttcaaaacgaaaaagggagttatgagattgaagaagtgtgggcacattcatgggccctaatgcatgtgggaaagagggtctttccaaaggaggacatgcaactatcaaagagaaagagtgtcatagagaggttatgacttctatgcccttccttgggccttttgattgtagatgggattcgatatccccttaaaagtttatcattgaagtttgttgatgggaaaaagaaaaaagggggttgcatgtgccactcaaatgccatacatggaccggttaggatggcttgttggacttataaggggaaaccactagcgcatatggctattgggccataagtaggggagagtctattgggttggagcatccgaaggatgttaggcctagttgtatgcttgtattagagagttgtgtggacctaggagatatggagaggtggatttgaaagtgggtttcaagagtaaggatatcttttagacttgggctggtggaattaagcaaagccttttaaagagggtctaatacatcttgtgcccctaagtatttgggaatggaagtgggctttcaaagttctctttctctctctctcttttttattttttatttatttttattgaaatgtgtgaaaaagaaaatggcaagagtttgtaaaggaatgtcatagttttttctttggacctagagcctttctcctttacattgggaatgggtcttcaaagtatcttaggttggtgggccttttatgtgaagaaatttaagttaagatcacgcgacttgtctctcaggtctatcacatgtagcttaacgactgatattcccttatctttcaaggagtttgagatgcagagggttgattcaaatgaaaatccaaatgttagaatggagtcaacaatggtggatcaatccaacatggcttcaattagaaatggtccattgcaaataattcttaagaataaacgatgtattgaattttcaaaaatcactctaaaccctattcctagaataaaggttaatgacagagtgtttagggaagcttgctttggtgatcttattgtctctcaccctcggtggaagattctagcatgcccctatcattgttgaaggggaacacaaaatatggtttaaatccatcccttaaaccagacaagaaattactctagtttttcaaaaatgcaagggtagctaaggaagaccatgaaaataatattctaagaattctaatggagattgaagtgaaaaaggggtctcagtagtttaatttgattaaggaagacaaaagtaaaaatcagcttaaggaatgacaatgcaactcataaaactatatactatcaatgatgatggaaatgcaagaaaagaagtggagaatgcagctaaaggaggtcactaatgaaaaagtgtggtctctcttgaaatgtgagagaactacatgattcgagtaaggtgatcaaatcttttgtttgggctaaaaaatgagacttgatttgttaccaggaaaacaaagtcagttctatgactgttgggttactaagaaatctgggagtggattggaaattagaatgggcttctcttgatgctaggggtttaataagaaataagaaggatttttttgatgtgggattctagagttctagagtatttagatttaaaggttgcatcatattctctatcttttcgatttaaaaaatcagaagatgatttcatttgggtgttcatagggatttatggacctttgagttagaaggtgagaaaagagacattggaggagttaggctccattagagggttgtgggaagagccctggtgtttagttaagggttttaatatgattcgtcatcaagtttaaaagagaagctatagagatttatcatcagctataagggatttgtctaagtgcataaggagtttttggtgacctactactagtaggtggtggcttggagtggagggtaggacggcttctctaaattcatctagatccctttttgttctcaagtggttaggaggagcattcttattttgtatctaagtgacactaccttaggcaaatatcatatcattctcttaacttgcttgattatgggggtgtcaaaagcagaaagtctctttttatattcaaaaacatatggttgaaagttaaaggatgtaggtagtttgtcaagtcttcatggcagcattataaatttaggtgaaaacctagtttgtgcttgttgagatgctacaagccttggaagatgatgtaaggaaatggaatggataggtctttgacaatatctcctttcaaaaagaagcaagtctacccaagataagatatttcgttagtaaagacaggaaagctctattgcttgacagggacaagatgaaccaaaatttggtaaaaaaaaattaacacaataacctagctattttggaagacgactcatgcaaatgaaaatttaggtttctatggccaaatgaagggaattaaagcactaattttttccattatatgtctaacgcatgctgaagagggaattatatttggcattcagatcatgcaaaattgaagggtgggatcttgtagttttccaatctatgtttgagaatcattattataggagatgtgatgtggaggaggatttcttcaagtgcattggcattatggatagtgaaagtttggcatctttttagggaggaagagttagtggagacttcaacaaatgtgaggttgataaagagcataatatcaagattttcaataagaaggaatttcctaagcaaaaaattaggatacgctctccaactcccaatcatggaagggtcttttgaattacaccaactactaacctccactacctctcccttcccacaggtctacaacttgagcattcttatgagaggctagactaaacagcagagaaaatgctactttcaaatagctctcccttagccaactgtcctaccaaaattttatttgtctaccattatgaatatggatagttgtcctgatcctaaactgcccacaaactcgaaccaaaagtttccctcacctcacaagtattccctcccctcccctcccaacaaaccccccactgcgccccccccccctcctttttcctctttgccccaaccccctcaataatttccttgaataattttcctccatcatctctcctgatcaagggaaaaacctccacaaccatttgccaagtaaggcctaattaagaacctctagtcttctaatacccaaacctccaaactttttatcttcaaaccttagaccaactcactaagttcaccttattgcattcccaaatatttcccccaaaaaaatctctttgcatcttttctagcttgattctcaccttatgaggaatagaaaagagggacataaactaagattggaaagttggagagagtactcttcagaagaattaatctacctctctttgacaaatattgcttcttccaagagtccaatctcctattgaatctttcctcgacagcatcccacaaaatgcaagacttatgaggcaatcccagtcccaagggcagaccaagtagtgggaagccttccaaccttacaaccgagaaaagaagccaattatccacttcctccatctcccccactggaatgagctaacctttttacagattaattttcaaacctgacacaatctcaaagccaattacaatccacccttccttttgtttataggatgcctcttgtatacccttctatgtacatagggtgcacccccattgtttcagtgttgtctaatacatcttgtatgcctattaaaataaataaatgaataaataagaagaagtagatactctagttacaaagttcaacttcaaaatttataatggtgagatggagtttctatgcatagagaggtgttgaatgaactaggcacagttgatttagagtccaaaaatgtcagatatgaatttattgcagctgaaaatatttatgagtctactaagaagatataaatggagttagggtggccagtttcagttcatcaagatgcgtaagcgagatgctttgtgtttagggttgggaaggctatcaatatagtgcccaggcttaaagctcatgttggggaagtatattttgtaggatcatattcctgaatctaatcattgaatgagtatcaacattgtctgtagaggagatttgaagttaatccatatgcaatttcgatgcatgagtgctaggaattttatttggagagactggagctgcaaagaggttaatgtctagaaagaagctaatttttatgcagattggtgagccttctattgcttaaggaacaggatgcaagtcagaggccctctaaaaaaactagtggtgtataatttggttttgcatgaggcatcttgtatgtagtgaagttcaccaaatctttcagtgactgtataccaaaaggctttgtgaatcatggtagggaaaaagagaattcttttcctgcctctattccaagttaaacttttataaattgctaaaatgtatattatgtaaaaacagcctagaattgggagttgcaaaggtgcaaggtcttgtcagcacaatttagactgaagtccaacacctactgaatgcacgtgtcctcagaaaaagttgatcttacatgatgcagttgtttttggcttcctcatgcagctctggagatgataagaaatctgaaacatcataccttttagctcataaatgccaagtttgttaacctttaaatcatccttgaatttgaaattttctcttgaatcctatgtttggctcttgaaaattttaagggaaaatgcaaggaaaagaaaatagagaggaaaaatagaagaaaaataaaaaataaatttaaaattaataggttatttttatatacttagtcaaacacatttcacttaatttgcttcttctatataaagattaaagaatttgaaaatgcataatttctattaattttattatatttgattttctttcatatttttcatggtacaccaaacatattccttaacattttttaacttcattgagtgctttcctagaaccaaacatagcataagggtatatttgaaacttggaaaatgcaaaggaatgaaaaacctggcaaggaaaatcacattcctgtgtttggatgatgtttaaaatcatgtgggaaaaaatatatgaaggaaaatactaaggaaaagattaaaatattttccttattattttcctaaaaaaaaaaaggtgaggaaagttgagaaaaaagtggggaagaaaatcatggggctcttcataacacagaacaactctctcttctcaccacaagtctatcttcacttgtgttattccctttttattattatttttattttttttgtctaaattctcttgtgttctacatgtggcatcattgaatagcagaaattttagggtccacatcctatgatggacatgtagctgccattgatgtgcttgccgtgttgttctaacctgagtttctttgtttttgcttttgtgtccacttttcctatatttgtctcccatattggttattatggagatattggtgttttaggtccttctcatattcattttattttccttttgttttttgcttcaataaccaaacaagtaaaaatacattctttgggattttaatttttttcctgctcttttttttccttctcctccttctcatgtctatttttctccttcaaactttccaagattcaaattctttaattatggaattacaattttttaagtttcaagttaatccccttcccatctactgtccaagttgtttgtctattcaacaaaacattgtttagtctcattacttcaggtctttttttcaggtcagatttttgtatatggttttacagttctgtgaaatgaatagtttgtttctgattgaaaaaaaaaaaaaaaatctctttgataaaaaggtgatctcttcccttgtatgctccctcaaagttatttcccttcccatatgaagttgacttatcacttatggacagcattgactttaatgagtcctttggttccctcgtgaatcggaatgttcaataagtggcttgtagcttttataacctgtatttgtaattttattttccaatactgttgaatgctgcttagcaaaatagttgtttgtgccttctactcctatttgtacttgtgcttatatgcatgatataatattttgtgtgcatgaaccatgaaattattaataatatgagaattaaagtgctctgatttagatttcaatgtctctcaacatgcaacatggtttgttcaattttgttttttaattttagtttgttggccatggttctcacatcattgagaactttgttgaaatttctaggaagatgttaccattgacctgttattaattttaactgattcaattgatataaaatcagacttccagtgcgctgggacaagactgccatagttg

SEQ ID NO: 12433 - DNA, 4055 bp, Vitis vinifera
  Intron number 2 from transcript GSVIVT01018740001 (locus G SVIVG01018740001) derived from phytozome v7.0 (chr-ID chr4 ; pos 20283703 to 20287757 reverse strand)
tttcaaaaaacaaaacaacaaccaaaacgttttctgcgttctctcactttggtaaagcttctgaagctttcatcgatggcgggtctcaaaaagccaccgtttttctccttcacttcttttgggtctcagaatctttaacctcgcttcctcccaaacaaacgacaccgtttcatctcctctcttctctccccccactctgtggttgtgaggaggaaagcaacggagcggcagttttgagatgtaagcagacaaatgaacgttgggcagggtgcccagtggagtaattttatcaaataaagtattatgaccaaaatgcccctagaatgtgcctttattcacggcatgcccttgggacgtgcggagaacaggggaactaataaggaaggaagggaggggtgtttaggtaactatgcatttcaacggccaatacagccttaggaaggtaatatttcaaaaatggaagatataaatgtgttgtatcaaaaaaccagattttacgcagacaaggattttttgtaaaagcgttttgcatggaccccgctgaaacgacaccgtttcattgtctacaattttaatctgccaattgaaatttggggtgttttgggatattaataaatttgcttgcttttttcagggaactgtggcactggaatcaatctgtcagagaagagcattccaggggaaactgccaaaaatatcctcccttttggacaactatacccttctcaaactttgcaatttacaacttcccacctaaaaatatcccaaaaggtaacaatttgttcttcttcttttcttaatttatagagaatcttaaaattctcaggtccacatgggtgctattatgatacctaaatttgttaaatttttatgttacatttttagtatgtatctgtatttgacaaaagaagataaaagattggttttttagtcttgatctcattttattttactcgggttttaattttttaatttttatattttggtgtcgtttcgtatttaaattgtgatttctctttgtatttaatagtttaaatttaattattcgtgctagtatattatgtactaaaaaaatattatattttgataatagatatcgtctattttgagtcacatagacatctaaaatgttaaaaaaagttatgtgttataagttttttttcctaatccgacataaggtatcggattttgatagattaacttaaattgaagtaatctaataatagatgatatataatctcgtaattgattataaagcattaagctaaagcaacaataagaaaatcaaaagttgcagccttttgaaggtgaaatcaatgggggcaccatgtggtagttccaaatatgttccacaatggtaacttggaacttagctaacaaaatctaaaacaattgagcaaggggccaccattaccacatggtccgcatcataccttattactaaaatattcatcacacaccattggatttttaggtaaagttaaaaaatttacaggcttgtgattccacattcaacatgtgcatgccatgaaaaagaaatattaaatgggttttcattttgttcacaaactaaacttatattctatgtgtaaaatcaccctaaagtagtacatatgacttgagaattttaatatccttcatataattttatttttttttcaaatttgagaaaatgagttttgagcaaaaataattcatttgaaaaacaaaatttatgaagttaaaagtctgtttgattatatgatttaaaaacaatttttttgttttaaagatataaaactatttttaaaattttttaatactgttttgttgttggtttttgaaaataatttttgaaaataaagtgaaatagagaacaatttttagagaacaaatagaagttgttttcatcaatttttaaaaacaaaatgaaaacatgggtccatttggttatgttttatgaaacttgtttttaaaaactataaagttaaagaataaaaagtaatttttaaaaacaagttttagaaaacataaccaaatgaaccttaatttttcaacaaaattattttttgaattagtgcatttcaagtatgtataaagacctaagagttttttttttataaacataaaacagtggtttgtgactacgataaggttatcacagtggctagctacataaagttatcatcatggctagttacgataaagttatcgtagttactaattataattttaatcatctaaaaaaaatttaaaatcatagtcatgatatctacatggatgagaagcataagtttatgaattgttttggtaggggatttaatttgtgaattccttttttttaattatcaaaatttatttttttttaaaaaaaacaagatgtattaggaaattcaatagtttatgataaaggatacactatgatttaatagtgacattttgaaatttaggataaaatataagctatgattcaatagcagtaatacaacttttacaataggagaaaagaattattgttattttgagtcaatagttgttaatatatgaagaaaatttttaatttaaaatattagagacttgaaaaattttgtatcatggttgaaagggctttgcaaaagtacttattaatgactttttcgtaggactctttcaaacatttccttggataccttcaatcgtgttttggaaggagtcatgactcatgagtcttttggttgaagaagacgccatggaggatgacatacttaaagcttttccttatataaccagtcaaaaagcccctcaattttatggctttcaagctttcttctaaaatttgacgttaaatccattttttttatataggaatgaggagtgagaataaatattttattttttttggagaatgtaaaaaagaaaattatttcaataaaaataaaactttacctataaatagaatttaatttaactttaagagaatgaagtgttttggttcgttagattcaagttgttttaaaaaaagttttttttaaacaaaaacaaaaatcttatttaaataagttgttttaatttttttttaattttgtaaaaaaaaactataaattcaatttatatcatgtaaactaattttaattcaagtcttattaaaaataaaaacaattttgtaattacaaaaaataaaaaataaatatatttaataaaatatgaatagtaatattataatacaatcatattttttttataaatattataaataatgaatattaacattttcataaaagcatcattgatttattttgttggaaataaataataataataatagtaacaacaatttaaaattaataactgttaatactattttattttgaataaatttaaaaataaataaaatttaatttttaaaaatataaatgaatgatttttttatttcatacatacattcatctgtttatatggttttttattttaattttttcttatttatttacattttccttttgtatttaaaataagtgaaaataatttttatttattctttaaaaatgatttttaattttattttgtttttaatttttttttttaagaaaacaacaaccaaacaatgttataatttttcaaaaacatttttcggtttttagaagtgtttttaaatcacagggtcaagtttttattatttagcaaaaaaaaaaaagcctctcaaagatatttttaaaaatttaaaaataataattttaaataatgtgtttttcttttaaataaaaaaattattttaaactatatacatgaaagttattatctatttaggttttttaatcttcatacctcaagagataagaagattttgaagaagaagaagacgaagaagaagaaggcaatcagcagttgtagtcccttgcatgtttataattggaatcgtatccctttccatgcaaaatcaatcctttgcttcctctctcccccaccccttttcttccacccatctctttcgttgtgattccctctctataaagacaaactaatcaagggtcctccctccactatcatcattccttctttttttcctcttcaattctttgcagggtgggtgagctccc

SEQ ID NO: 12434 - DNA, 2241 bp, Vitis vinifera
  Intron number 2 from transcript GSVIVT01015545001 (locus G SVIVG01015545001) derived from phytozome v7.0 (chr-ID chr1 1; pos 4718060 to 4720300)
accattcatctcaagatcctgataatagaacttatgttagttcatggttttctttctctccaattcctatttatagaatttgtttgtttccaaaaactattttcttgcttttgataaacctgtggaaaaatcagggatcttgtatgacagtggtaaatgaaagaaatttgtaaaaaacaaggaagaagaagaagtgtttatgcactttcacaccatatccataggcaacctggtaggagaagtttcactaatacatagggagaacgcagagagatgttatctagaatcgtatgtcctctcaactacagagaaacactactcccaactttacaaaatttgcctccataccatcattgcttgattggcaatcttaaaaatgatacaataatggtaccaaatagttcattaatagacaaaagagtttgacaagaacccagacaactttagaaaaagccaatccctaaaaaaaaaaaagggtttaagacactttacctcctcaacctatccagtgttttgcacattgcccctttaggtttaaattgaacacattgcccacaagcttcataaattgcaacgcattgcctttttcgttagatggtgttagtttaagtggatggaaatgtcacttgttttacacatgactaaccaatgaaaggtagatttgcaaattcctaaacctaaaaagtcactcctccctcagtcttcgttttcgtttaagtctgtaatacattgcagccctaaccctgtttggctgctgagaaaatgtaaaaacaaaacaaatcaaagttcttaaattgtaatatccattgacctcactacaactagttaacatagttgagtagagatttcaatttccttttagaaaccaaatcaaagaaaacctataacaacccaaaattccaatctcccctcttttccgccactttctttgcaaccaaacaacaagaacatataaagtcaaaccacccaaatcccacatttcagtgagcattgcacacacaaaaacaatttcgtccaaatgggtacccttcaaaatcaagccaaaaactaaaaaacaaaaaaaaaaaaataaaaacaaaaaacaaaaaacaaaaaattcattccaataatcacaccagaaaatgcccatttgtagacccccaaaattcaaaactccaacctcccttagctcctttttcagaggtggaagatctacaatgcctacgaaaaaaaatgtatgattaaggtttgaagattggagtaagaaggaggagaagctagtaagaagataaagacaaaatgctgaaactgctaaccacttgtaaaatgaggaaaatgctgaaaattgcaccccaaacaaggctagggctgcaatttgttgcagatggaaatgaagatgaagactgagggagggagagttgtttggggatttttggatttgggggtttttgggtttgaaaattttcaaatctacccttcattggttagccacatatacaacacatgagatttccgtccacttatactaacatcgtccaacgaaaaaggcagtgctgcaatttaagaagcttggggtacaatgtgtttgattttaaacctaaaggggtaatgtgcaaaacacgggataggttgaaggggtaaagtgtattaacaaccccccccccccccccccccacaaaaaaaaataaaggcttctcatctttctcaaattttctttacatgttttttttttttttttcacctaaattcattgatctaggaaaattttcgcttcccaagattttctttaagacactgtcgctttaagaaagaagaataaaataacatagtttgttggtttggttatcaccaagcctaataatctccatcttgattgcaagtatatgtagagcaacaactagaaatcatggtagctcaactatttagggttcgatggactatagcttatgtgtttttggtccaaggaaagaaaacatgaaatcattcatgggattgaatctcaattagatattctcaaggagaaggtttatataaaaaaaaaaattgaagttttatcacaatgtagtctaactagagagcctttgtgctaccattgttttatgttgtttcttttcactcccattgcgaagcttcttaatgacttttgtgtttttccccttcttcattttactagtgtttgtgaaatttatttccttacattggttcatgtgtgattattgactagaaggtttgatgagttcttaattccaatcttcagtagcc

SEQ ID NO: 12435 - DNA, 12341 bp, Vitis vinifera
  Intron number 22 from transcript GSVIVT01016183001 (locus GSVIVG01016183001) derived from phytozome v7.0 (chr-ID chr 13; pos 6982149 to 6994489)
atcatttggcaacaagcataatagcactttcacaggttccatctgtatttcatatgttcattaatgatatttttcttctaaaatgctcattttgtaccatcacttttatatctctgaattacatggtaggtaaatatttgatagtctttcttatggttgtagtaagatagtggtcaccaaaagcaagggggaaccatccagggaaaaatgttcatggatgagtggggattgcgtgtcatcacttaatatctggctttctgcaagcctgtaaaaatatcttgtacatgctcaatagtgctgctagtttttgaacagtatagatgacaatgagttgttttcaagtagcttgagtttgggctggttttcattgcctagctgaagcaccctctatttgcaccaaattaatgcttgtaacagttcaatctgaacctggcccattaactaggggctccaagtctgggtcaaaattgctaaatctaatcaagagtccttaaaaagaagtttgcttgggaaagagcttctactcatgaatcctcgataaaattgaaattaaggcctccaatgcctctaggttctaaaatgtggaatttagctttgttttttgcttgggaagctagaaagcttagcatgttattcaactttcttcttatatagtaatgaaatgcgctcaaaagtggtggaggtcacaattaattctaatagttggcaggggttctttcttgactaaggtggtgtttgttttttttccttaattctaaatagaacttaaaactaaatagtgtttaatactgttaagtattaggttgtttgtgtttgtaatattttatttctattaagcattaaaaagtaaagaaaaactaatatagaaaaaaccaatattttgtccttttttatccagccaaaaatttctagtaagtcatgaaaaagtagataaacaaacaacctaaagtttgaaagcaaattgtttttagcaaaaagttaaaaaaaacatataccctaagtcattaaagaccattctcacctcaccttagctcatagagtggggttggttttttgcaaattttggtgttgccaatgcaagcataatgaagggttggctgaccatatccttaaccattgtgggacgccttgttgtttctgtacttggttattctccttgtttggagtctcatgggtgcttccccattctgccaagtagatgttactgggttggcatgggaatttcctgtacaaaagctgcaagaggatatggaagttgcccctgtttgcttgatttggtacaagggtagtggtatcgaagaattgtttagggcttggaacttttgggatgatgatgaaaaatatcttcattaagtttttctttacttggtctcatgattcattggggattgataatggtgcttttttagatttcattgacagttaagatggcacagtgcctatttatcttcttcgtcttgttggttttttttaggcacacttgatatacttcatgcgttcttagactgcactccatttttttcctatgcacctactgatatatccttggtttcctaacaagaaaaagaaagagaaagagaaaacaagagaagaagaagaagaatccatgattaattcctataagcagctttaattctgcagaaatatatactgatatttcctactaaaaattgggaaaaatgggactttaaaaataaactacatgtatggagttgtctgttggtttcaattgggatacctattatgaaccctcaatgttcttattcgacaaaattttcatacattttagtgggacaacacaattttttgacaacatgattttctgggtcaaattaatttgactttgctatctaaccccaagtttttaaaggcgtttctcgagcacgcctcagggcgaggccgggctaaaatgccttgaggcgtaagaaataaaacgcgactcttgaaaggcgtacgccttttctagtgaggtgtgacgtcttttatgctccaagaagaaagcgtacgctttgtgagagctgatgtggccataaacagaaataaaaaaaaaaaccctaagtaatccctaaaatagcaacccaagtcccgattgaaaactttggcaaacacatattgggagaaaagctcaaaacgaaaccctatctcaagtggcgacggagtgctcaacctcaggcggtgaccaaccgtagtgcatcttctccggcgacgatccctctcattcatctccaggtatgttgcgaactcgcgatctccctctcttcgtctcccatactttcccctctcttcatctcccatagttttctccctcttcgtctccctcggcattcggctcttcatcaaattttattttttattttttattatcaaattaactttcaaacggcctcttcatccaatatatatatatatatatttaaatcattttgaccaattggaactctcagccagtgttggagctctcagccagtaagctgttatttgtttctccctttattcattttttttaaatattctgcttaaaattatttttttatttctgatttaattttaatttccacccaaattttttttatttcattattaaattccaattaaaatttatgcgtataatttttaaattcctctaaaaaaatattggttttttaaaatttaaatcaattaaattttgtatttcatttctaaatttctttcaattatgtcttgttattattttttagtcaattatattgttatatagaaatttgaatattattattggtgtttttttttagaatgagttcctccgatttgaaaaattcaagaaaagattttgtgtggaagtatgttgttgaagtttccagggagcaatatttaagatgtaaattttgcaatcaaagatgtgcggaaggggtgaatagactcaagcatcacttagcaggaactgatcatggtatgaaaccatgcaacaaagttagtgaagatgctagattggaatgcaaagaggcattgaccaattttaaggatcaaaaaacgaaaaaaaaatgaattgctccaagaaattggtatggatccaacttcaatgcatgagagtgacttgtctaaaacaatagggacattagggagtgggagtgggagtgggaaacctattcctaggggacccatggataaatttatcacttcacaacctagacaaagtactttgaattcaaagtggaagcaagaagaaaggaaggaagtgtgtagaaaaattggtaggtttatgtattcaaaaggtctcccattcaacactgtgaatgatccttattggtttcctatgatgggtgctgttgcaaattttgagcccgggtttaagcctccatctatgcacgaattgaggacatggattcttaaagaataggtgaatgacctaagtatcattatggaagatcacaaaaaagcttggaaataatatggatgttcaattatgtcagatggttggacagatggaaagagtaggtgtcttatcaattttttggtgaatagtcctgctgacacttggtttatgaaatcaattgatacttctgatacaataaaaaatggggaattgatgttcaaatatcttgatgaggtggttgaagaaattggagaggataatgttgtgcaagtcatcactgataatgcctttaattatgtgaatgctggaatgaggcttatggaaaaaaggagaagattgtggtggactccttgtgctgctcattgtattgatttgatgttggagaatattggaaagctaaatgttcatgctactacactttctcgagctaggcaagtagtgaagttcatatatggacatacttaggttcttagcttgatgagaacatttacaaaaaatcatgaacttctttgtctagcaattacacggtttgctactgcatttcttaccctccaaagtctttataagcaaaagcaagctcttatagcaatgttctcctcagaaaaatggtgttcaagcacatgagctgaaaatgtagaaggtgtgaaaactcgaagtacagtattgtttgatccaaaattttggcctcatgttgctttttgcataaagaccactgttccattagttagtgtcttgagagaggttgattcagaggaaagaccagccatgggttatatttatgagttgatggattcaattaaggagaagattgcatttaattgtgggggcgtggagagaaaatatggcccaatttggagaaaaattgatgcaagatggactttgcaacttcatcgacctttacatgtagcaggttattatcttaatcctcaattgcggtatggagataagttctctaatgttgatgagatgaggaagggattatttgaatgcatggataagatgttggattatcaagaacatttaaaagctgacattcagttggactcatatgaccaagcaatgggtgaatttgggagtcgtattgcaattgattcttgaacattaagaagtcctataagttggtgatgcgttttgggggttcaacaccgaagttgcaaaagtttgctattcaagtccttagccttatttgtagtgctttgggatgtgaaagaaattggagcacatttgaatcagtaatacttctatttttgtaaatttttatgcctatatttctatttcaatgttagtgaactttatttcattttaacacataaatttgtttcttttattatttgtagatccatacaaaaaaaagaaatagatttgaacatcaaaggttgaatgctctagtgtatgtaaggtacaacactagattgagagagcgaagtttacaaaggaaacaaaatgttgatccgattttggtagaggagattgattcggatgatgaatggattgcagagaaagaagatcccttcctcccccttgatctttgttggcttcaagataatgagttattcagtgttgatgctattagagttgtgtcatccaactcccaagagactcaagcatcatcggatcacatggtttctttacatttctacaaaaggaaacataatgaagtaccaagtaagtactcaaaaattgaagtaataaatttgattaaatttaataaaaaaacttataatatttacacctaattaatactttatgctaggtacaagtggaggcaaaggcaaagagaaggagttgaatttgacaccaattgttgaagatgaagatttacatgaaatggggatacatgattgtggacattttcctactattgatacattggatgaggatgatgatgaccttggagaggaggatttaagttgaaacaatttactctagttgttatttcatgacttagttatggattttttgtaaaagtttagaactattattaagtttgactctattttctatttcatgacttagttatgactctttgttaaagtttgaaactattagtatagttgaatctattttctattttatgactttgttgtggttttttgtgaaagtagggaactagtatgtcttttttatttatgattctaatgaattgttttcctgtttttatttatgctattttattttatatattttaaaatattaattaattatataatgtgaggcttaaaaagcttacacctcaacgcctcgaggcttacgcctcgcctcacgaacacaaaaacatctcgtcttacgctttcgcctttaaaaactttgatctaacccacctcatcttatttcatccttttcatgttcgtagggctgcattggaattagaatatgctgagagagtacagatggatggtttgatttattttgtgtactttatgttagaaagttagtttggttagattagttcaaattggactcaaattttagaatggataggttcattgatttgaggaattttagaatggataggttccttggtttttttgtacgtagtcaaagttttattcaaattaggattagaatcagatttatttttcagtttccttatttttagcctaggaattatccatctgctggttatttaaacggatgtagcctgtgttatgaagattagaataataaaatagaagtttatccaaaaaaacctttcacagttttatgatatcagagctagagagaaaaaaaaaaggagagtagaacgatggtgaagactgctatgactggcacaactcacagggaggaatctgatgcctcatatgggacttcacagctacaatttccagcaacaaatccaggcggtacagagaatccaacccagcaaattatgattcataaattaaatggacgtaattttcttcactggtcgcaattggtgaagctgttcatcagaggaaaaggaaagtttggctatctcacaagcaccaacaaagcacctaaatcagaagatcctgtgtaccaaacctgggattctgagaattccatggtaatggtctggttaatcaactccatggaggtagctattaggcagacctacctctttcttcctatcgccaaggacctctaggatgtagtctaagagacttattcagatctaggtaatgctgctcaaatgtttgaaattaagactaagttgaaagatattaaacatggtagttatagtgttacacgatactataatatccttcaaaatgcatgacaagaacttgatttattttctattatggactggaagtgtgttgaagatagtgcccattattgcaagattctcgaaaataaagggcatttgattttttggtaggactcaataaggaacttgatgaggtttgaggttgaatcctgggaaaagagccactgccatctataagggagatcttctctgaggtgtgacgggaagagagtaggcggaaagtgatgttgggagaacaacaatctagccaatttgagacttctaccctggttattcatggtggggagacttttcaaccaaatgactagtgaccaagaaaaaagggtgatcgtccttggtgtgaccactgtaaaaaactaggccacacaagagatacgtgttggaaaatccacgggaagccgcctattaggagaaacccgagacctgaccgcaattccaaagcctaccatagtgaatccgagaaccctaacaactaaataaccacttcaccattcaccaaggagcagttagatgtcttgcaatatctccttaatccacacactacatccacttctgtcttaggttcaccaaatgttgatccctcaccatcttgctttctagcataataaggtagaactcaatacccatttagtgccttagtcaattcttataaaccttggatcattgattccggagctatagatcacatgacttggtcatccacttcatttacaacatgtgtaccatgtgctggtaatatgaaagtttgaattgcagatgggtcatataccccggtcgttggaaaaggaaccatctccctgacaaaaactttttctcttgaattagtcttacatgtctcaaatttgtcgtgtaatttattgtccattagtaaactcactagagatctcaattgtgtagctaaatattcttctactggtgttgttttttaggacttagctttggggaggacgattggtagtgcatgtgagtgtgaaggtctataccactttgatgaccgtgaagttgtgcaaggacaagccgctgttgctggtagcagtgttttatctttaccttttgatcatgaaacgatgttatgatacttgtttccaaaacttttcaaaaataaaaggttgtccaattttcaatgtgaagtgtgtcaaatggcaaagcataccagattagtatttcctgctaaaccttacaggtcctctaaatcttttactctcatacatagtgatctttggggaccatctcgggtaacagatctaattggtgcaaaatggttcattaccttcatcgataatcattcaagaatttgttgggtttacctccttaaagaaacatctaaagtctttcaaaccttcaaaaatttctattcaatgatcaaaaatcagtttcaaacgtccattacaattcttagaaccgacaatggtagtgaatatatatatgttgttcttggagaatttttatcaattaatgggattattcatcaaaaatcatgtgtagatactccacaacaaaatggagttgccgaaagaaagaataagcccctcttagaagttgcttggtccttattattttcaatgaatgttagaaaaatacattggggggatgccattcttacagcagcatatttgatcaattggatgccctcaaaagttcttaattttaaaactcccattgttgtttttcttgcttcattcctagattcttgaatttgccaagatctaccaattaaaatttttgggtgcattgcttttgtacatgttcattcacataatcgtgttaaacttgatcctagggctatgaaatgcttatttttaggatatgcagcaactaaaagaggatatagatgttttgatcctgttaattggaaactgtacatcgctaaagatgtaaccttctttgaatagcaatcctattacacttcgcttcaaggggagaattctactgaagcttcgtcatggaaaattccacaatctccttttctggttcctaaactcccagcaacaagtccagtgtctactcaaatctctccatccattcctttcgttcgatcaaacccaacaatagttcgagtacatgacagattgtcaaatgcatgggaagataaagcattgccaccaacaacccagtctacaccacagttcaaagtctgctgaaggaggtgtatagtacctgatacactcacaccttgccatgaagccacatcggagatagtgcttgaatcaggtttggataattcttcattccccctcacattccttacttcatgtagacccagtgcatagtgacttagatctcccgatagcacttaggaaaggtgttagatcctgtaccattcatcccatatctaattttgtctcttatcatagattatcctcgtctttttctgcttttacctctcacctttcttccatagaaattccaaaaaatgtacaagaaacatttggtgatccaagatggaaagcagcagttgtggaggaagtcaaagctttgataaaaaatggaatgtgggaacttgttaccctaccaaaaggtaaaagaattgagatgtaaatgggctttttcagtaaaatacaaatctgatagctcggtggaacgatacaaggcaagattggttgttaaaggatttacttagacttatgggatagattaccagaagacttttgcactgatggcaaaattgaacacaatccaaattcttctctctctggctgcaaactatgattggccttgtcagcagctggacataaaaaatgcttttctcaatggggaattagaggaggaggtttacatggtagtaccaccaggacttgaacaaggaagttccaataaagtttgtcaattgaagaaagctctctacggtctcaaacaatcacctcgggcatggttcgaaagactcttaagagtagtaaaacaatatggctatcctcaaggacatttagatcataccatgttttacaaatctactgatgagggtaaaataactgttctcgtagtttatgttgatgatatgattttaataggcaataatcatgtagaaattgaagctttgaagaagatcctagctaaggagtttgaggtaaaggaccttgttgcactaaggtattttctaggaacggagattgccaaaaaaaaaaatggaatctctgtttctaaaaaaaatacactttagacttactcaaggaaacagggatcctttgttgcaagcccaacgacattccgattgattcaagacacaagatagacccgactgaaaaaggggatccagttgacaaaggaagataccaacggttggttggaaagctcatttacctctctcacactaggccgaatattgcttttgcagtaagtacagttaattagtacatgcattctccatatgaagtacacatgaatgttgtctataaaatactgcagcatctcaaaggaaccccaagaaaaggacttcactttggaaagcacgatcaattcaaaataaaggccttcacagatgcagattgggcggggtctatagaagataggaggtcaacatctggctattgtacatttgtatttggaaatcttgtcacatggagaagtaaaaaacaaaatgtggtggcgagaagtagtgttgaagttgggtttagatcgatagctcatggaatttgtgaagtcttgtggatcaagagagtattagaagaactaaagattacaattcatcctccagctaagatgtattgtaacaacaaggcaactataagcatctcccacaatccagtccaccatgattgaacaaaacatgttgaggtggactgacattttatcaaggaaaaaattgagcaaggggaaatatgcatgacatatgtgccatccaaaagccagattgcagatgttttaactaaaaggatcctgacagaagactttgaagataatgtggacaagttgggtatgatagacatctatgtcccaacttgagggggattgttgggaagttagtttgattagactagttcaaattggactcaaattttagaatggataggttccttgatttgaggaattatttgaattctagtttttttgtactagtcgaagttttattcagattaggattagaatcagatttgtttttcaatttccttatttttagattaggaattatctatctgctggttatttaaatggatgtagcctgtgttatgaagattagagcaataaaataaaagtttatccaaaaaaacctttcatggttttactttctgtggtaccttttagtgtgtgtatattggggcatgcatggtttgtctgttttcctttttttttttttctgtagtcaaaacaaaaaggtgttaaattaaaagtgtccagcaaaaaggacacacagaatccaccaaagcctccttcttaaagagatttcttctataactgagatttcatcttctcccattccaacattcagaggcctaaccttctttgtgagctgttacattaaatagcctagtgaaacaatctttcagcagtctactttcacatcagatatcatgccagaacatgatctattgtccatttccaattgattagagcttgtccttgagaaaaaaattgtcacccaccttcatgggtttttctttccattttgcataagaaattttctaatagcactgaaaagttgtttctgagaataagtgcttttctagagtaaaaccagggaagtgcattcctagactaaaacttccatgcctagtgaacttatagtttggaaaatcataagtggatagtgtacttagatagtttaaaaggtaaaatttattttgcaaattcaattcccctaaccatttagagttctagtagaatttatttcctttaaaaggaattttcgaatttgtccctccccggatgccactttggtggctcatgcaatgggtaatgacattttctattctggtatggatttacctgtacgtctataacgttttttgtcccatatataaatgatggaacatccttctcaaatttctataacagtttgaaatggaattcatattaatatctattacctctttgtccactagaatagtttggaactttgaccatttagcactttaaccatgtttaaattattgtagttggaactgattgaacaagccatatatctttattagatgtgttggagggtcattggagatcatggtggcaggatgatcagggtgtgattgtagcctgttagttctaggctagctataaaagtagagagtctagctttatggaaaggttttttggaggtgaaatctctgcggtactatagacttcttgtggaaggggatgcagttttcttttgttgggtgtctctggggaaggtcatttggagatagaatggatggatttgtcaaattttggttgtctttaaagagatgtgattttcttttcactggaggcctagatcaaccaaccaacagttgagttggcaaagcatggagcctacctgttaaaaggtttttgtagggaattttcttcccattgacagattttagagtatgatacactttggaagctcattttgttctttcttttgtactctttccttcttcggtttgaagaactgctaatctttgtatcctatctcttgttttgatggtgaaatgtttatttccctattaaaaaagaggcatatatattccttcataacatctaatgtgtctttgccaataattgttttgtttcttatgcattactattctacctatggtaaataatttttttttttttagggaatacctttttttcattctggtg

SEQ ID NO: 12436 - DNA, 6028 bp, Vitis vinifera
  Intron number 3 from transcript GSVIVT01035878001 (locus G SVIVG01035878001) derived from phytozome v7.0 (chr-ID chr4 ; pos 5183392 to 5189419)
attgctgtccgtggttcgaattttcagacctagaggttagtatatgtgggctaattttttctatatgttccctgctatttatgataagttttttcatgttcttacagtgattcaaaacctgttaattgtgaattttgtatgtattgaacttttggattcccttagctttggttgaccttttagcacctttgtgtacatcatgtatacttttgtgcactgttttgtcatgtgcttatatatatgttgatagtcaacaagagcatgtattaaaaagtgccaaagagaggtgcttttaatatatccgatctttatgtaccaaaaagaaaaaaaagaaaggaaagaatgtagtgaacttttggatctgctacagtgtctttataacattcattgatttcactggcttcatgcgaggatctacctttttttcccctttttctttttccttttaggctacttacctaattcagctttgatatgacatgaataatagaaatgcatactaaaggttgttttagtgatgctaatggcttctattatgtgactgcaatgagttgaagaaatgggagatagaagagggaggatgaagaatttgagcaaacttgaagaatggttgaacagactaatgggttggtgccctccttaagtttgaaagggtgtctttgctaaaaactgcttatgttcacaaagttttatgtactggtgacctgaaacgctctcctcaaactggagaggaaataccttccactaatagcttgttacaaatgccatcaaattatgtcttacccaaatactttgtaaagacaccacaagctgatttgcatggatttgaattagccataatttattattcatatccatggccttgataaaggtggatttttcttcatcagaaatattaaatcttttccattattgagaaaagatcaataaggatgagacattcctctacaatataaaaatctgatcaaaacaagaggaggaactccttcaagagaagccatataagcaggacagctaaggaagcttacaaaatgagtgagtcatagcaaacaataatgacaactcaacaaggagaaaaatccccaacaaaagataccaaatatttagctcctttctttggctaaaatgtatgtcacttgattgactaagcaaggaacccaacaaaaggaacacccaacttcacaacaatatcgaatatttggcggattcacttgtcaaacctacatgagtctcttttctttgtagtcagccatgcaatggcattagcaaaataaggtggaaatttaccatgactgacataagtaatcttttttctaggctactattctaaatcagctttgatatttgtaagaatagtaggaatgccttgtaaaggttgctttaatgataatgacctcctgtaatgagttgcaagaacgggagatagaagaggtaggatgaagagtgagagcaaaaagtgaagaatggttggacagactcatgggttagtgccctgtttggtttaaaaggatgttttggttaaaaatgctaaaacacacagtttaagtactagtgagttaaaacactctcctcaaattggagaggaaataccttcactgatagcttgtcggagaggtcatcaaattgagtcttgcccaaaaactttgtaaagacatcctgggttgacttgcacaaatttgaataagaggcaatttatttgttcttcatatccatggccttgataaaggtggaaatttaccatgggtggcataaggatatgtctcaaagttgtcaaccttgaaactttacatatgatgccctgccacaacctgatcattgacatatcaattgcttaatcaaatagttgcttcatggaaaatgctgagtaacttatcattggctgtttccttgaaataggatgtgctaatatggtttagaatttgttttaaggatgatttttggttggctaggagattgaagtttaagatgggttgtcatcttggaacatagttataaattctcacgagatataatagtacccattgaattgcagagagaagctaaaaaaaagtataagcatgacatcttctactccttatttctgagtgttattgtgatttataacaaattttagaaatatgtgatttcttcaaatttcaaattatgatgcagctgttggttggctgtatcaaactgaaacaaaatccttatgattcaatgagttctatggttcaatgggtaaaatatggatgactttagaggaatgagctatatgcacttttccaaaggactagtgttatggaaaagacaatacatttccaaaggtggaagacaatacatcttctactccttatttctgagtgttattgtgatttataacaaattttagaaatatgtgatttcttcaaatttcaaattatgatgctgctgttggttggctgtatcaaactgaaacaaaatccttatgattcaatgagttatatggttcaataggtaaaatatggatgactttagaggaatgagctatatgcacttttccaaaggactagtgttatggaaaagacaatacatttccaaaggtggaagacttaccctaatctgtagcatcctttctagcatgtctatatattttatttccctattttgcatcctgaggacaagttgaggttagagcaaatccaaagggactttctctggggtggaggggccttggagtggaaaccacatttagtatggtgggttatcatctacttagacaaaagaaaggatggtttggggattaggaatctttcgtcccttaataaagccttgcaatgggaaagaaagagggcccttttgacataaagtaatcaatggaaaatatggggaagggagggagggttgcgatctcataatgtgagagaagggtatggagtaggatatggattgagacattgtgagtagtagagttgctttttcagtgggtaatttttttgatagctaagcacagagaaacttttcagtgggtaacttaatgattgggagatggaaaacttcttgttgtgtttgagtgggaaaagattgattgtggatgaggaggatagggtgaggtgggtggaatcaaaggatgacaattttttggtaaagtctctttacaaagccttagagctggactcaacaaggtgtttcccaatgaagataatatggaacttcagtgcgcagccaaaagtaagcttctttgcttgggaagcgtcatggggaaaagttctaactttggaccaggtttagaagaggggttgggctttagcaaatagatgttatttgtgtcaagtgcatgaggagtccataaaccgtcttcttctccattgcgaaaagacaagggaagtgtggaagctgttctttactttgtttggagtgttttaggtgttttcgtcctctgttagggaagccctcttggggtggaaagggtgttttgtgggtaagaagcacagagcagtttggaatgcaggcttattatgcttgttttggtcagtttggaagacaaggaatagaattgcttttgaaggtggtgtgctgtccatgcaaaagctgaaagcgttttttgtatgtttactttggtcatagttgaaattgtttataaaagatggtccttcgatgctatttgattttattgattgggtaggttcttgttgaggggaaagttgttttttgtacatcttgttgaacagttttttttggtttcaattgtaagggagtgagtgtctctttcttgtacatctcaagccgcttttttagcgcctttttgtaatacaatacttgacttacttatcaaatatatatatatgaaaagaagaaaagggtgcctaaaggctaacacaaagcatacagggagtatgcaagaggtgccaaaaagcacgaacaaaaaagaagaggaggtacaaaaatacatacctgcccttatctagaacccaatcaatcaaaaaaattgattaattttggataattttttcaatggattatgaaaggggggtgagctcttggaaggacaaatggtgtgaaaacgaaccaccaagcatctattttccctttttatttgcttcagctactcttaaggaggcttaggtggaggatgtttggtaattcttcaactgatgggggttgtgcgcctcacttttttaggtggctcaatgattgggaggtggagattgtggagtgctggagtgcttcctcttgaagttgcaagggtggagggtatgcaaggatgagcaggagaagttgtggataccgggccctttgtgcatgttttggtcattttggaaggctagaaacagaattgcctttaaagatggggtgctgtccttgcaaaggctgaaagcttcttttgttttttcactttggtcgaaaaccaaactgtctataaaagttggtcctttgacattaatagatttcattgattgggtgggttcccaatagggggggggggggctgttttttgtacatcttgtttggaaagttttctttttggttacaactataagagggcgagtttcttgtttttatacatcttgggctgctattttagcgcatctttttaatttaatacctttgcttacttataaaagaaaaggaaaagttgtggataggggcaaagaatgaaaaatttcctgtaaagccctttattaggccttggagctgggaagttatcttgcttttccagcaagggttattgggaactcttgggtgccacccaaggtgagtttctttgcataggaggctacttggaataaagtttaaccttggatcacattcagagaagagggtggtccttgacaaacaaatgtttcctttttatgcaaaggaggatttaattgatcgcattcttattcattgtgacaagacaagggttttatggaattttatgtttttgctatttggcatatcatgggtgcttacctcatcggtgagagatgcttttaagttggcgctggttcgtgggttaaaaaattgaattctttgtcttttttagacaatttggaaggagaggaatggtaagacgttcaataacgaagcacattttgtacatgggattaaattttcttttctttgtaatctttgggcgcagtccaaattgtttatagctcttggccctttttctattgtagattttgtggattagatgagattttgttgagtttttgttgtccctctttgtttttgggtggcacttttaggtgcctgttgtatactctttgtgtactttggggcacttctttggcgtttctatcttttaatgcatgtttttctttatccatcaaaggaaaaaaaaaacactttttggattgtttgtcctcttcacatgggcaattagcaaagtctgtttgttgttaatgttgtttactagttctgtgttgtttctttggttagattatagttctagtacatctcctccttatgtgtgtatgtgggatataccttccattgagaaaatggtataacctaatgcatctcgtatattgaatatagttaggatgagtaccttaggctaatatctgttgtaatttcactgaaatcggatgccctttgtgccagtgccaactgatttctgaactcatctgtttgtgatacaaccataagttggtgactattgagaaagaaaggaacaaatgacatttggctaatggatactttaaaagtgtgattgtgttaaaaagtttgcgagtacatgatcataacatttggtgaaggtttcaaagaatgttaaaatttgaagcctagcaactaagccgatcttagaaaaatcagaatcacaactgaccctttggcaacgtggaatagactacctcttgaattcgagccaataattgtgttgttaacagcttcaaactgttgatgatgaagctgcatcttatgctaaatattcatcttccagttttttattgtttatgtttatcatggaattatacactcattggaaacatcttttgaactatatttcctctattttcatgtcagttatgttagctcatgttcaaactttaatcttccttttgtcaggttttggcttccgagg

SEQ ID NO: 12437 - DNA, 1807 bp, Vitis vinifera
  Intron number 5 from transcript GSVIVT01035631001 (locus G SVIVG01035631001) derived from phytozome v7.0 (chr-ID chr4 ; pos 2849873 to 2851679)
tgaagtcgtttggaaacccaagacagggcagattggtgagtttttttttttttttttaaatatatatatatataaatatatatatatatatttttccgtctcatctacaatattgcattcttggtattagttaatgaaagtttgttatccttcattggtaaaactacctagtggtgttgaataggtatagtttaagcccaaaaattacagttttctcaattttttattttcttatagattcaaattatccaaatcgaagaataacctatcaacaacatcaagacacatgatgtatgtggaaaacactaacagagtctcacaaaaccttgcaaatgtaaagccatgggtctagtcgaccgtacaacaaatttactaattctgaaaagcaagtacgtatatttgcttggacccagtgctagcaatcacctttacttttcatgcttcttagtggatacctcaacttctaaggggattcgatcaactaccattttttttaatcataaaatcgactttgagagttcaggcatatgtctgcaggataataacaatgtggaattataaagatgtcacctttccttccccccactttttttttgtcccctttttctttaccacaaattaatttgtttatagagtaaaaatcctagtgggttggtctgaacaaaatacatacaaaagcacaaattttatgatttaaaacattatctgaaaaaaaatatttctatgcatcaagcacttgagccctctcaaggggcactttaatgccctagagggacccttgagggctcttattatttggcagttttttttactcaatttatgacccatattttgaaaaccaatatttgcatgcctaagtattttttacattgccattacacttgccaaatgtcttcctacataggtacctgctagcagtttgccacttgatgaacttgaattttcgaagttgaaaagtcccatggaagtatgttgttctggaccattaatgtttacaacaacattgtgaacctatatctagttgatcaagctcactaatagtttgatacattgaagcttcttattttggaagtagtgatgacagcaaaaatgcttagaaacagttaaaatgcacctccatacatgatatcttgtgaacttgaacagctttaagattaagcatcctattttagcattggatgaaatagtgtgattaaaatttgatgcttgacaatttaataaatggtattctatttaagttaacaaattgcttgaactacttgtggcagtgggagctttgataccacttcgttgtacaatgaaaataaagataaaaaacaactctataaatatacaaacatgaggcttaatgtggtttgaccaacaatgccaacatttatgaatgaaaaagaaccaatccactaacaaaggaaagtgaaagcaaatacaattcttgagctcttgaaacatcccatgttcctcactctagtggctgtctcatctcttccttacatctttacatacctggtacattctctacaagttcttctcattcccataacctttttccctcgtaaactagaatattagaaaatttctcaagacctttctattcaacaaggaaacttattcccttaagcatttgcagcagaactaactgaaacagtttgaagcagtacaccacaaacattgccccacttttcatattcttttacttaaaatcatagtgaaatgcacttaagtgtagctagtttgccacctcattggcctgtcctctaatcttatgaaagtatctttctttattatgcagggaaaccagaaaaggagt

SEQ ID NO: 12438 - DNA, 2077 bp, Vitis vinifera
  Intron number 3 from transcript GSVIVT01031048001 (locus G SVIVG01031048001) derived from phytozome v7.0 (chr-ID chr1 4; pos 21436362 to 21438438)
gagcctcaaccacatctgctgcacctacaagtcaggtaagctaacctattcttctctttgttattttggatttctttaatggattgtgcttaggataagctttcttcaaaaggtgcaacaagatttggaggacacacgggtgataaattttatatcacaattaagattttcctagtggatctttggacgggttggagctacctatacatgagccatttgctgtccttggaatcaaaacatggaatatgagtaactgaccttatatggtctatttgtgtttactttttattttatcgttcttttgttttgtaaaagtaaaatcaatcttaattacatcatttgttgtcccttttaagttgattacatttttagtagttaatctatgtgataactagggaatgcaaggtttaaccttgatgcttatgatggttgtgatgctcattcctttgttaaacatggttcactgacagcttgccaaagacttggttcaggtctccccttgaccttgaatctgcatttcacctacaagtattaacaccatcaactggtgctaacggttggctatcctctaaaacaatgaaaaaaaagaagtgacttggtggtgggttttttgttgtcgtgaaatatctagcaccttttagtccagacgaattatgataacttttatacaaaaaaaatttccactgaaagaaatggactacttctgtagttctaataaagttgattgtcttcctaagattcatttatggacttttttttaaaaaaggatacatatatggacctagatgccattactaattctgaagatggctctaaccattttttatgttctttcttttataaaaagtgacatcatttggatatagtattttcaaaatgccaaaagaggtaacaacgaagatataaatggataaaggagcgcctatcgatgtgggatccttgctgtaaagcagtttatggtggatttctttaaattattttccaaggatctgttatttttacaatgactatctgtatcttaccatctgttctgcagggtttgtcagataagcaagggaaaaaaatggaaaggaaaaaaagcaagagtaccttctacatataaaatatcttatggaatttatttgtcattaaaaaataaaaaaactttaagagcatttgtaatagtagaaatttggaaattatagcctgttattgccacataacagacaagaaatacagtctaagctcacatatatgagacaattcaagtacaatatgattgacttggataattaatcagttcacaatctttccaggaatgctgttgacgtggaggctgttaagaggaagttgttgcttgctttgttgcttctccattctgtgtcttatttgctttaattcttttcctttttgatgtggtttgtacacaatataaatactgtaacgtgtgttctgcacatatggtttgcactggggcagcatgctttttgggtctttttataaattctttttacttatcaaagaagttatactaaaactaacttctaattcattttcaaatatccactagtaacttagcacaaactttaattatagagacactttgaaattacatatttaataaatgtgatacataaagtttaagttgcagaatccattaagttggtctctaatggacaaagctttggcttcgctcaggtgcctcatggtaccataaggctgtctggtcttttctgattagaccaaaataaatgccatttggcatgtaggctgcatcatgttgttattttattcatggtaaaaatcacttatactttactatcaaaaaaaaaaaaaaaaaaaattcacttatacttgcatattttacataacttctctagtggcaataattagaaagagtgaaacgcaaaggcttctaattctgcgaattgtgccagttccaatttttatttggcagctatttgtttttctccaatatttgggatttggtaatggattgactgcaccatgaactgcactttccatttggaatctttcttatggagagcaatttacatgtgtaggcccaacctgtgagttcttcaccccctacttcaaa

SEQ ID NO: 12439 - DNA, 4761 bp, Vitis vinifera
  Intron number 8 from transcript GSVIVT01001406001 (locus G SVIVG01001406001) derived from phytozome v7.0 (chr-ID chr1 8; pos 18685908 to 18690668 reverse strand)
cagctggagaactaaagccaccttcaactggtatgtgttttctaggagtcaaattttttatttttgcaggttgtggttcttgatataaattgtgaattgtttcagatggtataatgtggttccaagttttaccttttaaaatcttcctaactggtttcatacacaagataaagtttgtttaatattttagatgtaataattgtgttattactaaaagttaaatccatagactctccttttcacttatatttttttgaatgataaacatgtttgaaaagcttctagttggcagtgggtcacttatttgggataaatttggtgggttaagcgtatggtgacctgccaagctgtttatactttatattaaaaagtagttaggatgtaatggaaaatatttatgttattagaaaactaacacttgggctaaggatcaagttggtaatttttcttacatctccccctccgggagcctaggaaaattacacgaatctcctctctattttcaaatattacaccaacgtcttctgatttaatatcttaaccaccccctaccattaacttgccattagtgtgtgctaatgtgaggcaaaaatttaatgaaactgccaaaattgtcaccctacttgtgtttgtaagcctctaatggtaactaaaagctttataaaaacccaaaggcagcctttaatcatcatcttctactttagttcattttatcagaaacaaaatgtattaattataaataaacagaacaagagaaggatgagaggtcctccccatgaaatacaagaaactgatcaaagtacgaaaaaactccattataaaaggggagctatacaaaaaagtttagtctaattaaggatattcatcaatttcagataaagttcctctcattgctattcaacccttatgaattacaaaccaaaaggcagcttagctgaataacattgaacggtatgtctttaagagcatcagtactagaggcctagaaggaggaatagaagtgaagtagatctgaaaacatctctattatcctccacttttcctcaaagatcctaacatttctctctcgccacacaatccaaggtaatgtgaggcaagtgattagccaaagggccttgcctttaagggaactccttaaacccttataggaaatggttatcatgttgaatatactcctcagcaaaatctaatccatcttggctgaattgaatagcttgtgtcatagccttagagttatcaagcaatgtaaaaaaagatgaccaattgactgtctgcaccaatcaagactagggatttggaaggtcttttcaactatagtatgtcattagtgtttaccttcttatgcattgctaactaagtgaccttatatgggactttagatttccataaaaatttggttggagagaaaggaattggatttgataaatgggacatgtccaaaaagaaagattttactgagaataaacctaaagaggataaatgtcaagctcttgtatctaggatgaaaggaggcaagtgcacaagagtgagtgacgacacaagtttttcaagattctcaatttcctaataagtaaggttttgacggaagtcaaggctccaagaaagagaaggagaagaacacttaccaaggatagttgaaatggtgagattttttacttgataccataataaaaacctagaaattgtgcatacaatggttgatttccctaccgcaagaagaagagttacgaaggatagttgaaatggtgagattttttactatgataaaattgtaaaaccctggaaattgtgaatacaatggttgctttcccccaccacaaatcttctcaaaaatgaattctctccccgttatccaccacaaagcaagtgtggaaaaaaatctcagaataattatgcaatggccttccaaggacaactatgtgaccatctaactagaattttgatgtcccatcattaggatgtgttccataaatactcaaaataacttgatgcccctagaatttttcttgtgtgtgtattttatataatttgtcttattttgtttgaagatggattagtttttttttttttttaagagagagggggggggggggggtgttgaagttaaaaatcaaattacggttttctttggaagcataaggtgtggaaaaagaacaatggaaaattttagggattttgattatcgactatttgtttagtgggaaaattgatggaagaataaaaaatttgaagttatttttgtttagttttaaggatcaataatagcattatatatatttacttctatttgtttttattttttatttttaggaaagattgggttttttgcatttagggtttgcaaaagaagaataataaaagaaagcaaaagtaactgtgggaaggtgtgttatcaatttttaggacaagaatagacttgtggatgacttgtgggagtgtgtgttcccttatgccctttgggagtttgttatgaaggatttcataggtgttccatttagtatcatcttgctagactggaattgattttttacccttagagaagggggtttgggtatcaggaccgagttcattccttccctgagggaagcttgaagctcaatgttgataggcactccttgaaagatgggtaatggtggccttttcagagactatagaggtgtggttaattaagttttctcaaagctagtggctttgcttttctgttggggcaaaaatttatgacattacttcaatgaaaaaggtcaatatcgagtgtttaaactaatggccaagggtgatttgatacaggaaatgaccatggagatgccatcattggatgcagagggacactaacttttcagtgaggtgttttttttttcaatgttttttccttctttatattggaaatctagatgaacaaagtagggcatcaaggtttgccaagggaggagctgctcccttcctttgctttattgaggatcacctaccaataagtacattaaacaataacttttctaggggctctatattaaatacatttcatctcttttctgtctttttgtggtcaacattgacctagcaagagatttggagtgcatctttatgtgtggtccaaattagctgactaggaagctggttgattggctaaggaggtgtctctttctggttgagtttttgggtactttcttcccctttaaggttgagtgtgctttgagcttatttttgttttaaccgttggtttttcatcgtttgtgagagatttgggttgtggtagtgtggtttttaagttggtcttttgtatgttctctttgcttttctcagctgaaggatgtctcatcgtttttgtgcattctagcctattattacactcactttctgtttcctattagagaaaaaagggttagattagatacatgttagtatgatggtactgctacattgttattgatgtattgtttaacataagatattgtgtcatgttagtttgctattttaccaaacccaactgtctatcaaaaacaggcatttttcctcttttattatcactgaaaaaattatttccgaataaagcgacaatctatatacctagatgacaatagtgagagttttcagtgacttctctggagccactttcctgccttacaaaagagaaagaagtattcgtagttcaatatttccataggacataacatctgcaattcaagaagtggatttagttgattagaaaaatagaggtacattctacaattagagatgacatagtttcggattctgtcaaacttttaatgtggtgctaaaactttaccaattcccctcaacactagatattccaaaattgccatagtgttgatgaattataattgttgcatatgccacagaagttctgttactttttttttttttttgatgggaaacgacaaaggaatatattgataaaaaggaagtacaatagaaggatgaggaatcctcccaccaaagaaaaacaagactacaagtaacagaagttctgttactattttaattgattgtgtatgctagaccatcatgatccctatgggaatattgagtatgacatagctcaatcacataattatattttttatacacatacctataatagtgaagaccctttaagtctctgggttttggaacctttctctgctaatattgtttcctctgcccttaattttttattgccagtaatggtttgatatgtgattattaatttggtatgagaaagtggtcactctctctctctctctctccctgtgagtgtgtgtgttcgtgtgcctgtgtctaggcgtctcgtgtgtaaatatggctttcaagccctcatgattttctttgttgtttctagatatacaactctttactcaatgcagttttcttagccaaagcatggctggtgttgcctatgccctctttatgttatttatggacttgtgcacagaagaaagtataggattacatctccagttttatcatatgaagcatcttaactttgaagcattttttatgttaggcatttcatttattctcccatattgatactaatcagagtccaatattagttataacaaacatggatttctttccatttgtggctgggtaaagttgaatatgaatcttatgttaaacagacacttctctgttgtgtcttatatttgctttctaaactagtattttgtaaaagcatttctagtcctggaacaaggtccatttttaatcaacttcttctttctccaagcttctactcgtggatctggaaagcacccccagctc

SEQ ID NO: 12440 - DNA, 3474 bp, Vitis vinifera
  Intron number 1 from transcript GSVIVT01029906001 (locus G SVIVG01029906001) derived from phytozome v7.0 (chr-ID chr8 ; pos 1283509 to 1286982)
tccacaccgtcaacattgccgacgacgtcactcaggttcttaatttaaccttttttctgcttttttttttttccctcttgatgttgattttcctgcattttcttgcaaaccaaagggggggctttttagcgttttgagtgtggaagatgggattttggagaacggtgatggctacctattatccgttttcccgcattttctggcaaaccagacgaaggggttttgcgttttgggtgttagagatggttttggtagctgggtgttgaaatcatagggggatagatggagagttttttttttggtttctgaaattagaagaaatgaaaataacgctgaaaacttgtttggtgatatgttttcagaaaactgttattgaaaatattttctgaaaattggccatttttaggaagcttgcctagaactaaaatttattcaaagaccattgctcgatggaaacgtttttcagaacaagtgatttagaagggctaatatgattgtggggttttcggaaacgttttcattttttaaaaggaaaaaggaaaggggattttttttctttattattattgatttctattttgaaatgtctgcatattgtaaaagaactattctaaaattcgctaagatgacccattttcaagaaaaataggcttttgagaacgtgttgttgaacatgttttggagacttgtattgaaaaggtaatgattttaaagtgtttaaaaatttagatataaaaaaatatcactaccacaagttttaaagtttttgaaagtgttttttaaaagcatgttttgtcaaatagattctatttattctataggatttattattattttagatttttttttaaatagaaaatattactaacttctatataaaatgcaaatgctcatagaggcttacattaaaaaggcaatgatttttaaaactatttaaaaaaaattaaggtattgaaagatttttactacctcaatttttaaaatttttggaaggaaatttttgaggacataaggtaaatctatactttttatacaagagtttctatttttttttttttatagaagttattactatatatatatatatatatatattttttttttaaaaggggaaagacctaaggtggtgtttgttttttggctgaatagaaaaagccaaaatatttggctttttctattcagttaaaagtaacctgttgacattgttcaacataactaaagtaaacttgttatatttggctttttctattcagccaaaacacaaacaccaccttaatcaaactattttttaaaatgctcttggtttggttgccttggcaatacttgttttgtttaaagttagtcatgtgatgaaattgtaactttagtgtattatatgaagtcgtggaataaaaatatggctcccactaaaattcaaactctatatagaagctgtatcttcattatgcggcttcatataaaacactaaagccattagtatcatcataccactttaactaggttaaaaatatatattgccaacatggctaagaattacccttttgaaaaaaaaagtcaatatagtatttttttcttttttgggtcaaaaaactcattttgagtttaaacatcatggtttaagtgtcatttttcgttttttcgtttctgaaaaagagagttttcgtttttcatttttgtaacctaacatgcactttaattcttgaaatttgatgtatttggaaggtttttaattttatctggataagtttttttagactttgtaaacaaggtccattgtgacaaatgaattaagatgtttgacaaatgaattaagatgtttgactaataaattttaaagtatttgtttgatatttagttacgattgcttgctttaatagattgtttgccttgcttttctttttcttctattttttctcctaataatttgtgcttctatactcatggttcaatttgagaatcaatctctattttctttgttttctaacccagaacccaaattcacattcgtaaatcattttccacattaatcgatgacttaaatgctcaaaagcgtaagttatataatagtaacaatttttatggatatacttggtgactttggaatggatgacttttaaaccaatagatatttagagatgcatcagatgaaaaattaggaaagattaggacctatacatttaaggggcagagaatcagatttagcaagttgtataataaaagagactacacatttggataggttttgttcaataaaggtcattaatggcatctctgtaacaaaacacttcatttaggttggaaagttccaacaaagtcgtgaatgtgtcaaacatgcgcactatatgtggtgcatgtgtgttgtggtagtatttgaaaaagccatatgatgcaaccttgaactagttatgatgatgaaaatggttttacatggttctttatatactagtatccattttatgtttttaggatagaagtatataaccttttttgaatgtaaggtcaaatgttgtcatatggtttccatccggctgccatgccttgtagtgcataactttcctggaaatcaatttcttttactccaccaataagattctgattcctatataatgtctggatttgggaactatggtacatacgcataggtagtttggtgggaaagaaatgttaggattttttaggacaagacatggacttacatgactctttaggttttcattcatttttgttcctccttttgggcctcatgcaccacatcatttaagggcattcctatcaatgtggtttatattgattgaaatttgatgttgtaaattgaaagggttgagttagtaggagaggagcattgattaggcctcttattggaaggaggaatttatctaatattagagcattgttatatatatatatatatatatatatatatatatatatattccatatggtactatgctaatgtataggtctactaagcatattggaggtttcaataatacctttttttatcaattcattgtattttagggaggattcctcatccttcttatctatttctttatcatatttaatatatttttgaaaaagagagctgaatcttggagataatattatgcactcatgagaatcttcaattagtgtttgatgctcctgtttagatgtgtgttattattcagtctatcatttttcaaaatgaaatttttttattggtgggactggtcaaataagtttcagtagtcttgggaaaatcttcttgtgttctaccggaatatgaaagatctttttttatacagaaaactgttacctatgagaaaattaattcagtgattttgtatacaagtttcattttcttagatcataattactgtaaattgaagtataaaagtttttctttcaatagttttttatttttatttttatgtttgaaaacattgactgatttgagcagctaaaatgatatagttgatcgggagaacacca

SEQ ID NO: 12441 - DNA, 1674 bp, Vitis vinifera
  Intron number 2 from transcript GSVIVT01021391001 (locus G SVIVG01021391001) derived from phytozome v7.0 (chr-ID chr1 0; pos 4849713 to 4851386 reverse strand)
cgcggacaaattttccggcaaaaccgtcaaacgtcagtttttattttttattttttaattttctttctcaaatttctcttttatcagaattcactaattttccattttactctctttctccagtcgtgtttgcagtagaaattgtaggatttttgggatctgtacttggctatgcatgtggtagatggatgtgttaggtctatgatgttttgtggtaattgaacccagatctaagtgttgataagaaattataagatgtgatctcttgtattttgaagttgttttgtcgatttgaatcatcttggagcattgttcaactgttttgatggctgaggtagtagtatgctagaaaattcaacaatttaaatagaaatattaaaaaaggaaactgtaaacttaaggtttttgtttgtataaatcctttgtggaaaatctttttacatttgttttcttcaagctacaataataaactagtgattgagataaaaatgaagtggaagaagattttcttttccctttttttttcggggaaaattgcagaatttctagggattacttgctgttggcaatttttttttgggtggtcaaacaagtatattagcaaaggttttattattttctaactagagaaggaagctaggtaaacacaagtcaatctggaatggtatatcataggaatggtggtggagcctcatccatggttttgttaaatttagattttacaagggaacaatgaggtaatctttgcatttagaaatttagagtggttggatttggattttcttgctcaaattcaaagcatttgtctggaaaaacttttcaaaatgtagatctggattttgttagattcaatgggtagaacttaaaccctaatctttagattgaaaatggtatctggaagtgttattcagaaatccataccatgagggatttggaaatttcaatcccaaatccggttgtacaaaattactcaagatgttggttgtattaagttcattggctggagggctaacttgtgttgttctttcaactatggttgttctgcatggtcatggactgcacttttttttttcctttttttatgggtcacaattttttattttttattttttcctttctttgtccctgccaggtttcattcctagaatctctcacaccctacctcaacctcttgccacttaagctagattctagggcatgataatagttaactacaataagcagcactatccttgctattgtgcttggacagagatttctgtgcaaagtgggccaaataattgaagaaacattggccttttatttttcttttcttctttggaaaccactgttgtaaacttatatttttagttgcaaatatcattaacttttttatgtgaaattttgaagaataacattggttttttttttttttttttggtaagacttttcctattgagaggatgccagactttttaaatggtaaaacattttggatatcatacattctttgccaactaaaaactgagacctaaccctttcacaacaccaaagaacaaagagatggtgctaaaatagaatataattcttaaacaaattcaaatttatcattcctatgtagtagttgagcacatttagttttcatgaactcgcctagtctgatatttatgtaattttttttttttcataggagtc

SEQ ID NO: 12442 - DNA, 2443 bp, Vitis vinifera
  Intron number 5 from transcript GSVIVT01021843001 (locus G SVIVG01021843001) derived from phytozome v7.0 (chr-ID chr1 4; pos 6608196 to 6610638 reverse strand)
gaattcgtgcatttttggctacaaatcagcttgaggtaatgtgcacattgcctgttgaacctgcattctggatatcttcatgttagtctatgagagcacctcaaagaatattctacatattttcttatttattttacctttgctgtattggaaactctgcattttgatactgatgcctgtgttgatgttcatttctcttgagcttgtcgtgtcaacccccttgtatctgtgttggacattaacatccatgcagtagtgtgctagtggtagcaagaggtagtggtaatggtgacagtgactagtagtagtactgcaattagtagtggcaagtaggcaatggggcacttcacgtcccttggttaggctaactgttgaactgagccaagttcattcaggtgtcaaattactaaaagcttttgtaccttttgcagccacaatttctaacagggttttaaagtcatttgaacttgcataggctagtctgttatctagatagaaatggttcaacttggagtcttaagtataaaaaccttagccacaagatttgcgcatggttgacgtctctctttaaaaggggggagaattgactaagagaaagagagagccttggaggtatgatgggtggcttcaccaaattcaagctgctgcttgcaatttggattgttccttctcttggtctacttgtttagtgaatcatgttgctgatcatttagcaaaacatggagctaagtgtctggtttcttttgtaggagatttcttacccccttgaggagtgtagagttggtttaacctatacaagttcatgttatattcatgagatgtatagctagctatttttcctacttgagaagttcaccctctttcttcatttaatcaaattttgcatatttttggaagaatttctcatcatttgtacttgaattcatattaattaattagtttgtttttaataaaaaaacttttagtcatggcttctacttgataaaactgctgtctacttgtccattttagtagtgacctaaagttcaacatgaagtcaaagtataaagctctctgtccctatacgtgatgttttggtcttaaagttccttacggattagttccattctagggggactcaaactgtatttatacatttattgagtgtctttgttatggtgaaggagatttgctttgtttaaaagcatttcgtgcactttttgtagcaagtggtaagagccaaaaagcttgttggagaatgaacttgggagtattgataaaataaaaataaaaaaataaaaaaattcagaggaaagtagaaaaatatggcctttcatttgaagtaaaattttatttctttgaaagaaaattttttgctcttaccttgcatcactattgtcatcattaattcatcaccattaccatccttacaccactactgctgttaaccccaccaagaaaacaagataactatgctgattctgttaccatgccattacttaaatgttactagatttctagagctagaaatctggagggtttggttgtgtgcaatctaaactggccttgcttataattgagtttgaaattttcttcccaatccctaccctcttgggtccacgtcagtgtgccagttcaagcagaaaattataatctttttccaactaaattatatttaaaaataaaaaatattgaaaacagtaaaataggattaattatagattcacaaaaatataaattatttaaaattgcctagttaacataattgggttaagttcttacctatcaaaaaaaaataaaattaattgggttaagttctcgtcggtagtcctgtgaattgcacccagcagaatctgtttatgattggcgcaggcttgggttgatttaatggtttttgattgcatgaaatctccacttgacctcccttatttcaggttgtttggaaggtcaaggttgggaattactatccccatgcttaaccatcattacgaccaccggcttagttggcattagacaacataaaacttcatttctgcctccaataatgttatcgcctttccaattgttggcatcacctctaacactacttcctgctgtctccatcaatgctactggctgttatatcactagtttactgccgtcatctgcaatgcaggtgcaggtgcatccactaccttgcagctaccatgacaagtgtcagtatcaatgcatacaaacatgtctcccaatttttagtggaacaattttttttatcagaagtggaacaatttcttttgcattccagtttctagctgacacacttttgaacttctgatttgcatcaaagcaaagggaaagatggtggtttttatcttcataggactcattagtattttaaaaacgcagaatcaaatattacatatgtcttgctcttttggaatttgagtttaattatttctcttgcatgttgttcaagtgcagactt

SEQ ID NO: 12443 - DNA, 5820 bp, Vitis vinifera
  Intron number 2 from transcript GSVIVT01009578001 (locus G SVIVG01009578001) derived from phytozome v7.0 (chr-ID chr1 8; pos 9583324 to 9589143 reverse strand)
aggctgctgttcatcaagctgatttccggatcaaggtctggctctctcttaaccctccatttggtcgctcagaaaatgaaagaaaataaagagtatctgatttcttagattcattgataaaaattgggggaaaaaaatcatcatattcaatgatcctgttgaatgctctcatttaactgattagaaaaattaaaatgacatggaaagaaatttatgcacatcaatttaattataattcttgttgctgtacccaaaactctgttgttacatggtactggtaattgaattaatactttgtcattggacatctaatacaaattgaattgaccattgtttgcatatattttaaagacataaattgttagcattggagtaggagggagacattgttgtgacaatgagaagtgataaaattctgaatctgaacagaattttcaagggaaaccagagaaagtttggcagagaattttggaattttatcaattgaattctaatgtgaaatctatacaatctagtataagtataaaggaaagtccctaacaaacttgtaaccgacactaacaagcttaactaatataaatagtacacttggctaaactaactatgactaaaacaaaaaacttcaactagctaatcttttgtctcaacatttcccctcaaactcatgatggaaaatatctactactctaagtttgaatctctttgaattaaactaagcacttggaattgccttaatgaaaacatcaactagttgatctattgaaggaacatgtgtgacttcaatctccttcttcattactttctctctaacaatatgcttagtcttggcatgtaacttatcaaaaaaaaatgcttagtcctggcatataacattggatttgtagctaacaatacacaaattatcactccaaattaatggtattctctgtagcttcacttgtaacttggacaataaaggttatatccaagtcattttagccaccacattggttaagcttttgtactatctagaaacactatgctgtttctatgagtgccaagaaaccaaattggagccaggaaaaacacaatattctaatgtaaaatgcctatcatcagaatccaatgctcattctgcatcatagaaacctaccaaggctagtgaaaccgatattctgagatggaagctatattccattgttcccttcaaatacttgagaatcctctctacggctttccaacttttttcactgggatttcgcacaagctaacacacattatttacattgtaagctatctcaagtcttgttccagttaaatattgcaaatctcccattgtgctcctgtagagttggacattatcaactgggattccttcgcttactctgagcttcaaaccacttgtcattggggtactaattccttttgcatgaaccatcttagacttgcttaacaaatccccaatatacttagtttgtgatagatgaaaaccttcacttgtatgttttgcttgaatgcccaagaaatagtcaatcttaactggatccttcaaagcaaattcagcatttaatcttcctatcagttgagaaataagtcttgaatcacttcctgttacaaggatatcatctacataaatgagaatgtagatgatatgatctgcagtagtcttaagaaaaaagtgattgaactagtcaaattttaatgaggcaaatccaagcattataagtaccttatgtagcttatcaaaccaagccttgggtgcctatttcataccatacaagggctttgtgaagcttgcaaaccaagtgaggattattttcatctaaaaatccctgaggttgctccataaagacctcctcttgaagatctccatttaaaaatgcattattgatgtccaattggcgtatacaccaatgtcttgtcgaagctatagtcaaaacaatcttgattgtggttggtgtcacaacaagactcaatgtttcattgaaatcaaacccaacctgttggtgaaaccctttagccactaatcaagccttgtatttaagtatattgtcatatggtttttctttgactttgaaaacccatttacatcctattgctttcctcccaggtggtaatgaaaccaatgaccttgttccattcttccgaagagccctatattcttctaagattgcctttttgtactctggttggtgcaaagcaacaagcacactagaaggctctgttaactcttctagataaatcttaggcttgtatctaccattcttggctcttgttatcattccatgagtgttgcctaagctccttgcttctatagcagcaaaaactaatcctacaatattattgctcaaactaggttgcacagaaacataagtctcaagtgtatgagtaggatcaacattagcaatagcatcagaagtatccatgtcacataaatgcttatcttcgtgttgtgtagatggtactagtgtagaaatagatgttcgaaaaggattatcttgagaattagatgatgcaaaacctaaaaggagctgagaaatatgaggtaatacaggtggtgtggctaagggccttaaacctatctgagggactgaaaggacaactggtgacttttttatttttgaaaaaggaaaagagaattcataaaatatgacatctcttgaaataaacatcctaccattagggtctaaacacttaccacccttgtgatttaaattgtagcccataaatatgcattgagcactcctaaattgcaacttatgtttattatagggtctaaggttagggttacaagcacatccaaagactctatgagtgttataggcaggtttaatcttgaataaggtttctaaaggggatataatatcaagaataggagttggaagtctatttataggtacaaagttgctttaaaagcctcatcccaatatttcaaaggaagaaaaacatttgctgagagagagagcccattttccacttatgcctatgttttctatcaacagcctcattttgttcttgtgtataagggcaagaaactttatgtactatcccattagtagacaaataatcttgaaagactttgaaactcttctccacaatctgtttgtatggcttcgagtttggtattgaattgtagctctacttaagttttgaaattgattaaagtttgaatagcatctgatttatttctaagcaagtaaatctaggtaatgtagagtaataatcaataaaatggatgtaatatttgtatccattactggcctgaatgtgtgctagaccccatagatcaaaatgtataagttgaagaggagcagtatagactgtatcagacaaactgaatgagagtttatgaatcttacctatacaacaagatgtacagaaagaaggttccattttattaaaattgggtatattacaatgagagagtacacatttgacaactttttcaaatggatgacctaaccttttatgccacaaatcaaacaaagaactcttagaattggttgaacaacttgtatgtgctgaattatctatattgcaagaggctgacagcacttgggctgaaccattggaagctgaagagataggatgagatagcaattatgttggattgaatatcatgtgtgaagagtaagttttttagttaacaaatgaacatgtaaaagatgttttagagtgagaagttcagaattataaggagacagaactgaagattggctgacaagttttagtggaccaacctgtgccattaccaatgtgaactctatcttggccagtgatctcttgtctctgcatcagattgttagcatctggagttatattattggatgcactagaattatggtaccaacttacatcattgtaaagttctggggtggcaatcattgtagacattggagaggcttggtgatagaatgcattggcattctgaaaattgaaattgggcccttgaaaactctaatcaaaacagtagtaacaattcagaaccacatgcccaaacttcccacacaactggcattgtgatttcccatatgaattcccacctcttccacctttgcctcatccattaaaaccattgtcaaatcttcgacctccattaaaaccattgtcaaagcttcaacctccattaaagctgcctcttttgaaatcaccacttttgccaccagaattccaactggaattctgattaaaatatccacctcaattcccattgaacccctggccagaattctgtcctcctccctgacttccaagttattaacttaccacttctttgaatttccttgtccctgaaatttagcagctatgttggcacttggtgcaaagtccaaggccttattgttcttctgattgttcttcacaatccttgcttcttgagccactaacaaggactcgatctcttctttagtgtaactaccaattctagagcttattgatacaacaaaggaatcagactctatagttaacccatcacaaatagcatcaacataatctttagaagaaagaaaatgaccacctaatgccaaggcatccttttaatcttggacaaatactcattaacaggcaaggatcccttctttatattgaatttaagttttgaattgactaatcttagccttagtttggacagtgaaatactgctcaagcttgccccaaacctggaaagaagtttcacaacctaccatcagaggaaggattggctcggaaattgatgataaaagccacgacattagcaattgatcttgttgttcccattcaagaaattcttgattaaacctcccaaaccttgcatcttcttgcgagaaaaacctctttggaatctcaccaccaccaaaatcaaatctttgcaagccatatccttagattgctgaaaaaacctgttgtttccagatcagaaaattgttattatctagttttaccatcaaaaaatgggtaaaacttggtaaaactaagagatacaaatctttacaaagaagaagagaacttgtcataaatggaacttgattctttgtccttggtccttgattattctccattgaagaagaaacgtgctctggtaccatgataaaattctgaatctaaacagaattttctaggtaaacctaggaaaagtttgggggagaattctgaaattttattaattgaattttaatgtaaaatctatacaatctagtgtaagtataaaggaaaatctcgaacaaacttgtaaccaacaccaacaagcttaactaatataaactgtacacttggctaagctaactatgactaaaacagaaaacttcaaccaactaatcttttttcttaacaagaagcaaatttattctctcttaattcctttgtatatacttcgtgttttctatttttaaaataaaaaaatggtagcaacttttatataagatacacgaattattgggggtttatataaaaaaaagtaacagttttaaaactttgaaaaaattaaggtatcaaaaaaatttattaccttacatttaaaattttttaagtattttttaaagatataagataaatctatacctttttactttgttctacttttatacagaagtttttgagatccaaatggatacttaattgttgattttctatttttttcgaagtgtatgtaataatgtcaataataatgaacatattcatttaaatatttttgttgggacaatttcttcattttacctcctatgtgaaacgtccttcaatttttcaacagatgcccaaatgccctgcatatttagggtcaggctttttgctaatgataacataatggatatgctatattgataattttgctgttaaggctgctgaggtaaccagtgaagcgaattc

SEQ ID NO: 12444 - DNA, 5816 bp, Vitis vinifera
  Intron number 3 from transcript GSVIVT01029226001 (locus G SVIVG01029226001) derived from phytozome v7.0 (chr-ID chr1 1; pos 18315897 to 18321712)
gtagtgtcatgccccaaattctgggcaacccaaaactcgactcgtgaccccaggtcaagggtttgaccctaagggttactcttatccacgctggcaatcaattaaaacatcttggattttttttttctttttcagtaaagtgtctaatcctaaataaatttattaaactaagatttactgtaacatattattttacttttccaaaaccaaccatcacattatctcatgttcacaagtataataaatccaccagtcatcttcttgcccaaaagctcaaatatttacaataatctcaaagtcaaaaagaatattttcaaaaatgttttacaacctaacaaaatataatttaacatacaaaagcccatataactcaaattggtacatgtaaaaaaaggtaatataaatttaaaaataactattattatggttcttttgctttctgaactagttcctaaactttctgtggtccctttgaaattatatctgcatctaaaaattttagaaaataaagcggcaaacatttccacattgctcaataaggtgtgttacacccaaataggttagaaattctagatcaataacacaactatatgtcaaaatataatattacatttataatatacaaactaaaagaaaccccaaccatacaaatttaaaacaatcaaaattatcattttccttattcaatcatacgtttaatatatcgacaattctagatttacaaaataaacaagtcattttagtcttaaataatatattcaaacataaacttggtaaataatacaaatctttcttccaaatgcaaccatgatacaaatgcttacacacaatcacacaatgcattgtcgttctcaggttttcaccgaatgatacgcgtttgtacccaaatatactccccattcggagtcttctcggggtaaacttttggcctttcaccctagggatctcactcccttcttaattcaccatctttaaggtcatttcatttcatttatttttttcttttttttcatttttgccctcttcggagtcttttcattctcatttccatttcatacaaccatttctttaatatttctttttcttcacacaaccatgatgtatatgaagtgcaatcacatcatattttaacatccaaaaattttcaagatataattctatttactctcattatgtttcataatttccaataatccacacaacgatttttcttcactttaatcaccacaaacatcaaagaaaattcacaattaattgtatagcatcaacacatagttttaaaccttagccataaaaaaaaaataaaaaaaataaaaataaaaattcctgacataataatttccaactacccacataaccatttttttcttcaattaaataaccacacatatccaagaaaattctaactaatacaaatatcaacaaaaatgcaatttatgtcataatttatttatctccaataatctcaataatattaatacccaatacaacaattttccacaattacaccaccacaacatttgggaaatatttttacaataattcaaatattaacaaaaacccaatttatatcatcgatttatttatttctaataatattaataattttaaaacaatcattttaaacatatttcaatactcaaaattttccacaaataatttccattattttcaatactaatatatcaccaataaatttatataatttctaacataacaacaatcattaaaatatattaaccaatattccaataaaaagaattttcacaaccacaacaatccagtaaatcctatcacaggaacaagaattaaaataccaacaattataatatttttatcttgcattaaactttcattcacttcccatttaacattttctaagcgaaaccaaatcattttacatgtttagggtttctaaaaataacttaaatgaaaactatatgacgatctacaacaacccaacaactcatccatttccatggagttttttgaaagtaaataaaagcaaagcgaaaaacccaaaaaaagtcgagagagaaatttaggaaaaatacacccctacctgcacagtaaaatccaatcgtgggattgaaaacccaactccgtagaagtgttcaccacattgaagactatcgccgtctaaaatttcatcacgatcgaaggtcgtttcaccatcagatcgatggaaacacgcgtcggaaaacttccttgcatctcctttgtgctgcctccccattcctttctttcttttccttttcttttgcctctcgacacgcaacaacccacttatatatatatatatatatatatatatattaaacaattttgaaaattctatgcatgtcctttctcttaataaattaaaactattattcttaaattcaccttctgtaattatgaattatacccaacttatgattttccacctcacgaaaaatactatcgtattcattagttttaggtttttggaaggatggaatgtaggaaggaatgtagagagggatattgatatctcctcttgaaattcttagtaaagttttagattttcttttcctattttctattttattttcttggcaacaaaacatgggttgtgaggataaatcctccaccatgtttgactaacttaattgatccgaagatgctaacatgaaggtgaagaatccaaagaagtgtagcaggaaatgataatgtattaaatggcttgattatgttttaaagttttaattggtagaaataaattatctatgttaatttaccctaaataaattacaaaggattcttataaagatactagtgattcttaggaagatcttgattactaatttctataatttgatcttactgttaacgaatctacaaagctggatatagtcttttgattgaataacatcaaaaatcaaaattgatttaaaagatttgtatttcataaataaaaagttaatgagattaatgaatggttaggttacaatttatgaatctttggtccttaagttgtattagagaataataagatagattattattagatactaatgattctcagtaactcttgataattagttatcatagttttccctattgttatttgtcccaaaagaaagctataaggagtaagaaaagttaaaaagtcaaacattgaactggtaatcaatcttattcaattgatggttttaagaatctattttaaaaaggaaaaaaatctaagtttcggatgcgatattggtcttaagattcaatttgattgtagattaactttgatcctaaaccctaaattttataatgctctttcttcaaggatttgacagtggattgtaaaattcttcaggacattttttttctttatttgatttatttcattaaacatgttaagaaataataaaaaaaaaaatcaaaacgctatctctggttttcctaggttagaattaccacgtatttaagttttagtattttgattacaacagagatttgtagttagtcaaacaattaccttgtgtgtaaaactgagttgtgttggcatggattcctttgatttggggcactatcctttcgtcatggattcatggtttgaatctaaagccaaaagcattagttcaatactatcaattccccccttaaccttgggccaaaaagcatttagttgaggacaaggatttgagctaattactgttaatgttctttatagatcattgcctttggtgtttaattgtttatttcattgttgattttggaaatttttattatatattttctagtgatttccccctttatctttgttaagtttcttgaactgcctccatttgcaagtcattcaccttgaatcacccattttccatacctctcttactaaaatcattgattggatctttgtgtgggtttgacccatcattagggtgctatttaaaaaaaaattaaacttggaaacacctacaaaagataaaccaatagaagatacactctaatcgtaaaagcatggcgattattttatccctttgcacaaacattaaaaaaaaaaattctgaaatgactgacaacaaaaagaaagaaaagtatagagacatagattgacataagaagcctcagaagaaaaagatatcgttctcattaaattaatcattccaaatattttcaatctataaattttattcctcactaaatatattccttccaaatatatattttttaataatataacttatacttttagtcttttgattaaacagaattcttatatcatgtaaagcaaataatttgattcacgagacccccttttcaaaaggaactttatgcataaggtaatgaaagagacttatgggtaagccaacgatggacttcagtgtgaccccactactacctttgaaaagccatttgactggagggtatgtaatttgtggatgcctgagttaggaaatctatggtctcattctagtgaactaaacaaagactccatggtataactgtagacggcaaaacaagaaagaaaaaccgttgtagtccatgtaatgaggccaaatgaagttcacaacaatataagcctcacctacattgttgtagtccatgtacaatccctcctaacagggttaatttcactcatctcttttacttttaaggtttttattaaatatatttaataattattaattttaattttaattaaatacatatcttattttaagtcttatggaggcaaatgaaatcaataaaaaaaaaaatagaagaggaattttaggaaattttaaaataatattaactaagtgtatttaattctatggaagatgagtgaaattaaactctctcatgacctaacccaagcttgaccaaacactaaagctcgatgaagtccaaaattattaggcatcaaatatgattttaatttttattgaaaataaggaacacaaaacacatcactaccaggctagtaattttgatattaccagaaaacataacataaaaacaatacaaatttaagaggttctagatagatacaatcgtgtttttatcaacctatttaataaataggttgtctttggttttaacccctcaactcatgttatccatttacttaatcgttttaacttaacacgattataatatatttaacctaatataaatttatcaattttatatatttaaaattgtttaaaaaatatttatgtttataaatatcattataataatataaaaaattaaattaaaattctatatattccattataaaaataaaaatattttataattaaaatattaaataaaattataaataagtatgaaatgaaaatttaaaatctttttctagttatgattaaattttaaacttaaaagtatatatatacattaaaaatattattttttataaatttaaaaccttaaaaaggttaactggtttaatgagttaaaattacgttaacaggttaacataatgttaaaggcttatttcgggtcaatccatacaaagtcaatcaaattcatttattaaacagattaaacgagatcgtatttggatcgaataaactttctgtatttcttacgtccatacaattcaaatttgacataacaagaactattgtcactcctacttgatcctgactttatcaataaagcttgttatacttgttcacatgcctaatgatagtccatcagaaaaacaaagagaagactactgtcgtattagttgactagatcactcactccacaacaaactttcttgttgaaagtaagttactactctccgcaagcaacctacatttatgacatcagggtcttcataccacacttcattagccttcttctttttcctttgtttggcgtgttctgcc

SEQ ID NO: 12445 - DNA, 4064 bp, Vitis vinifera
  Intron number 2 from transcript GSVIVT01018120001 (locus G SVIVG01018120001) derived from phytozome v7.0 (chr-ID chr5 ; pos 6716923 to 6720986 reverse strand)
agcccgaggtaggttcttactttgtctttgacaaacatgtaaatgctagctttaacatgcggacaatgtgttagggcaaattattagcttgtacagtataatttattgatgaatattcttaccaatgagggatgcttgatttgtatggtatttgcattgtatattcagctttattggtttcaattgaacccagggatgagaaattttggcaggtttggccaaggtccgaatagtctaaatcaactatttgtgaaatgagctggcttctaaagggttcatttggcctgggctttattttgagctagagagggagttcaaacttgtgtttgggccaaaataaagcccaggccaagggacatccaacatttgtatgagcctattggaattttggatcaagcctctcagattttgctgctacactaattaccataaacatattttattggcttctctcccatattctaatactgtgtaagaccaccagcctgagctgtttgggattgattgggttctatctatattgttataaacctatgagctagaaatgttgttttaatttctgaacaaccaataggtggggaaaaagatctacatgatcattgttttctccacttttaaatgctattgaacccttgtctatgcttttgtcatattctgtattatatgccatcctcatatgcccattaaaattttataaaaacactatttgcaagtgtggaaaagaatgattttttattcatgaattttggaaaaatgatggagtatttatagtatacgattctagaaaattaggaaactaaattactcaaataagggagttgagtaattcctagaaatcctctatagtctaccctataaatcagaaaaatgaaaccggaatgcatactgtcgtgtaagcgaaagctttaatgcaaacaatgttagttcaaaaatacaaagataaaacaatcaacacaaagatatacgaggtttcagcgtggtttggttagccatgcatacatccatagatggaagataatcatttcactataccatagagaatattacaaaggatatatatcagaaacaactattggattcttgaaacatcccatatttccgcattctttatatttacatcttgaaccacaagccccttgctccactaggtgtctttcattcttcgttacatttttatccaccccgtacagtctttacaatcccatcctcatctcataaccttttcttctcatgacctagaatatttgtagagatattcctaagaattttccttattttataaggaaatctaatattacaatgacatatgaatatatgaaatatttcatatgatattcttcacaaaaaaggaatctatacttattaggaatttgagacattttccaacaatctccatcctagatcgcattccatttagtcaatatttcatctctccataatacacgttttttttctttatgtgggttagggtgtatataggcgatgggtatgcgcatatggttgatttcatatattggttggggcttggatgagggtgggagtattttttttttatgtttcctctttcctaatttttgacctagtgcactttgtatacgtcctgtgtactcttctatgcttttagcacttttagagtcgctctactctactctggagcctggtggttttgctctgtacccttatgttggtatttagagagcgggtgtgcctcctaaggtagcttttttcgcttgggaagcttcctggggcaaaatcttaactttggaccaactccagaggaggggttattctttggcaaataggtgttttctttgtcttgctgaagcagaaacaatggaccatcttttactccattgtgttatgacaagggcattgtggaatcttcttttttctctctttggtgtggagtgggttctctctggtacagttaaggaaactctcattgggtgacatgaagcgtttgtggggaaaatccataaaaaagcgtggcaaatggcccccttatgtatattgtggtcagtctggaaagaaagaaatttgttggcttttgagaatgacgtgttgtcagtccaaaggttgaaacattcttttatatgtaatctgtggtcatgggttagggtgtttatagttttgagccctcggtctcttgttagcttttttgagtagctatgctttagttataggtaggggtttcgtcctgctaccttggtttagagtcggtgggctacttttgtatactccctgtatacctagagggcactaatttggtgtctcctctttctttttaatatacttgctctttacttatcaaatatatatatatatatatataaaattacacatttttttgtatcataccccgacgagagaacaatcgaccttaccttcgactaaaacttagtttgtcatattattgtgtgctttattcctttttgctatttcggaaatcttcatcttgagctctgataccagtttgttgtgtcgtggaagctttaatgcaaacattgttagtttaagaacacaatcagaaattttcatcttgagctttgataccagtttgttgtgtcacgaaagctttaatgcaaacaatgttagtttaagaacacaaagataaaacaatcaacacaaatatatatgaggttttaacgtgattcagctaaccatggttacattcacagatgagagagaatcatttctctataccatagagaataatacaaaggacataaaccagatacaactattggattaccgaaacatccaatgtttccccactctttatatctataccctgaaccacaaaccccctcttattcttcctcacatctctatccatcacaaaaagtctttacgatcccattttcatctcataacttttttcccttcataacctagaatatttatagggatatccctaagaactttccttattctataaggaaatctgatattacaatgacatgaatatagaaaatattccatacaatattcttcacacaaaaagtatctatacttgatacattttccaacacatacaattatacaatctgggaaattagggaattaattccatacagttatacaatcttggaaatcaggtgattaattccctggtattttcaatcagattgtcaatatcaccaatccactgaatcaatccatcatatcttcctgaagttgacatttaatctgtttatttaatgctacttaactgaacatgatctttctctctctctctctctctctctctctctctctctctatatatatatatatatatatatatatatatatatatgaagttaagttaatattgttctatcctattctcttttgtattataccatatgataatagtttcttttatagcatatgatattatcaagtttctccaagttatgccaattcttcttctcagggcaaaagaaaaaatgttgtaacaactctcccaatctctgtatttaccagctctcacttttgctgttcaaattcctaaattgcatcatagataaatgatttgttttaagagtatgattctatctatcaacacaagttatattactaattattctccatcttggtttgtattatagtgtatgatgtcatgaattttctccaagtcattctaactcttccatatctctccctccaatctctgtatttaccaaatctcaaattttctgtccaagttcgtacattgcatcataggtgaatgacctgttataagatgttctcatgggatgggcctatacattctaaactttggatatcattcaagactattttgtattggaaactgcaagccaccatggtttcttgaaatttctggtgcttggtttagacatggatttatgcattcaggctacatggttgcctagcaacatgtttcttcatttcttaatgtggatactagtctattttattaggtcaatacgtattactatgtgttatctatgtatatttgtgtgtgtgtgtgtgtgtgtgtattgtgcataattttcaattctcattgtagactgaagataaaattcattagtaaccgataatggtgtttctttatcaga

SEQ ID NO: 12446 - DNA, 3211 bp, Vitis vinifera
  Intron number 1 from transcript GSVIVT01001083001 (locus G SVIVG01001083001) derived from phytozome v7.0 (chr-ID chr1 ; pos 22479293 to 22482503 reverse strand)
ggcaaatcctacaagaaacaggtagtaactgcagcttttggatcactcgtataatgtatggttaaagcgagaaattatgggtttatttggaaactgttcttgaaaataggttattttttaaaagaaatttgaggtgttttcaaatattttttgtagattaatatgcgaaataattgaaactatataaaatacttaagttcccaataagtgcatagcaccttcatggaaaataagttgagaaaactacggccctgtttggtagctattttaaaaaatagttctagaaaacagtatttgaaaaccattctctaattttttgtaaaataaaaatctgttaaaaacttgaaatgtttttaacttgcttttaatatttttaaatatattttaaaaatagtttttatgtctagtgttttatttttaattattctacatgtttatataattattttttaaaatagccctcagaaaacaattaaaaataactaaaagatgttttttgaaaacaccttattctttattcttaataatagaaaatagaaaatagttttaaatagtttttggttgctaaacgtcttttcttgattttttattttggagaacaaaaaattgttctaaaaaacagttgcaagccctaattttcatatttaagtttctgaataaaattttatttttgaaaataaataaaaattgtttttttgagaattgtttttgaagatgttgtcaaacaaactcaatattcccttctcatttaggatgttccattctcttttttattcttatttcccaatgatatcttctcctacctatattatatggctttgggaaaaggtatctagtgcaggtgtgtgcctaggtgtttgatccattacatttcaaattttaggacatagtgattcaattgaaaaatgatcttgaatggtacttggatatgacataataaaggaaaaaaaaatcaattacaagtcaatttggagcaaaaaattaacatctccttgataaaaagaaatctcttttttttctcttttatttttacttttagaaaagaaaacaaaattaaaaaatagtgaatatccaaagtaaaggagtatccaactagaatcaccatacccacaactttttcatgtcgtgttgatatgggtacattgagcaaagttgaagaatttgggtatcatattatcccacaatctggcttttttttttttttttctatcatccatttttgacaacttgcccactgcttcatttatttatgtcagatggaaagttgaaaattcatttgaattggcatatggtcattcacatatctctaggtttctatatgcattggagcagagaactagtgtgtattcattattagggcaattttgtgtgcatacattggggtcatatggtgcatgtataatatcctgtatacaagcatgaaggtttagctaaatacatattgtatctaatctaatggtttaatgagaaactaatttgggttgtgtggtgggaaagaaacgcaaggattttcgaggataaagcaaggaattcagaggccctttgggactctatagttttccttgcttccctttgggctttctgttccaaggcatttaaggggatcccccttaatgtgattcaactggattggatagcggtgtgtactccttagggattggtccttagtgggtgttcgtttgttttatgtgtatttccctgtaatttagttgtctttggttggaggatttctcatccttcttcttgtacttcctttttatattaatatatatttgtgtcgtttccaatcaaaaaaaaaaaaaatggtttaatgagattctgctgatacgatctggactcaagggttgtcatttaaatcttcaatttgttatgtctatttcttcatgctatcttttctaatatttaattttgcaatcttctagcaccacaattgggagtcctggtttatgagtgcttatttatttatttatttatgagaaacaacaacatagtatattgaagtaagtaaaataagtacaaagaaggatgagaaatcctccaaaaagtacacagcaagaaaactagagccttcaagtttaagaatctataaatctatgaggttccacaacctatgtcccatgtgggaatatacaaaaataatctatccttgctagcccactcccttggagttacacacgaacatccaattaggttggatcaaattaaggggaacacccttaaaagtcgagcaagatgcctaaaaggaggctaggaaaaagatcatgtcccaaagaccctctaaggatctcaccttatcctcaaagttcctagcatttttctcccataacactacccacatcaaagcaagacaagcaagcttccacaacaccttgcctctattggtatttcccaatcctctatatgaaatactcataatgtagcatatactcctgggaggaattcaatccatatgaaccaagctgaatagtctatgacatagccccaaactcaatgggcaatgtaaaaagatgtgatctaccgtttcaccactctccatacacaacagacaaacattaggactgagagctttgtaggatcttctcagttgtagtatgtcattggtatttaccttcttgagtgccactaaccaagcaaaaaatttgaccttaaatgaggcttgcgctttccatacaaaatcaatagggaataatgaagttgaatcaatatgattggtcaagactaaaaaaacaactttactgtgaataaacttgaagaagatgaggaccgggctctcaaatcatattagtgtgatggtctatgagtgtcttagtgtgaggtgattgatggtttatccatacataatgggatataatatgattgattaaagtattatggtctatgttaaggttaacttaaatataatggtctatattattatgagttctattttaccactttatcaactatattaggtgctgacgattagctttccaaacaattatgttataatcattcaacaacttaattgaaatttaggcctcaattgatctctttatttcttattgcagatgacaatctgttgacattttttaccctctaaataattttattcttctgtaggcccgaaaatattcgaaagttcaagccttgtcatttatcatattttaaccttttatcctgtaattatgcagggggagtacaacaattatacttttccacttgctgtggcagt

SEQ ID NO: 12447 - DNA, 12383 bp, Vitis vinifera
  Intron number 1 from transcript GSVIVT01022337001 (locus G SVIVG01022337001) derived from phytozome v7.0 (chr-ID chr7 ; pos 18605267 to 18617649 reverse strand)
gtttcgcctaagagaattgccaccattgtaagccccttttatttattttgtctgtttgtagtttctgttgaaagcttcgttggttgatctgaggttagttattagtaggtttttgttgtatgcatcaggtttgatttgcactcctatttgtttgaatagcgtaatgctcgtaactttgaaggtcataccatctatgtgaaaaaatattaagcaagaggaaatggttctccatacggcttctccaaataggcacaaaaaatgatcgcccaccaattttttgaaatgttaaaatcttgtcattgtttttgctcggagaagcaattaaaagaattgtttttcattatttaacatttatttatctatgttatgatatgagaaaagctaaatctcatgatactcttatctgaattgcttctccaaataggcccaatgccatatgtgtgattttatagaaatacaaaagccaatattgcttttgatgcaatcttgataattgcttgtagcattaccctttctggatggggacaacacttgtttgcaattagaattagccaaaataaagtgttgaagaaaaaaaagaggaaaacatataataggagaaaatttgagaactgagaaaaaggaaaataaccttctgagtgatagcaatgggatagtgcaaaaaaatctctagtagttcaatgagaaaacatgggtttttgtatgataattttattagccaactcttggggttgatgaaaaaagtaagtggagaaatatggttatatgttcagtgactattttctcttgaagcatgtggttttttagaacatagtttgcaagaactaagataaagtatggagaagcattacttataggaaggaaataattgtggttaaattgaaatgtagggcacttggagtcagtcttaacagattaaatttgtaagcccttgaggcctggctcaagtggtaaagggatggggagggtttgtgggaggttttaggttcaagttccaatggggacaaaaatttacctatcaaaaaaattaaatttgtcaaacttctagtacaggatttatatccattatcattaagaagtatttctccctatactatgatgtggtaaaacaggttgagtgatcacacgttcacactcctggatttggtggcagttaggttccagatattggtgcattcaagatcatagatttaaatttgtcaagatcacaaagatgaatgatgaagaaactctttggatatccttttgaaagatatagcaatttgcaaagtaatggagaatgggtggaaagaaatctgggagaactaagaatgggagagaaagtgtgattttattatgccattgaaggcaatttgtatgatgcttaggttaggaatggctaactatgcgttagcacacagaaaatggaaatatagccctagtgggaggcttcaaatctgacttgtacaaggtaatggtgacttttagaggaagaagaagctaatccattaagaacaactaatgtttacttttgatgcagaaaatgcgaaggaaaagcttgaaaaagaaatttcttgcctccatcttgacatttgagctcactctttctcgtgtttgtaatatattagcatggacctggccttctaagcatagtgggctttctaggcttggttctcgaaggagttcaaatctacctacacttggttttggaagttgttttcttccaatgtgggacaaaggctttcattaggaataggagaaattttaaagtaaaaaactaaccatcccttgcatgatttaatgatgataaaacgattgtatggtggagcgcatcaacacatacatctttgacatatcaatgttaagtataggtgtataatcttgaacctagcacctttacgtgagatttttaattactctagtaatcttaaattccttctagattttcatgaatgctttgtagagttaactaagctctcataggaaggaatctacacttacacacttatagagtttgactaatctatgtgcttgggtcaaaatgttaggacaatgctcgttatactttatataggtcaaagatttcatacaaaagaaaccaaaatgtctttcttcatgctttgctaactcatctaatgaatgattgccttagcgagaaaccgagtaaaaggagcacaccatggtgcaaccacccatcaaacttccatgatcctctttcttttttaagtcattcatgatgtaacaatagcataatctcctttaactaagagattggagaagtcataggtttagagcccgtttggtagtgattctagtggaagtgtttttatttgaagtgttttctgctatagtgtttctgtgaaaaacacttttatgataatcagaaaaaatgattctaaagtgtttttgataatatattgtataaatataaaaacacttttaatattaataaattaccaaaaaggacatacaattttaattaaaaaaaatggtatgataaacaaaaaaaactttttattaatgaaaaaacatctaaatcattaaaaaaataacattgaataaaagataattttaaaattaaaacaatatatgattacctattaatttctaaaaaaataaaaagacttttctaattaaaaataataatttttttatcactatactaaaattttaaaaaatatttacaaaaaacatctaaatcaataaaataaaataaaaacattgaataaaagataattttaaaagtaaaacaatatatgaccacctattaatttctaaaaaaaaaaaaaaaattttctaattgatttatcactggggggcatttttggaatatttcaaaaaaattgaagtgtttttttttaaaaaaacacctgtcaagtgattctctaaaaatcacttcaagtgtttttccagattttcaaaagtgttttttaaaatttgccaaacactttattttcatcccaaaaacacttaaaagtgtttttaagggtagaaacacttttaaaaatcactgccaaatgggctcttaaagttgtcacccgcaaccaaccctccaaaagggctagaatttttgccttaatggctaaactctaatataaaaatttaaagaatgcttttatcattatatcaaactggtccttgaatgactgttcaatccttagctactatgggttacctaaagaacttctatccgaatttagcttaataaaacctattaaaggtggtaaccatcaagaaatgtttccttaatcaacctcatggttttgcgcactgggctttattaaatcaaaatgagtgtccgtgcttcatttgaggctcaaaggggtatttgcaaaagcttcaatagtaaaagttcaaagggaagaagaaaactaaagcaagtgtcaaattgcttccagagtcctctatctatcctctaaaatcttgtcattcctttcccactaaatagtccaagtagtcctactattcctactatgggggtggggagatgtctagaatggggggctatgaatttgaggggagcggtgggtggggttgtggtgttttgggcaacaaggtgttatgttggagatggaagtggggaatttttgattttatgttgttttaagaactatgaggatgatttttgttggagttttacaggggtatatggatccactctgaagaaggatagagaaagtttttggggtgagctaggggttattagaggtctgtggagtgatccttggtatgtggcaaacaattttaatatgattagattcccttcggagtgttgtagaggtggaaggttgtcctctattgtgaggagattttcataggtgatagaggatttagaattaagggacttgcctctgcaaggaagtccctttactaggagtggtggcctgaataactagtccaagtcgagaattgatcatttccttgtttcagaggattgggaaggtcatttttttggggttgtttagtgtgttcttcctagaccggtatctaaccactttcctattcttcttgatagggaagggttgaggagaggtcctacacctttttgatttgaaaatatgtggctaaacgaggaggggttcaagactattctgaagacttggtgggaggggttcaattttagtgggttagctagtttcattatggttgacaagttgaaagcactgaaacctatcttgagaaattggaatagggatgtttttggtaagataaaagtgaagaaggctttggctttgaatttggcggatttttgggatagagaggagagttcttgctcattttctcttgaagagttggatgtaaggagggaagcaagggaaaattataaaaaatgggtcctttttgaagaaatgtcctggaggcaaaaatcaagggaagtgtggctgaaggagggggatagaaatacggaaattttccacatgatagctaatactcgtagaaggaggaactagatggctagagtcaaaataaagggtacgtggttcattgaggagagtgagattaaagaagtgggaagagtgtagattctgctttctgccattggtgattggaagcctagcataagtggtctgtcttttgaaaggttagaagatcaagaggtggcagggctggaaaaactttttttgaggagaaggtttttggtgctctttcaagttttagtgaggacaaagctttaggtccggatcggttctctttggcattttgccagtcctcttgggagtttgtgaaatatgaggtgatgagtttttcttgggaatttcatgaacatggtttttttgtgaggagttgaatgcaactttcttagtgttgatttcgaagaaaaggggagcagaagacttgagggactttaggccaattagctttgtgggaggattgtacaaatggatggccaaggtgctggcaaatagactaaaattagtgatagctaaggtgatttccaaggcctaacatgcgcttgtgggggatagacaaatattggatgcagttttggttgccaatgaagccattgatttgatgggggagtggttctatgcaaatttgatacggagaaggcttatgatcatgtggattagtccttttggctttcggtcttggaaaatatgggttttggggagaaatggataaggtggattaagtggtgcatatccactgccattttttcagtcttggttaatggaaccccttctggtttattccaaagctctagggatttaagacagggagaccccttttctccttatttgtttgtgattgtgatggaagctcgaagttgccttttgaagagagctgtaggaggaggttttctattagcttgccaagtgagggaaagagagggtgaaggggttaaggtttctcatttgctatttgcagataataccttagtattttgtgaggcatcctaggaccagatgacttttttatgttgactgcttttgtggtttgaggctattttagggttgagagttaacttggacaaaagcgagttgatcctaatgggaagagtggagagtgtggaggatttggcttcggaacttggttgtaaggtgggaagtttaccttctgcttacttggggatgccgttgggtgcttctttcaagtttgtggcagcttgggatggagtcgaggggaggttttgtaagagattgactatgtggaagtgacaatacatctctaagggtgggagaattaccttgatttaaagcaccttgccgagtctacctatttacttcatgtctatcctccacttacaaaggtcagtgagattgaggctggagcagatttagaaggattttttatagggtagtggggctcttgagcgtaaacctcatttggcaaggtggatgaccgcttgtttaaataaaagaaaagggggttaagagtcttactattctcaaatggagctggcgttttgtccaaaggtgggagaattactcttataaagagtacgctgtccagcgtccccttgtatcaaatgtcggttttccgtatgcctaaatcagtggcaagaaggattgaaaagcttcaaagagattttttgtggggcgaagccaatggggggagcaaggttcatcttgttagatgggaggtggtgtgcgcggataaagataagggagggttggggctaaggaaaattactttattgaacaaagctctcctaggcaaatggatttggagatttgcgtgtgctaaggaggagctttggaaaaaagtgcttgaggctaagtatgggaaagaggagcttgggtggaggacaaggaaggcaaatggggcgttcggtgttggagtttggaaggagatactgaaggagtctgcttggtgctgggaaaatatggggttcaaggtgggaaaaggcaatagaataaggttttggactgacctttggtgcggtaacaatgtgctgtcccaaggcttcccgaacctcttctccatggctgcccataggaatgtcacagtggaggaatgttaggatcagaatgtgggtcaaggagggtggaatttaaggctgttaagggatttgaatgattgggagttgggtttggtgggcaatctcttagttgtgttgagggattatagtgtaaatgtggaagacgattcggttttttggaagaagggtgaggacgggctgtttaaagtcaagaaagcgtataatgtgttggtaaattctcaagggctggatttccctcatagcaatgtttgggtggacaaagtcccaaccaaaattgccttttttgcttgggaagctacttggggaaagaccctcactttggataggctgcagagaagagggtggcatttacctaatcggtgttttttgtgtgggtgcgaagaggaaacgatcaatcatatattaatacattgtacagtggcaaaagggttgtggaacatcattcttgcgttgtgtggtgtacagtgggtctttccaaattctgtaaaggaggtccttagtagctggagaggctcttttgtggggaggaaaagaaaaaaagtgtggaagtccatcccgttattcattttttggactatatggaaggagaggaacaagctagcttttaaagggggggtgttggcttatcagaaattaaaaacgtcgcttgtatacattatttggggttgggctaaagtgtacattgatatggagtcgaaatccctaataggtttcttggagtggttagcctccaaatagggtttgattcgtgttgttttttgtttgagggttggtagctttgtatacttcctgtatgccttggggctatttgccgttttatatatttcttttgcttataaaaaaaaaatggagctggcgttttgtgaatgagagagaggcattttggaatcaagtgataaagaggaagtatggagaggaatgaggtggctggtgttcttgcgaagtaagggagggatatggtgtggggttgtggaaagtaattaggaagctttggcacctcgttagcagtaggctttcctttgtggtgggtaatgggtagagggtgagtttttggagggataagtggtgtggggacacgcctttttgtgattcctccccctctttatttgctttaattgtttctaaagaggcttgggtgaaggatgtttggaatgtctcaaaaggttgggggagctagagtcctcattttactagacctttcaatgattgggaggtggagagacttttgttatgactgggtgggaagagagtgaatttggatgaaggaggataggtgttgtggctgccaacgaagagtggtaaattctctgtaaagttgtaaagtctctctataaaaccttagagctggaatctttagtttacttcccaatgaagatcatttggaattcttgtgtgcagcaaaaaataagtttctttgcttgggaggcctcgtggagaaaaactaaactttggaccaaattcagaagaggggttgggctttagcaaataggtgttatctttgtcattcaaatgaggaagccataaatcacttacttctccattgtgtaaagacttgagctttgtgggagatgttcttttctctttttggagttttgtgggtggtcccttcttcagttagggaaaccctcttgagttggaatgagtctttcatgggtaagaagcgcaagaaagtttggagaacggaccccttatgtattttttggacagtttggaaggcaagaaatataatcgcatttggagatgatgtattgtccattcaaaggttcaaaggttcttttgtgtacttattatggtcggagactaagttgtttataaatgatggtctttcgacgttaatagatttcattgattgggtgggttccctttgaaggaggggttgtctattgtatatcctcttggacagttttttgtttcaactattaagggggtgggtgtatctttcttgtatttattgggctgcttttttagcggctctttttaatacaatttcttttctttacttataaaaaaataaaaaataaatgggttactgcaatccactgttcattttcaggattatgtgtattatctacttaatctacttataacatatgtggtgtccaggaaactgcactcatgagaaagattagaatgccaataattttttgcacattgaatttgactgacactcgccctttatttatcttttaaggacatccttaaacaatatggtatctttatagattcatatccaaaataattagaaatctgagtatcttctcagtatactgagactgtggcaatccaaatatttctgtattatgcatatttttattccctaaaattacagcggcctcctctagatatttcatgtgtaaaaagtccttggttaattttccaggttctcattagttcccattattgacaaatcatgtacataaacaaagataaatacagtacttttgtattgaatctactgtatccacaactattggatttattagccataaacccatttgctaccctaccagtgccttattaaacctcttgtcccccgggccagggcttgtttcatacccagaggaattttactattctagattagaaactgggcatcgtcatgttcaagtttatatatgttctcctctacattttcttttaggaaggccattttcacgtctggttgatgcattagatgcttataaacagtcagataacttttttttggtaggtaaaagcacagaaattctatatattaaaaaaagggcacccaaaggccaacccaaagcatacaggaagcatacagcttataaacagtcagatggttgtgcttaacaagtaacatgtaggttaacagaatgaatgagaatggtttaactaactaaatgtttatccatgaagcttattggaatgccaggccatggaattaaaccaactgttcttaagaagtgattttgcctccatagcaccatgcatcatgtatctttggcagtcattctccaggatcgatccatatcttgtgtgctcaagttggaaacttcgaccttgttaatgctcgaaagaaatatgacagaactgagagggaaagagagactgctagtttgtatgtgatttttggtgtgcaggaggctgccctttatttggtgcacaacatatggaaatggcccaatcttatcaaaaagaagaacaagaagaagatagaaatggcccaaactgcaggggcagatctggctgcaagcagtaacagtggtggttatagaaaaatctccagctgctttaaatttgagacatttaatatttatatttgatgcagaaaattgaaaaatgaaaaaaagagaagcttaaatgaagttttggattggacctagacatgtgagcccatctcatttgaatgcaattacatgtgttagcttgggtctgctagcccatcccagacatagtggcttctccagtcttggttctcagaatcccaaattcacttcaaatacctgtttttggagttgtttccttctggcttggtccaaaagccttcattcttcattagaaacagggaatttccaaccaaaaaaataacattagagtttgctaaaattatgctaatgaagtgtcataactaagtggtggtgggtaaagtgggattcaataacagaactgggcttccttctatttctggtgacatttttagttcactgttatgattggtgcatggggatgctttcctttttacgtatgtaaataaatttatagaaattggcacttcaaatccattcctgcacatagttgacatggccattgaggataggatctgccacttattgcaagaatgttaagagattaaataaggttgcaacttgcttaacttttttcttagtgggggaagagttttggagtatgttaaagatgcctggaaagtgcatattctgaactttaatggatcttggttgtgccgattgggtccatcagctactaggtccttattatctgattttctggatccatattaaagggggcacatattctgcatccaatttgagttagacctcctgctatcaagggtagcaaagaggttgtgaagcctcactttggcattttaacaagtcttatttgggtcttcccttgggtgcccctttcaaaacctcaagggtgtgggacgtagtggaagagagattcaaaaaagattgtccttatggaagaggcaatatctctctagtttggagggggaggggggggggggggggggagagaggcttactttgataaaaagtactctatcaagtctcccaatttactttttgtctttttttgtcattctgcagaaggcgtgtgcaaaacttgaaaagattcaaagagacttcttgtgaggcgatggtgccttagagaaaaaaccacacttggtgaactggagtttggtttgtgttgatatgaggtagggaggctttcaggtattcgcggtcttgtggccttaaacaaagccttgcttgggaagtggagccggagatttgttgtagagagggattttttgtggaaacaagtcatcatagacaaatttggggtagaggaaggagggtggtgtttgagagaagtgaggggaggctatggcgtgggggtgtggaaagctattagaaaagtatgggaaagtattcgttgtagatcccgctttattgtagggaatggaaggaaggtcaaattttggaaggatttgtggtgtgaggaccaaacgttgaaagaagctttccctaatatattccgattagttgtcaacaaggattagtgggtgttagatgcttgggaggagggcgaggaggtgggtatctggaatcctctgttttcaagacactttaatgattgggagatgaaataggtggaaggcttgttccggaaactgtatcctttggttttgaatagggatgtggaggatgtcttgagctggaaggatagcaagaatcacttttttttctgttagattgctttaccgcttcttcacaagagcctctagtgacccttttccttggactattatttggaggtcttgggctctgatgagggtaagcttttttgcttgggaagcatcttggaacaaaatattgacgattgatcagctcaaaagaaggggttggaatatgccgaataggtgttacttgtgtaaagtggaacaggaaaccaatgaccacctgatcctattttgtaagaaggctacagtgctatggagcttgcttttctctatatttgatgtgcagtgggtcttgcactcctcaattaaaaagaatttagttggttgacatggagcttttgtgagtaagagaagggagaaggcttggagggctgaccccctttgcttaatgtgggccttatggaaggaaagaaatgaaagagtgttcaacaacattgaacggtccaaccaagctttaaaacattattttttgtacacttttgtgaattggggtaaggtgtatttagaggatcattctttgtccatgattgattttatagagtggcttcttgtctagataggagaaaggttttttgtctttttttttgtttagcttcttgagcgttgtttgtatactttgtgtgtactttttttgccgcttctaggcattggtaatacaaactcttatttacctatcaaaaaaaaaaaaaaaaaaaaagtttgaagctgtttggaaaattattaagaagcatttattgctccttggccaattttgatcgtctcaaagaaggctgaggagaggagggtctggagcaggaattaggcacctgatttgaaatgtaacagtgatagtggtttttcaaagcttacattctctcttttaagattaagggatattgctagttgtgaataaactttccatgcatatgaatttgttttaatggtgttaagatgcaatgacttccttttatgttctgtatctttgtgcctattttgttagcccgtgtctttgcaggttgattctaccaataattttccgttagagtgtgt

SEQ ID NO: 12448 - DNA, 8471 bp, Vitis vinifera
  Intron number 1 from transcript GSVIVT01036937001 (locus G SVIVG01036937001) derived from phytozome v7.0 (chr-ID chr2 ; pos 17315994 to 17324464 reverse strand)
ctgttgccctcaaaatcacttgtcctatctgcaaagtatcctctccttcgccctctaatctcttcattttcaaattttcattttttctcaattttcttcttcctttttattcaatctcattctatatttcattatcaatagtttttttttttttttcattcaattctgttagatctgtgacttagattctgatgtttctgcttattcgttgctatttttaggttcttgttttcattgatgagatcgggacagtttgaattatttgaaattattattttacgatgtttttggttgtgaagtgatgtaacagtataaccttggattgaaatcttgatgataagcggatataaatgttggtgaaatattgaaaattttgtatattagtagtttcgtaaaagaagaaaaatgatgtctcaaccaattgttctagatgatttctttttttagtgcttgaaattttgatttttttttgtattttcttacttgcaatttattgaggattcctgatcaaaagttttttctgatctaattttactccgaattagcaattttgatctgttcagattgtattagcaattttgatctattcagcttgtattagcaattttgatatgtgtatatatatatatatatatataaaactgacgacttgttgtaaagagttctttggtaatttttgtattgaggtcttcatgtttatcagttttgctcttagggtggtagctgcaagacacttgattgatttctcatagataacgccatttgtaggtgcaaaaaagatttggggctacctttatccaagctgatgagttttgtttctgttgaagcaatcttgcttttaggtctacaatagagagacacttgagtggggccaagcactggtcctctgactgtcaagttagtttttgaaaagaaatttatgagaaccagcctaaaagagagcatggaaggtcccttttttggtgttactttgtcttcttcagtagttgctttatgaagttgtatacgggtccagatcattggttttcttttgatttttgggttcctttctctttaagggaagaaagtgatctctttcttttttgctttcaatttgtagtcaatattagttattttgatctagaagatatacttctttcaatttttaatttaaacaaagatggatataaaacaagcttcttggatggattatgacctatcaaccatccaaaagttttgtttgttatgtagatgtaaatttgaaattggaagaatttatcccctatttaagacaattttttttattattataaattgacagcaaaaaggacagagatcattgttagttccaaaaattagaaggaaaaataatgacttgacctcaaatgaccttacctaccaacctatgaagaagttagactaataccaaaaaagggaggtttcctctgttccatgagagagttgttccacaaaattttatcctctgaaggtatcctattgttggagaaccagtgctagctgctcatcagtatcatttttattgccagtccaaatatagtttttttaaacaaaaagatggtttactagtttagctaaagctagccaaagagttttttgcacctagaattgtcactattggtgagaaatgaatgaaaaagcatttttgtaagcctagaaacaaacgagataaaagttcttagtacgaatataactgtgacggtacctcagtgtaaaggttgaccaagaagatcaaggtacataccaaggcaccctgatgcaattattgactgagaagatcaaatttgacctctgtacaaaaacagatagaggcacccaggtataaagagctactgagaaaagcaacatttagatttcatagacctgaaagggtccagaagactaagaaggttactgctatatggcaccttaatttattaaaaaaaaacagaaaaagacttggttatcttttatctagacacaaaaattgattgagattgttggacacctaaaaaacaatcttgttgataagaaaaaaaattgaagattagagtgatattttaattgtgacaagtatctcaactatatattggaagcaaaatatcaactccagtcctggaaaaattaggagaaaatcaatgactttgcctcaaatttgactcctttaagcaacttctttagatttcaagtgaatatccaaaagatgtcctcttcacaatttctgggtcattttgagaaatttatcttcaaaaaccaactttattgttggaggatgttggtcataattgtgttgtctcttgggattgtcaaatgaagaaacgatttaccatctctaacaaaagcttcctgattgccctgtttcggaaaaataaaagctgtgttgggtctcttttatatcaactaagaaagtttatttctactttcttttcttgatacttaggtaatgcatagtctaccatgtggcatttttcttattatatggaaggttatttaatggttatgtctattgtggcacgatggtaacttctcaggttgccaagcatgataatgcaggttcatacctgcttgttgtgacttcatttagaagtgctgaaagtttggtgtgttagtagttcaaccctcccaaaaggggcagaatcttcaaacatggcttgcaatgagttatggcctgtgtgttgcccaaattatttttcacccaagaaatcaacaagagagttgtctccccgcttgtagaaagtttcttaaaattactatcattattagttcatgtcttcactctattggattgaagttctgctaatacatatatgaatccaataaggatttctggtggcttttttatgagtttgctataggataatattgaaattactctttaactcttgaaccttatatattaaaaaggattttcctaagagcattgagaaaatctgtattttgagtaagttaggttgaggaaactaggtaaatgaacaaactgaaatttaaatgtttagagataaaatgaatcaggttgaaagagctcaagtataaggagaacctcatcctttgcatcccacttgtcattcagcaaaatttcatatactatgccctaaaggacttatcctccaaattaagttgaatttttcgtaccattagcaaaccaagccaagcccaaatcaatttgacttttaggaacattaaatccttagcatatctcatggtcgagatgatttagagaatttaataggcctagcctcttttgaaaacttttcctccaaggctcccatggttgtagaactgccatgtttgatagactatccaaccccaatatgcaacttatactgttcagtcctttttgtagcaaaacattaaaaggcctagcatcatccttttctttataggaaggcctatcctcattcttgttgtagtaaccttaacacttcttttagtaggcaaagtagtaaccttaaacattttttttaataggcaaagtggtaaccttaaacaatttctaacatcaggcttcatatttttactttttgataagtttagcatcaatcatggtattaggctgctgaaaaacaaataaatagatctaataatcatgcaacgtataaaagtataactttgtcacaagtacgtcataattctactaatgccatcggtttgacttaaagaatggtatagtataagaaaacaaaaggttaagggtttgtttgttaactgttctcaaaaacagaattattttttagaacaaaaaaataaggaaacatgtttgccaactagaaaacagaaaatagggtgtttttgaaaacctcctttaattgttttaaattgtttttacttgttttcttagtgttattttaaaaaataattatacaaatatagagaatgattaaaaataaagtattatagatagaaattatttttaaaatatatttagaaatatagaaaatgggttaagaacatttcaagttctcaaatagtttgttctagaaaatatcaaaacatagttttcaaaaatagttctcaaaaagtatttttcataattttttgcaaaaacacttcctaaacaatgcctaaggacatattaggtaattgttcctaaaaataattttctatttttagatcataaaataaatttctaacttagaaaacatgttttggcaaatatttgaaagaaaagagctttttcagaatttgttctaaaaacagattattttagagaacaaatttgagatgttttcagttttttttttttaaagtgttttaagcaacaactaaaaagatggaaaatactttgaaaacttttgtattgtatataagcgcccaggtatacaatcttcatggagtataagtcaaaaaaactgtttttcatatttcggtttccaaataaaattttgttcttgaaaacaattgagaacggtttttactgttctcaatttgttttttttttttttgagaattgttttttgaaaacatttccaatttttttcaaaacattccctaacaagccttaaacttgttggtgggataagaggaagatgatataaaagtaatggctagagattttctatgacagtcatgtgtttgcaaatgatacaatcattttctatgatgcttgtgaaggccaaatgttgtatttaagtaggacccttatgtggtttgagacagtttcgagattaaaacttgatcaatcaaaaagtgagctcactcgagtaggagaggttcttgatggggaggatttagcttctttattggggcataaaagggggagcttcctacttcatatttgagttctctgctaggtgcttcttttttaagttgcaaacagttaggaggtaatggaagaaagattcattaaggggcttgctatgtagaagagaaaatatctatcaaagggtggaaaactaacattgatttaaaagtaccttgtttagtttgctaggatattgcttgtgcttgtgtcttgagatgattgaaagagacttcctttagagaaaaaaactttatttgataaaatggttgattgcgtgtatgaataagaaaaaaagtagtttttgcatcaatgatttaggcaatctaaacaaggcattacttgggaagtgggattggagatacactctagaaagggaactcctttagaagtgggtcactagtgggaaatatggggaagcaaagggagaatggtacacccatgaggtaatggatggttatggagttggattatggaaagcaataaggagagggtggggggacattgaaagtagaacatttttttagatgggaaatggaaagagagtgaagttttggaaggatacttggtgacacaacactgagcatctattctccatcattgttctcctttgctagctcaaaggatgtatgggtagcggatatttgagaggagatagaggagggagggcaatggagtccatgtttcttaaaagaatttagtcaagaaaggtacgaaagacagagcagtatggaagggaacaaagggtggatacttctcggtcaaaaccttttactcttgcttggagctagaaagagaagcaacctttccagtaaaagtgctatagaacccttaggtgccaatgaaagtaggattctttgcttgggaagtagccttggggagaacttttgtcacgacccaaattccgggcgacctaaaatttggcccatgaccccaggtcaaaggtttgaccctaagggttcctcctaatccacactgacagtcaaccaaaacgctctgatttttttttttctatgcataaatcacactagagttcccaccaacaacaatccaatcaatataccaattactactcaagagcaacaagatatcacaattatcattaaagtctagaaataaaaattcacagtttgctaatacaagttccaatacaaccaacataacaaatacaccacactccactaggccgcttcaaaacctcccggggcatcctaaagtcctccctgccccacctgtggatcctcaagaatgatctgcatctaaaaagatgtgaaaaggaaggggtgagcattccacattgttcagtagggtgcctaacacccaaggggttaatggggattaccaagtttcaaatgaacataaaagaatcatattatcaacattgatcacccacatttttaatctctataattataacaattccacaattttcaataattaaataaaatgcatatgaacatgtgacacacaatcatacaatgcattgtcgttctcgggctttcaccgaaggatacgcgtccacatccaaatacactccccattcggagtcttttcggggtagatttttgggtcttttaccgtagggatctttcttccttcttaattcgcctcacacgggcctttactttttattactattttatttttttctttctttttccatttcatgcactttccacagtttttatccttccttcacacaaccatgatgcaaataaaatgtcatgaggttaattaccctcattcacaagtatcaccaataatatcacataaatttccaactagtctaaatatcattgaaattacaatcataccacaattccataatttcccaacaattccaataaccaaatataattatttttccacaataaaattaccaaaaatattccaataaattctcaaaaatccacattttaataaattataatttataccacaatttcataattttccaacaactccaataattttcaataataaaatataattatttttccacaataaaattaccaaaaatattccaataaattctcaaaaatccacatatcataaatttataatttatatcacaatttcataattttccaacaattccaataattttaacaacaatcatttatcaaccaaaaaaatttcccgtaatcaccaaaattccaaaaatattcccaaatcatccgatcaaatttcctatactacaaatattacctatttaactcttaataacaagatctataatttttttcaagaaaaaaaagcatttaattaaagttttagggttaggtttctctaccacagatctacaaatcggaccgttgaaaataaaatcagtcaccgtagaaatattcctcgcgtcgagtagaacacttcctcaaaatttcactcggaaaggacgatgttcggccgacaaaaaaagaagggagaaatctgggtgcctgttatggtgtcttatagctggttaccagctgcgatgaataattgcctatcaaacaaaaaaaaaaaaaaaggttggttatcagccaacaactggtactttccttctttgttgtccttttttctctctcaaaagggaaggccactttgagagtaatggacattatccatgtgatttggtttgaacgcatccatgcaagtccagaacatgttctgttgttatgttggacaagataatgagaattggttagcttacttatcatgtgatgtggctgattaaatagtatgttatccgtagaactaatggagaagacaaatttaggtcattatgatgacaaaactctcaccaatcaccctttcaaacatatctgccaaattttgcttagtgtaattgttcgttatgagattggcccttctgatagttaaatgcattggttattatatattagtagtatccaatatttagagccatgactcttattgaatttattacggtgaggcggacctggtgtttggttggaggtcctagttacaaaacaaatttggtgaaggattcagaaaaaggaatgcctgaaatttgatatcagtaagcagaaaagcaactcctgatcagcagaatcatttcatggtgtggacataccagagacgaaaatgatgagagagtaaacaatctatgtctacctcgtatagaagtgttgttgtctttgcttcatcaattctatgattggaatgccttaatgtaaagagtgggttgtggggattggttacaagaaggatgggtttgtgggagagagagagaaagatgggtttgtgggggagggagagaaagaaaggggagattcaccataaagtttggatagaactcactaaatgcattatttgacaccatttggttaccgtaaatcatgcctattagagttgtggttcactttttgatgtacttattggtggttttttttttccctatttttcttttttcagacatttggcttaactgtcagcgttcagccaatccaatgtggaacattccataaagcatattccttgaaaattctgtgctgttatagtgataccccacaatgtggtttgctaatcaaccaattataaagattcttttataccatgaaatgatcaattgcccaggaaaaaagaacagattaatacaattctttagcaacatttttgcaagttctgtgagttgtgaagatatgatgatgatacttatgttgaatttaatattttgcctttagttcctaactcagtatttgttgacctgatctggatttcaggtgcagctagcaaatcagaaccagcttggtgatca

SEQ ID NO: 12449 - DNA, 4941 bp, Vitis vinifera
  Intron number 1 from transcript GSVIVT01035753001 (locus G SVIVG01035753001) derived from phytozome v7.0 (chr-ID chr4 ; pos 3992854 to 3997794)
agatccccgatatcctctccctagtccaagctccggtacctccttttcttccctttatttcccctgtaaattgttcccggaaaaaaaaagattgattgttggtgtttgcggccagatctgattttgttgcttccaaccggatgcttggaatggccttgaagcaacaaaacggctctgatttttccccaatttttgtaactagaaaggaggaaaagattgtgttactgttagatatgtgcacgtgttaaaggatttagaacctagagaatagtgcttgtgattttccacttattctgtgactcaaatgtgaaattttagggaaattatatgggattgtagaagaaattcacgggaaaattcgatgataaaatttagcaaaatctgtatactgtaaaccagaatgcaacccttagacttcatttgaatcttggaaatagtggaggaaggaaaaagtgacagagataaaaggagagtaaatgaaaaacgtaggaaattaaaacatgagtttgagtccagtgaattttttctttactatttatctaactttgttctttcttttcaatgtaacaaagaatctggagttttattaatttttatacgattttatgttttattttccttcatattgttcatcagaaccaagatcttttttttttttccttttcctcatagtttccaagatccaaatggagtcttaggataattagagaaatgggattgaaaaaaaggaaagaaatgaggtaatttttatttctttatttattttttattttaaagtttgagtttaaccatttctctctaatgctattccctttccaaatagagtatgtagtgggcgaagtttgcaaccaaacaagaaagtttaggatttcttccaatttttaaaattttcctaaatggagcttaaagtgcatttggatctcatgaaccgatgagaaagtgaaagaaaacaaaggagaatgacttctcattgtttatcatataccaaaaaagggtggggaaaataaaacactaggtaggggattccaaatttttgtctttcttttttaccataaaaagggtgaggaaagttagagaaaaaaggggaaactttgatctgtgaagatgccttctctgtctttgagatgaattcgttcaacactgtttccatggtttcctattgacaagaatcatcgatagctttctactggctactaccatcactctagcaatctttgaatatatttgatattttccttctcaaacctcactttcccaacctgtatctgaatcacctctatcttgcccactccgttcaaaccacactcctttttctctcttttcctagtttgcacaagcctaggtttgtggcatgtggaaccagagtggttggagaaatcttgcttttgaatggtaccccatgaagaagaagacgatgaggaagagtttgactggttttggtgggagtaagagaaggggcatggggttttagttttggtgatggtaatgaggttgattagctttcaatcattgataatgacttcattatagttgctgttatcatgttttggtggtggtgatgctgaagagatcgagtagcttttagttgttggacatagcttcagtatggttgttgtagttgcagaagatataacactagagtgagagaggggagagaggagaggattttgcttttttggataagtaaacaaaaaaaatatatttataattaaaaattatagaccaaggtacacaggttgtatacaaaagacaatagctaggtcctccacatttcctactcctttctctcgtccaattgggatgaacttactattctccaaattgatttttaaacccaaaattgcctcaaactgcatgaaagacctgctcaaatgctctaaatgttcttgattggcatcatagaggataagattgtcattagtatagggcacctccatttcctcatctcctcttccactaattgtgaaacttgtgatgaagccccattcctttgctctattcaaattacaaaagattgcttccatagagaagatgaagagctatggggaaagtgggtcaccttatctcaagcctcgagaactatggacaaaacttcatggagttcactatcctagacggagaagtgagctgtagatatgcaccacttataaaatagataaaattcaacaaataaagaaaatactaataaaatcacataaaaattgaataataagaaaaccataaaattcataataataaaattataatttgtcattgtttgtagtttctaatttagttattttttctctcttctaaaattcgaccctctcatggctttatcaaataatttttagctctaccatgactatcacttatatgatcctttaaagatgcttaaaattttaaggatgtttcaatagtggaagtttgggaggaggtgggagatgattggcattggagcccttattttctcgaaaatgttcaagattggaggtagaaatggtggacgctttctttaagtagatccaagatacgataacgcaaagagttgtgaaatcagttagtttataaattgaatgaggatgagatgttatctctaagatcctattttaattctttggcgctagtttttgaagatcctagtttaatttaaagaagtttgtcattcttgggctcctccaaaggtggttttcttttgtgtaggaggtggtttggagaaaattatgatattggactagttaaagaggggaggtgaggttatagctaattggtgttgcttgtgcgagagcaatgagaagtccgccaatcatatccttcttcattgaggtgtatcttatagtctttgacacctattattattattattattttttgagttttgccttttacgatgaaagatgcattgttaggatggtgtgggctttttatttttatttttattttttattcttttatgtggatgttctttcttgagtctagattttgctagggagtggcttgcttatcattgcttgattttgtggagtaggtggggttgcactaatgtgtttttttttcctgttttttgctctttgacaacctttatatacttgttatgtttttaataaattgttcttttgcttattgtttttatttatttttataattagaaggcagatggcaacattgttttaagaattggatcggtcattgaaacaaaaaagctattgattcacgaatggtcggaccagtggttgaattgcaatcgaattgatgacatcattaatatataatttatttattattaaaatttaatatttttaaataaattaaaaatcaataatatctatttttttttatctttgatactatcaaattaaatcatgcataagtataaacatattaatattttaaattctattaaatgaaatatgtataatatttaaatgtgaatagattaaaaatgaatttaattttataattttttttttaaaattatattatttttatttaatattataaaatttcttagaaaagaatatagtttttttgtttgccacgctaagcatcaaaatgtgtgtagctgaatggttctccatcctttgcctaagcttcaggtcctgagctcaattatttctttcattgatttttcttgagttctattcttgtcaatcccaatcaatactacatcagatgaagacaagaataagaaggcccttaaatatagtattcacccaagacaagctaaacgcgtgaataaggcatacctaaggttcaaaagtttgtctcctatagtttaggcacaaggcacacgcctgagtaaagtgaaatgtgatctaggatgcatatcaattttagaaaatatgattcaaaatctagtcctataagttaaaaaaaattaagattccaaatatttaaaagaaacattcaataaaaaagtaatgaaattatataaattttaatatacaattacaaatttcaagaataaaagtgtttaaaaaggaaaagtaaagtcaacaagatgcacctttttaataagttgcacgtcttggcaagcgaggtgctataactagagagtggttgcgccttgagcttaggcatgtcttttaaaactatgtccttccctttgcttttcctttcacatttgcttgccattttctgctatccaaatgaaactaaaggatttaatttgttaagttggctgatttcagctcatactgtaagttgccgttaggctgatagttgctaaaacaacatatttcttaataacagtccatcacagaaatgtgttactaatggaatctagatgatgtggccttctgttttcttcattgagagattgacaagtgacaatgaagaaaatattataaaaatgactgaaattaagtttcccatcttatcgatagtaaatgtccgttcgattggcccttttctaaaaatatacttgtaatacatttatcaccttgtgtatgtgttagaaaattggaagtatcaatatatgtttatttcttatggttttctagttagcttatcaacctgcaatatatctgagtcactgcaaaatggatactagtagtttagtagctcaccgcatgttccaaacaaaaacagcaaagaaaaaacccaacatgttaagaatttggcccatttgttgaacttcattttttggttgaaaatatccaaactcattggtttcttcaatatttcactcttaagtcttattgagtaacttataattattattttccaagaatatacacactaacaattgatttatctggccatggatatggatcttatgattcaagaaccacaaggtaagagaggaagattgtacattttatatactaaaatagcaggatttttttattgcttgttgagataaagaaagagttcttattattgcttttatggcttgttgcaaattggaaatcctatttttgcatgttgctcagtgtcctattcatgctgcagtgcctcccc

SEQ ID NO: 12450 - DNA, 6380 bp, Vitis vinifera
  Intron number 8 from transcript GSVIVT01018395001 (locus G SVIVG01018395001) derived from phytozome v7.0 (chr-ID chr1 5; pos 9827337 to 9833716)
ttgtctaaggagataaaaggaattgaagaggaggtagaccatgaagtataagagattagttgataacttgagcgatgaaactagagaattgctgttttcacttctctgagttgagcacaatgtacctctgaagaatatctaagctagctaagctttggatgtggtttgtgtataaggctagctatgaattggagctactctagtgaaatttgcagtcatttatttctttcaattcttcttttgatatgtagtatttatgtatataagatggaaagtacactatctatgtttgaagcattaccgaatcatgaagtaattaaggcctattaaccacataaatgagaattgttgtcttgaggtttcaactttggtgtgtatgcagtattttgcttagcgttaaagagtaactaagtcaacttttaatgattgacaatgattggattctacacttttagagtttaaaacatcaacaatatgagatgcaacaatatttaaatattcactttgtactttcggagatatcttcataaagtaggcacatcatgttgtatcgaggcgatctacacctaccatgtacttctcaatcagagactttagtggtgaaggatactccaatcttcacaatagcattgaaaaactcatcaattttttcttttaataatgggagacactcattggaagttttgagaatcatttctttaatgttttctcctatcatatgtgttgtttgacgatgtgttctaaatgatgtttggcgctatgtattaaggatgatttgtttcatatcaaatgtatgagtgaaatcaagatgagccacacgaaatgtaatagggtatggagattgttgtttgaaaattaaacctacaatggctaaaagtgtcaattcatcatatgttgtatttctaattgtggtttcttgatcacgagattcaatcaaaacaccacttgagatgttagtaatactttcatcacccaaatggtaatgagacaaaggtagtaggatgacaaagtgatcattttgtcatatagtctagttaaagggcatcaacttcatagtagcaacaacattttcaaatcgatccttaggagaagtctcatccccttcattaacaagttggttgtcaccctccacttaaggcaaaatatttgtttttattagtatcaatgaaaaaaaaatggttacctctccactaccaagttccattggttaagttgaggttggaacattggtaaaaaagacacctgcatcaagaggatgagagttagcctcatcatagtacacaatgttgggtttagtctttcggtgtttaaagtaacattcacttgtatattcaaaattgtcatctgatatgttgagagcctttgcattgtcattttgcttaaaagcttgaaagtgatgaccattaccatcataaaaaatagttccctcatgctccaagtgtgtggaggaattagcttgatggccacccactgaacacttagaagaagctcttcagttatcaggtatatcatcaaagtttccctcaacattgtccctaactttcctcttagtagaaatattttagttgatcttgcatgttctagtctctagagactgtgagggtatttgtcgagaaaaatcaagaagatgttctacataagcaatagtgagagtctctttctcagaattgcacactttaatccactaatttacataagcctcagtgattaagaactttttaaggttatgacaacttggtataatgactctagaatgggtaccaaacctagtgcattactcccaatatcaatacacctccttcaaagttccaaagtgaaaaacctttggaaaacccccaagacgtcttgaggatatccaaactgcttgcaaaattggtgaagataatacagttggattgcccaatagttgcaatgtcgcgaagataaatagccagagcgaagacttatgagataagaaattcttatatcaataattaatacaatcatcatcatcaatcaagtccatgcgatctttttgccatggtgcttgatggtttaagtttacgcccttgctatacattatcaaatctcacgcttatgagttttaacacctagtagaaaactcgttggactaatgagtcatttgtgggggatggtctcaagaaggagaaatgaattgggtatcaaaatattcacttaaccatccatataaatagtgaatggggaagatagatgcattaatcacaagctttgaagaacaaacgatttcattcaggccattgtaaatgcttgctaataccagaacaataaggctaaacatctaactttgagccattctactagctactttgaaaactctagggcaaatcaaagtaacacccttcctaaggagaatgaacttacataaccaacatgcaaagaaagcaaccaaataagttttccctacatcttcctcagccacaccaaggtcagcaaacaccttcatttccaattgagtatgaggttatatggggtcaatattaccagaaggattatgagtttccttgggcctctgcatcttattccttgcactattcttcgagggtttcacatactttatgaaacccttgtaccaaagttacacacaggaggctattttgattgaagactctctttatctaggagcaaatttgatgatatgcaaggaataagtgttgacaacttgatgagagtgaggacttcattatatcataagatagctcttttataactcaataccatttcatcataaaaagacccgataatgggtagcccaacaatatgatatagatcccaaagagaaatggagacatctccaatggaagtatgcaaggtgtgaaaggtaggacaccaacgctcacaaaagactttgataacaaaagcatgacgatcataacccaatagagatgcaaaaatagcttcataaagcttgtatctcttaagaaactttctatgtcgacctaacacatcctccacctattcacaataaccttcgataaagaaagattccctaagcaccttgaaggaaactccctattcaacctctccatcatgtacacgagagcttaacaatttgaattcattttgaacttcaatggtagttgggtgagaagaattcaacaacaagacattggaaacaagtttcaccttgttgaattttgaattattgatattcgtaagctcgcaagatcctactagagaccaagaagagatgtgtaacagatcctttgtcactggcattgacagggtttgaaggtcgataagagatttttgtactagctgggtagtttcctccttaaagtcttcactatccttctcaagaatagtcacggttttcttcttgaagcacttgaagaatacctttgtaaaaagaaaaaaaaaatgatgaataggagaagaaaaatgtgggtctaattttaattaaaaagttggacaccactatacatccaattcataccaatttgcatgagtgaggaccttaccacttaagccacattaagtgtcgaaagtataacactgtaaagcatcaaagtcatgacttatttgcacaagtgttaaatataatttcaattttaattaaatattaaagtttgaataccactatacattcaagtcaagttaattgacatgaataagaaccttaacacttaaaccgcattaagtgtcgaaagtacaacagtgcgcaacatcaaagtcatgacttgtttacataagtgttaaatataattctaattttaattagggttaattggtgaaaggggtcaaaataacccccatatttgaaaatataacccaccagtcaaaaatcaaaaaaagttgatccgattgagacaaaaatgtttttcttcttttttctctccaacacatacaacttctcttcttctgtttcatttacagaacgactcctcatattttctaaaaaatttctctcatcattttcttctgtttcattatcttcatttggtgcacaaaacggaaaggtcatctcctctttcgcttcatttacagaacgggtcctcatctttcatcatcttcttctattccattattttcctttgatgcacaaaacaaaaatatcatattttcttcaaaaaccctagaaaatttctcatctattctctcatcctctgtttcattccgaatccttggaaaaattgttattctattttttttcaagttatctcatattatatcttcaagcacgaaagaaacaatgagttcattgaagagtgataggagaaaaagattttaaaaaatggtgaaaaagcaaaaatgcaaattgcgaacagaagaaaaagtgaagcaaaggaaaacgaagctattgagcaaaaatctcaattaccaacagaagatgcaggtgatttgattactactcaaaacatgctattttgtagcttgtaattagctcttttaagcacccttgagtagtaattattaccttttaactcaattagcatgttagggacccttgcaatcgtttctaatcaaattgtgttaagttttggtgctttttgatagctttatgctcaccaaagcaatttaagaatgagggagagctatatataattcatggcaaagcttttggaagctcaaatttatgaagaaaccaagctttggagcctcataatcctttgccttagtcgttcaaagtatgcaaggaaagaacagtggagaagaggaaaacagggtaaggaaaataggggacacagatgcagtcttccttcgcacttttggagcacttcccgaagttcattttctacattctatataccatttcaaagctcaggaagtcaagaatcaaacgattcaaaccatgtacgatttggagctgaaatgaagaagatatggccttcggaagacaactgcatcgagctgagggaaaatttcgcacagtgcgaaattggaactccaacgtgcgaaatgtaaaattggatagcagctgtgtagtcgtggtgaagccagcatacgaagttgatttttcaacttgtgaacttagatttcaatgtgcgaaaattggatatttttgccgactttttttcttctgatatttttgtgtctaaatttccattttctccttgtattcagccactcatgtaattccttagctaggaagtatctaaggaaggggtaaaattaccttcctataaaagaaactctcttgtaaacacaaaagacactctcggggaattttctccaggagaccaacttatgtaaatttgacacttagtgaaatacagagatctcttttttgctttctttttctctctactattttctattttcttggaagccaaacagcctctgaggatgttttcccagaggatgagaggctaaacttatagtttcttggagtaaaggaagctaggtgaaaagtccagataaaaaggtggaaagcttccgtgcattaaattcaggtagttagagttcataaatggcttctaaatccaaagtgttgctttaaatcccttagaatcactttgaatggccaatacatggtaagcttcaggtctttgtggatgcttattgctagatccatatcagtccattagttatcatgtacgagccattggaaagtgattcaaggtgaaaactcatagtgtcttaagccattaatggaccttgactaccatttctattgactttttatggattaaatcttcattgttaaatctataccggttcgggaaataactataggttaaatccccaatgcgaggagaaaaatccggaattttccactttgcattctgaacttgatcctagcaacccttaactccgggaaactttctttcttccattcttacttagttctatgttagtttagttgtaatcaccattttcaaaacaaattttattttcttttaaatttcaagtttatgataaaggaaatcatcagactcaatttttaatctagagtctgtcactgatagagtgaaaacccatccctgagttcgaccctagagctgctatactatagtagctttgctacgccagtataaggtcataggagttataaatatttttgattaaaagacccggctgggcatgaatcatgattctactaaaccagtgagtgtagtcttcacaataccataatatttgagtatggttaagtttattagttaaatgcacgaagaaaaatttaggatttattgaattgtattcaaagtataaaattgttatatttataaaaaaaaaaaaattagttctccattgttattagttatgtattttgagtgaataaatttgggtttgttagctgatgtttgaaaatatttgggaactattacagtgtgttgaaaaataataaattgcatattaatattgttttagttttctgtattattatcaatcatgtgtttagagtgaattaaatatattca

SEQ ID NO: 12451 - DNA, 2785 bp, Vitis vinifera
  Intron number 2 from transcript GSVIVT01017768001 (locus G SVIVG01017768001) derived from phytozome v7.0 (chr-ID chr5 ; pos 3301575 to 3304359)
ttatccgtcctctcttccttttaagttttccgaaggttgatttctctctcttcttcgttctttctcaatgctgaattcaattttggaatatcttgaatatcttcatttttatgatttgctcaagccaaatattgctgtgatgtaatcctaagatgcttaagtttgtagatgtgattttctttcaattaggaatttgggcgttgcttgaaaatgtgattggtaatatggtttttgtgatgtgtggatcatggcggcagatttgcttccatagttttaaactatcaaatttcctgcaatttttacatatttttttccttggataactagttatcatatcaatcaatttgatcaaattacctctttgattcaagctcaattcgcctaaaacgcctgtagatcttgtctctagatcatccttcctatgagaaaaattagatctagatcctcatgtttgtgagaactcacgaaaacatgcttggctattgagaaaatgaaagaaagtgaaagaagaagagagatttttttaagaacataagagagagaattacaaatttgccgaagtacgaaaatccataaaaaaatttcccaaaaagtgcacagcggctgcagtttttggatcattcctttagtgctttgaacttctatatagtccacattacatgctttattgatgggatggtatatagttgttccaatgctgtgcatttgtatatatatatatatatatcaagtattctaatgagagatttttcagaaactcttttaatataccgcaaaaacttagaagatccagtcctattttgtgctgcttaaattttgattttgcattcctctttctaaaatatgctgttgttgaagtttaagtagtttttcataagattcctcattgtgtccctataaagtatacgatattcatgtatattttgtagacaaacttatccctatatttgacttttggaaaatttgaggtaaaatgcaagagaaagagtaaaaattaataggaaagaaaaagtgaaggaaaatgaaatatagatttaaagttaataaattatttttacatgcttctttaaacttatttcacttatttttcctcttgtatataaagattaaataatttgaaaatgcatatgtttgtaactgattataagtatatttgatttctttcgtattctccattagaaaccaaatataagaaaatcattttctgtagcatacatacttgtttgctgcctatgtttgagagatttcagtcattgagttgattaaattgtattggctgggttgttgggttatacccggtggcagaagcaacgagtattggttctagagaagatgattgttccttgtttgaatggtgactttaatctttggaggtcatgacagcatatatcgtgtggaccctgtggtaaaggataatacaggacaaatggaaattttttgtgcttctcaaaacaatgatggatttttaaaatcaacttgatctcctcacttccaatccaatactcatgacatatttttcaccccaaattcccattctcaatattattagcaatctttgtattagcatgttaactctgatggttatgatgtcagtttaatataggcatatgccattaagaattttagtagaaattttttatgagatatagaagaacagaatacttctttggctatcttctccatgtgattattttgattcttagtataaatgaaatgtctttcttcagaattttcttacttttgttgggatttctaatatcaggatgatgacttgattgctgtattttatttttatttttgggtggaacaatgtgatgattgaatacgtttaatgtactgaattttcatggtttcaagcatttgggttattatattcctgaacattgtactaaacatttgatcctattgaatttgtatttttctgtatttataatgctttttctgttgatcaaatgtttgaggcttgtcactgtcaacaatgttgatgggaagttagcaaatagcaaggaatggtttgtaccctgaaaaaaatcctaggttgcctatcaatttatttctttaattttctattagaaagtttgcacatttggttctggtataattcctttctggcatcttggctctctcttctattcaatatctttggcttctctccttctgtatatgggaattattttatgtttcacattgttattgcattgaatccaagtcatctctaagtagctatataaaagttgtttaacatcacatagttggtgttattgggtaatttaaattttagctgcataacatattttaggatctttattatctttctgtttgctgttaatggtgttttcaagactccaactgctatattttcaatgatgatgtggctaacatcataattgacagttacttatatgaatcgtgagcttatttagtcaatatatattttcccttttcaatcacttcttgttcttctggaatgaataagaagtggggtgtgaattttttgttgtttccagaggtatactctttgttcaataatgctcattgaatcttctgtgcgtaaattgaactgatagctcacaatgttgctcagattttctgttcattgttgatatatacataattcttatcacatgatcttgattagtccgattacatcaaagtcaataaaaatacactgatgcagggccttgccatttggaagaaatatcatcttttgatagttgtgcattgctatttgttactttattatttatatatattcaatcattatattattcatcttgcagagatc

SEQ ID NO: 12452 - DNA, 5211 bp, Vitis vinifera
  Intron number 4 from transcript GSVIVT01012107001 (locus G SVIVG01012107001) derived from phytozome v7.0 (chr-ID chr1 ; pos 1389634 to 1394844)
ttagtaactccattctttactattgctaaccattataaaccatataactgccttgttatgaagtgttattgttcacttagcccatcttcttgtcaagattttattatcaaatatggtatattcttttatctacacttggatattatccacatttcacaaagtaatgaattaatacaacaaaacctgagctgaatataataatgaaaggctgtaatagcatcagaatagcagaattttgactgtggcaacaatggaaacaagaattttgataggctattgcacaaataatcaattaatacaacaagaattttgactataatagggcatttattttttcttgttctctcttccttttttcttgcctatcatgctatttgtatacactgtgttgaatttggtatgcccttttcaggcacatataatatattctctcatttttcctatggaaaaaaaaaagaaattcattagaagtgcctaaccagatgggggtgttttttctagtacgcaagttgtatgcaaaggattctaaatagtgagaaaaggcaacaaaaccaaaatgaagctaaaatagtagaatcagttaaatcctagaaagacatatttgaaaatcatacagaagtcctagcctcagatatgatactccaagaatagattgggatctctttaaaagtagagtctccttttctatgggtaatgggaggtggtcaagtttggaaggacaaatggtacgaaggcaaacagttatgtgtatctttcatgtcattgtatgtcttaactgtatgaaaagaggaatgggttgcagacttacgggtctagacaagtgaaaggggtttatgtaatccttgcttctctaggcatttgaatgattaggagctagacaacgtggagtgtttcttctctattctgcaacgaagggaggtaagtagggatggagaaaataggatggtttggatggagtcgaaaaatgagaccttttctgtccaatctctatactctgccttggagctagggagatcaattccttttccaatggctgtaatttggaactccttggttttgtctaaagtgagttttttttccttaggaggctagctgggaaaggtattgatgttagatcacctcgaaaggagagtgtggtgttttatgaacagttaccttctttgtggacacaaagaagaatctatcgatcacctttctttgagtcaagacaaggattttatggcagttgatgctttctttgtttagcatattttgggtgatgttttccataatgacatgactcttttttcaaaaaaaaaaaaaaaaattaaaggcgtggagaactgctcccttatacattttttgaataatttggaaggagaggaatcaaagatcttttgaaaatgaggagcattttgatcaaagatggaaaagtgccttttttagcaatctttttatgtggtctaagtagtgcatggatgaaagttcaatgactttatttgattttgtgggttctcgctgagggagggagtagttttttgtagtccctcttttttggttgtgccttttgacgacaattgtatacgtcctatgcaagaactttttatatcatactctctttatttacctataaaaaaaaaatgagactccaagaatagaccttttgtagattgaattgaactctccttgcttataaagttctctagttcgtctctatcctaatgaaccaaaaccagcaaagcagggctgttctcctatgtgcttcttactcatcaagtcctcatgctaactaggtaaaacatcatttactgacttctaaccttaaaagagggttgtacacgcttgaaaagaccacatcaaatcatcttcacaacatttgagacgacaacgaataagcagaaaaaaaataaaatctctacctccacccaacagctccagcactctaccacaaacctcagcagcctccctagcatcaacaacatctcactctaaacaattccttaaaactccctattaattcacagccatgtttccagctagtgttgtgcaagcacaccagatacatcttaggagaacagggtaaaggattttacaaccttcctcttcttgctatcacttaatcttccaacattccaagaaactataataagtttcaccgttcaacagtggcaagagtcctgccaacacctacccctctctcactaccaacaaactgcccattgttgctatcatgatttatcaacaattccctttccttgtgtgaacttgttccttcacctcttttaagaaatcattgtgaccctgcctagtttctatttcctaatcaaggccataatttattcgttaaaccactgagcttaggagttttgcaagcccaacatattttctttttgaccatattatttacgtttcagacagaagtagcttgatcatcactagatttttttgcattcaatcatgtaccattttgtttttgtgcatacattcttgggaatttcagtcagagtaatgttgcaatattcattttgggttgagcaaggtgggccaagcaaaagcttgcaataccattatgagaagagtgattcctttttttctcctcgaccttctcacataggcacagttctgaattacacatgttttattgtatttgtgtgctttgattttttactgcttctgtggtttgatcctggcgtttgtcttgtaatatggaagatattggtttctcttgacggaccatcaagatgcacttttgggtctcataaccctttgctttagtaaaatttagttatttatttagtttatacattgattttacatgatttattctacagaagtgagactatgtttgaatgttatacgctcattatgcaggtattcatgtggaattacgaagaaaatatctctattcttccacaaggaatgatgaactaggccattcaatcttacatggtgcttattctctctctttttatttcatggatatccattcagactgcaatataattattttatggttcactccatttgtggactaaatgtgctatttatggttcatgctagtttgtaaactagaaagcctctagatctgttctttaccttattgagcattaggctattttttttttcccttttaccagttcaacctttattttacattattctaaatacaatttctggagatttagttggttgcaatttacttatatgcctttttaccgttttgcatgagtttcaagagtccattttaatgattctagtctaattttattgggaagtagctgtacccatctaaaatttgaatcagcttgggctgatagacagaatcgtctagtctaccataggattgttgaaccaatcgaatgctggtcttaaaattgcaaatttattatttgatgaagttgtcctaaggttcctagcaaagatattgctcaggaaatttgtaatagctatgtggatcctcctaatagatccttgccacaagtcccagactttatggtgtggttttggttgaaaccatttggtttgagcttctgaggtatagaaatttgaaatttccctatttttgggtattttggtaataatagattaaggtatttgaagccaaatttagctaccttttttaatgaattttgtgaatttttttctttgttgatttactctggattttatttattcactggattccatggttttgtagaactttccaaatttgagttggggtaagatttcatagctgggccttatgttatggatgagaaacatttcttacttagttatgccgtcttaaatttgaatcttattaagagtttaggaggtattgtgtagtggaagatatttaaactgtatatgttttagttagagaagttttagtaactatgcttcaagataagcaagctttttggaggcaatctgacaaatcaatgattaagaaatatatgttcattggttccccatttatgcagggtgatggttcgagtaatttttcttagaggtagaaatgtgactgactgtttttgagttggataaggaaaaggctctaggtcctaatggttttattagagcctaatatcaagtttgttgggatgttataaagaggactttttgaatttcctagaattttataagaatgggccattaacaagagttctagtgcttccttcattatcctcgtgcttgagagaggacaagccaccagaatctcatgttttagagccattaattgactggctagcttttacaagatcatagccaaggtttgtctgactgcacttgcaaggtgatgcatgagacaaatcatttttctcagggagcgtttgctattggtagacaagttctaggcacaatcttagtggcaaatgattaggtggataagaaaagacgatcaggtgaggaaagggtggttttcaagattgattttgaaaaggcttataattatgtgcatcgtggtttattatttcatgatttagaaaggaaaggttcctgtttgtaatggaggttacagatttgtggatgttttagttcggttagattatcttattttatttatttattattattatttagtgaataagagtaccaaaggttggccaaaggtgtccaggggattaaatacaaggtgatccattctcatgcctttttttacctttttttttttcccattgtggctaaaattttgagtagaccaatgtggagagcaaaggatggtggtgtcttggagggttttgtgacaggcagaagcagaagctaaaccgcagtatgtttttcaagagccagagaggaggatttgcaaaatcttaagcttagtatcatggtttttgggcatatttcaggttttaagatggatcttgataggagtaattgcagacatcaatgtcatgcaggaccaaatcattcaatcagcttctcttttaggctgtagagtctttgattggtcctttttgtatttgtgtcttctgatggggtgggacctcaggggaataaacttagtgatatctgaaaaccagttatgagctagttccacagcacattcttttttatttcaattcttcatggctttctaattatcttatgaagtttggatttctatgcagtggttcccaccatgaaagtactatttttgaacttccccaaatttctaggtatgcagtgcatctactcatgtcttttacatgttcaattcacaaacttattttggcttgttaccacatgcagttccaggtttcaagtcagttt

SEQ ID NO: 12453 - DNA, 18747 bp, Vitis vinifera
  Intron number 6 from transcript GSVIVT01021333001 (locus G SVIVG01021333001) derived from phytozome v7.0 (chr-ID chr1 0; pos 4144799 to 4163545 reverse strand)
gaaaatcgtatctgtaaggaccacccctaagcgcacacgtggcaacctcacagaacgctcctccatgggacacatggcaagttcaaccctctgtccggattttcctcatggggcacggggcactctcaactcttcatccggacgaccatgggaccggcgtgctatccacactcccttgtccggacgttctgtccagacccaatgccagcgtcttagacaaaagtcttgaccgcatttcgcagaccatcattatttatactactaaaagtatgctcgacgggaccctcctgggtcactttaggcaacctgtcacaatctgcaacccaccgcctacagagcaaaaagacggggatgacggcaagtcatccctcccataacttttgacatccgcctgcagaacaataatgactctgctaccatcttagcatcatcatgacaaaccaaaaagtcttcccaccatcaaaggggacaaagctcctaacactataaaaggccctcacacaataaaagaaggtaagcattttttcccaaaaaaggaggacccaagttagaatataacaatgttagagaaaagaactaacaaaaccatcgaagggtgtattcgaacatcttttgcaggtcaaatgaagcgagtatcatctttagttgaggaggagcgtccatctgacatttgcggtggtctcggtaatgcgagccctcaacagtatctagggcatatgaagatcaaaaatgaagaagaatacagtacctgaagtcaggctacatgtatatggttatgtttaattatggtatgctatggtttggcagtcgcatggatcctagaaagattatagctttgagatgggtagtattattactatcttattacgtacactagtcaaataatttctgtaaaataaggattcccatgttgttgtaatgttgtttccgtgttatacataaataagattgcataattatataaagaagaaaaaatttgtcgtgattgtgtttacttgacagcaccattgctagctcatttttttaataacttcaatatttaaagaagctaataataataaacaagggtttggcaaccttaataataataataataaaagtttttaaatgtagtttttaaatattatcaattatttttaagaacaagttttttttttaaaaaacttagatataaaaattaattttctcaattttttctttatgaaattactatgcacctatgttaaatgaaaaggttgttgtcgatatataattaatatgttcattttttttagaatatttaaaaaaaaatcctcaaatttgttctcaaaaatcaatatattaaattctcaaagtgttttgggtaaaaattaactaatatatatacttttcaagctaaaagtttatttttcattttaaaaagcaaaaaaatatttttcagaataattttgaaatagatcctaattcattaaaacttattttacttgctagaatttaactactaaaccatgctaaggtggtagaaatgaactcaatatcttcgaccaatgaaattggatatccaatttccaatctaaatgaacaagtcttaatttagtcctacgttttctattcttaaattattttgatcaaggataatttttttcttttctatatcagagatgatcttcctcgaatttcattatattacacaaaatttttctttgttttaaactattagacacatctaaatattaagttacaaaatttacctctattccaaaatattatattaacctctttgtcaaactttttctcctaaatgtgtttaaataaaattataaaatgacatttttaccatttcttatatcatgagggaatgaagttgtttcaaatatcttttcccttctaaattcttctttttatttcttaatctcatttctcctcataatctagtcaacatccccaaacttaattagattttccctctaaaatgtctttttatgtacactcttcctatccttaacctcatttctccttgaaccctaatcaacattacaaactaatgaaaaccaatattgtgggcaccatatcccacgtgtccacccatgcttattgccatgtgtctacccacgtggcattatcccagcagggccatgcggcagttctttatcgctactcaaacaaccttcaaggcacccgggtgaatagtctgttcggaccatttgcgccactaagcggcccacatccctcttgatagcctcaaatcttctttgatatgcgaggccctggttagctgacactagattgactgatgggaccctctccatcctcacatctactttagtagacaagcacttcaagtctcaggtcattagcaagtttgaaaagatggcaagctatgtcatgacgcgccgtctgacacggcccccagctttcctgcaaatatgatgattgccctactacacaatcatcactacaatggccagctcagcactactaagctcctctctacctttgaacactataaaaactctactataatagaatgaagggagaggacacggtgagatctcttactctctctctctcatctctctctctctaagggttcttattcattcccaatatctgacttgggcttcagagggtgtgtttggacaacccgtctgaacatctttgtgcaagaaaacgggaagtccagattccaccatttgaataggggctttcactgccatcttagaggggggaatccatccttagttgacctggcatcaacaaatatgatttcccaaatatcatattcattttcatattgtttcccatttgaagcaattcccaacctcccttttgaatcatacattgaagccaataaaagaaatggatttagatgagtttcaaaatcaacatcccaaaatcaaacataaaatgcaaaagaagtaaatttctccctaatccataaaatgaaaaagaaaaagaaaaagaaaaactccccacccactttattcccgattcacctcatccttcaattgtcgtcaacagatacatcttccttaagtcaataacttcccatcaaacccttctttttactcagaatcttcagccttcctacctcaaaaacccttgtctttttatccatacacatttcgttcatccggcttcacttttagaaaaataataagcaaccgttctaacatagtgctaaagttttgagcaccctagtccatataagtgactcgttctaacaatgattttcaaaaacacacttatttcaacatctgactacaactgacccaaacattcaatggatcatatccaaagcggacaagaagtgaaataaacctacccttttcatgccaattaaacacttctacacctgtctctttcttgtccatatatagttttataaaatgagtgtttgataatatttacaaatcataaaggaaactaatgctatatatttcaaaaatatcattttatatttctcttattttatgcttagtcttattttactctatcaagctctttcgaattaatatgccacacatatataaatttgattaaataaagaatatataagtagatcatacaggtatcatttttctctatggtatgataatggaagtagatttgggacgtcattcttattccaaattaccatgattatttatgatcatttttatctctatccaaaagtacaaaaaaaaaaaaaaactaaaggagacaactttggggcaaacatgcaagggaattttccatgcccactacactatatttttcatttcttttttttttttaaacaaatataacttataaataaaatacaatttataattaattaataaataaatcttctcttattaattgtattaaaaatggaaaaataaaaataattaaattagattatttttatttaattatattcataataagataagtggagtgatgtaagataatacctaaacccaacccgaatttgaaaaaaaaattgaaattcacttcatttccatttatggttctcctaaatcaatcatcttagaaacaagataaaaaactccatataaaaaataaaaaaaagaatctatctttcttctctgagataattcttcatattgaacttatttggacatttctaatattttcatctaacctaaaacgttttattgttcaaaataggacaacattattcatcttcaaacgactttaatccctccggttcattcataccccacctttgtattcaagatatcccaaaaagtttccaaggttatctttgttaatggaaatagttataaacattaacaagtaatgaacaatatgaaaaatcgagtatacacaagataacatataattaataagatgaaaaatatatttaatagtaaaatcaagcataaatagtgggatttgcctttattaaatgcaatatatggtttttataaaatgagtgtttgataatatttacaaatcatgaaggaaacaaatgctacatatttcaaaaacatcattttgcatttctcatattttatgtttagtcttattttcctagatcaagctctttctaatatgtcacacatatataaatttgattaaataaaggataaatggatcaagtaggtatcatttttgtccttttatatcaattagcacataagtagatgtttttcttctatggtatgataaggggagtggatgtaagataatacctaaacaacctgattttgaaaaaaaaaattgaaattcacttcatttccatttatggttctcctaaatcaatcatcttagaaacaagataaaaaaactccataaaaaaaaaagaatctatctttcttctctgagataatccttcgtattgaacttatttggacatttctaatcttttcatctaacctaaaacgttttattattcaaaataggacaacattattcatcttcaaacgactttaatccctccggttcattcataccccacctttgtattcaagatatcccaaaaagtttcaaaggttatccttgttaacggaaatagttataaatattaacaagtaatgaacaatatgaaaaatcgagtatacacaagataacatataattaataagatggaaaatatatttaatagtgaaatcaagcataaatagtgggatttgcctttattaaatgcaatatgtggttttataaaatgagtgtttgataatatttacaaatcatgaaggaaaccaatgctatatatttcaaaaacatcattttgcatttctcttattttatgtttagtcttattttcctagatcaagctctttctaatatgtcacacatatataaatttgattaaataaaggataaatggatcaagtaggtatcatttttgtccttttatataaattagcacataggtagatgtttttcttctatggtatgataaggggagtggatgtaagataatacctaaacaacccgattttgaaaaaaaaaaaattgaaattcacttcatttccatttatgggtctcctaaatcagtcatcttagaaacaagataaaaaaactccataaaaaaaaaaaaaaaaaatctatctttcttttcttagataatccttcgtattgaacttatttggacatttctaatcttttcatctaacctaaaacattttattattcaaaataggacaacattattcatcttcaaacgactttaatccctccggttcattcataccccacctttgtattcaagatatcccaaaaagtttccaaggttatctttgttaatggaaatagttataaatattaacaagtaatgaacaatatgaaaaatcgagtatacacaagataacatataattaataagatggaaaatatatttaatagtgaaatcaagcataaatagtgggatttgcctttattaaatgcaatatgtggttttataaaatgagtgtttgataatatttacaaatcatgaaggaaaccaaagctatatatttcaaaaacatcattttgcatttctcttattttatgtttattcttattttcctagatcaaactctttctaatatgtcacacatatataaatttgattaaataaaggataaatggatcaagtaggtatcatttttgtccttttatataaattagcacgtaagtagatgtttttcttctatggtatgataaggggagtagatgtaagataatacctaacaatccgaatttgaaaaaaaaaaattgaaattcacttcatttctatttatggttctcctaaatcaatcatcttagaaacaagataaaaaaactccgtaaaaaaaaaacgaatctatctttcttctttgagataatccttcatattgaacttatttggacatttctaatcttttcatctaacctaaaacgttttattgttcaaaataggacaacattattcatcttcaaatgactttaatccctccgattcattcataccccacctttgtattcaagatatcccaaaaacttttccaaagttatctttgttaatggaaatggttataaacataatcaagtaatgaacaatatgaaaaatcgagtatacacaagagaacatataattaataagatggaaaatatatttaatagtgaaatcaagcataaatagtgggatttgcctttattaaatgcaatatgtggttttataaaatgagtgtttgataatatttacaaatcatgaaggaaaccaatgctatatatttcaaaaacatcattttgcatttctcttgttttatgtttagtcttattttcctagatcaagctctttctaatatgtcacacatatataaatttgattaaataaaggataaatggatcaagtaggtatcatttttgtccttttatataaattagcacataagtagatgtttttcttctatggtatgataaggggagtggatgtaagataatacctaaacaacccgattttgaaaaaaaaaaaaaattgaaattcacttcatttccatttatggttctcctaaatcaatcatcttagaaacaagataaaaaaactccataaaaaaaaaaaaaaagaatctatctttcttctctgagataatccttcatattgaacttatttggacatttctaatctcttcatctaacctaaaacgttctattgttcaaaataggacaacattattcatcttcaaacgactttaatccctccggttcattcataccccacctttgtattcaagatatcccaaaaagtttccaaagttatctttgttaatggaaatagttataaacattaacaagtaatgaataatatgaaaaatcgagtatacacaagataacatataattaataagatgaaaaatatatttaatagtgaaatcaagcataaatagtgggatttgcctttattaaatgcaatatgtggttttataaaatgagtgtttgataatatttacaaatcatgaaggaaaccaatgctatatatttcaaaaacatcattttgcatttctcttattttatgtttagtcttattttcctagatcaagctctttctaatatgtcacacatatataaatttgattaaataaaggataaatggatcgagtaggtatcatttttttccttttatataaattagcacataggtagatgtttttcttctatggtatgataaggggagtggatgtaagataatacctaaacaacccgattttgaaaaaaaaaataaaaattgaaattcacttcatttccatttatgggtctcctaaatcaatcatctcagaaacaagataaaaaaactccataaaaaaaaaaaagaatctatctttcttttcttagataatccttcgtattgaacttatttggacatttctaatcttttcatctaacctaaaacattttattattcaaaataggacaacattattcatcttcaaacaactttaatccctccggttcattcataccccgcctttgtattcaagatatcccaaaaagtttccaaggttatctttgttaatggaaatagttataaatattaacaagtaatgaacaatatgaaaaatcgagtatacacaagataacatataattaataagatggaaaatatatttaatagtgaaatcaagcataaatagtgggatttgcctttattaaatgcaatatgtggttttataaaatgagtgtttgataatatttacaaatcatgaaggaaaccaatgctatatatttcaaaaacatcattttgcatttctcttattttatgtttagtcttattttcctagatcaagctctttctaatatgtcacacatatataaatttgattaaataaaggataaatggatcaagtaggtatcctttttgtccttttatataaattagcacgtaagtagatgtttttcttctatggtatgataaggggagtagatgtaagataatacctaaacaacccgattttgaaaaaaaaaaattgaaattcacttcattccatttatggttctcctaaatcaatcatcttagaaacaagataaaaaaactccataaaaaaaaaaaaagaatctatctttcttctctgagataatccttcatattgaacttatttggacatttctaatcttttcatctaacctaaaacgttttattgttcagaataggacaacattattcatctttaaacgactttaatccctccgattcattcataccccacctttgtattcaagatatcccaaaaagtttccaaggttatctttgttaatggaaatagtaataaacattaacaagtaatgaacaatatgaaaaatcgagtatacacaagataacatataattaataagatgaaaaatatatttaatagtgaaatcaagcttaaatagtgggatttgcctttattaaatgcaatatatggtttttataaaatgagtgtttgataatatttacaaatcatgaaggaaaccaatgctatatatttcaaaaacatcattttgcatttctcttattttatgtttagtcttattttcctagatcaagctctttctaatatgtcacacatatataaatttgataaaataaaggataaatggatcaagtaggtatcatttttgtccttttatataaattagcacataagtagatgtgtttcttctatggtatgataaggggagtcaattctagaggtcattcttattccaacttatcatgattatttatggtcatttttatttttatccaaaagttaataaaataaaattctaaagggtataacttcggggcaaacatgcaagggaatttcccattcccactacactatatttttcatttttcttaaaaaattttaaatgtaaattatattttaaaaaaaatataacttataaataaaatacaatttataatttagtaataaataaatcttcttttatttgtattaaaaatggaaaaaaatttatttaattaaattatttttatttaattatatttataatcaagataggtggagtgaggtaagataatacttgaactcaactgagtttggaaagaaaaaaaaaattgaaattcacttcatacccatttatagttctcctaaatcaatcatcctagaaacaagataaaaaaaaactccacaaaaaaagaagaaaaaaatctatctttattctataagctaactactaattttaataatctttaattatttacaaacaaacaacctaggaaactttcaaaatgaacttatatggacatttctaacattcccaatcaatctaaaactttttattgatcaaaataggacaatattattcattttcgtgtgactttgatcccttgatttcattcatataccacccttacattcaagatatcccaaaaagtttctaagattatctttattaatgaaaatagttataaatattaacaagtaatgaaaaatataaaaaatcgagtatacacgagataacatataattaattaaatgaaaaatatatttaacagttaaatcaagcttaaaatgtggtatttgcctttgttaaatgcaatagatgttatcaatcataaaacgagatttatttcaacatctacacacttgcatctgtcagaagtgcttttcctccactagcatcagacctttaaaggacaatttagtccaacctctcactaactagttcaatgtatttgccttatttcaacctctattgctataaaaatataaccttatagagcttttatcaaaattccaaataagtatctttttaatcaagtgatgaaaatgggataaccatttgacaaaatggtgcaaaatattctggtttatcttgacctgctggtatatgatgtacatagaaaatgggtaaccttatttaagtgcttgtaaataatgggtctaactgatcaaatggtagccaaattgacataatttgttaagcaattatacaataaatcaattaatttaggaatttctttggttttcattatcatgaaaatgaagtgggccgttgaagtcaaggcatcctaagggaaccaaatgatctatgatgcataaagctagctaacattattaacatatagaatgaaggggttgaaagttatacatggactatgataaagatattaatgacttcaatttggctagctacttaggttttggcatgaatgtcacacatttaatattcttattattgatgtgacaagtatgttttacatttctatcataggcatgtttatgccattatattgaaatgaaattagtgagtcattttcatttatttcatttccgggtattaagaattggaatagaaaagtaaatttgtctcacctagtatgaataatctcatttctcacttttaaataatgaatcacttaattgcacaaagtacttacatgatgatagcataatagttattagaaaattctttatttttactatcggtctagaatattttaattaactacatgcaagtttgttttagtaattaatttcaatcaattagtacacatgcaatgagaaatttggctcatttatatcttaaaaaactaaactctatttgttttgaaatttatttaaaataaaatagtattagaaattattggttttgaattattattatttatttttagcaaaatgaatacattatattttttttaataaatgaaataaggaatgagatgtattttctcactcctcattgtcacgtaccaaatattaccttccaatcatggaaaacattcttgagtggaggtttcatgtttctacatcaattcacacccaaattataaatgtatcaaagatgggtggtaatattaataaacatatgcttaattatagaagtattttggagtgatttaaaggttataacgtaaataacaatggtttgataatattagttagtgtgtttattttttattttttatttttatttttactcccttgagtatatttgctttataaatgctcaccataggagggttaataaactcatgtaagggaaccttttaaatctattgacttttggtttttacaaggagacaagtaatgttttatatagatgtacatggctgaaacttagatggaaatctacatagcaggaggatacatgtatggaaatttaatataaataggaatatggttattctataacagttgtgtgattaacctttgacaatcttccttactactgcaacaagcaatgacaactttccttgtcttctttaggagaagaatctcccttaacaaaagaatcttccttaccaccctcctcaagttgaagcgggaatagaagttgactcccaacttatcttaaaagaaagagaatgtcatcaaaggttttgtgaaggtatcaatgggttacgaggatgaagaaatgtattgggtgacaagagtacccataaaaactttctcataaacaaaatggtagtcaattgtgatatgtttagatcaagcatagaacattaggttgatggatatatggaatacacttatcacataacaactaaggagggtgaggaagtgtcgtaccaatgtcttgtagtaagaatgttattcaagtaattttgacaattgtagatgccatggacctatattctccctcaaaactagaacaagcaattgtaggttgcttctttgaacaccataaaatacaatttgccctaaataagacacaaaaaccaatggtgcttctccttgtaattgaacatctagctcaattagcatcactgaagacatataatggactttgtgaaagataatgtaatccaaagtgttaagtgccctttagataccaaaggattcgcttcattgcctataaatgaatcgacgtaggattattgaaatgttgacatacccgatttacagttggcataatgtcaaattttgtaaaggttaaatattgcaagacaccaacaacactatgataatcaatggtgtcaatagaatttatgtcggtagaagtttccttctcttggaggaacattggtgtgactatgggggaactgtgaagcatcttcgttctagtgagaaggtcttgaatttattttgtttgagaaagggaaatcacgactaagttgatgttctttgttgcaaactcatgactaagttgggtaattaaatctgtaataaagggatcattaattattaccaccaacaaaaatgtcatccacatatataaaaagaacaatggtgatattacttgtatgataaatgaacaaagaagagtcggccttggtataatagaatgtgtgagtaaatattgaatttttgatatatatatatatatatattgaaaggggaaaaattattttgaaataatttggcgcatatcatgttaattatatttttgaatcgagtagacttaaagttcgggcaaatggatgttttatatttcagttacaccatggcatatatggctatggtaaaaaataataataataataaaatttaaagtaaaacgtgtgttatgcacacttgatgaaccatggtctgctcttcacttttggagaatctaaaatatgagattggagaattttacaagcttccattggaagagagaatttccaaccatactaattaactgaattccaactgacagaagcattatcccactactaattcaattggattttaaaattaataatgcaaagtataaaatcttattttgaaatgaaaggaagatataaatagaaaaatatgtttagcaatcaaagaataaataaatcactacaaaacaaaagatatttttaaaaaataaaaaaaataaaaatatagaaagtagattaagaagctttcaaaaacaaatttcaaaaatcattttcaaaaaacacttggcaaactactttttagggtccttcctcaagcagttggaatagaactcaatatataaatcaaccctcttgcgagatctaatttgcaaaaggttcagtcacatttaaactatccttttgaaatagggtatgtccccctccataaacataaatatacaaccttcatctagtcatgtaggctaccaagacaacattataacagatttccatatatgagattgatataaagtgggatgacaaatatgataccttataacgccaacattgagttgaaaaccatgagttataatttataaaaccaattgccgtcccatgtttaatggttttaatgtctatattttcttaactaaaatatataacagtaggatttttttgggtcaaggtcaactttagagtgtatgtgattgattgtgttttatccttgtagaatcagttaagggaatcaaatatttagaatttgtttgacagtaattctaaaaagtgtttatatcttttttcttatcttctcacatttttccaatgttttcagaaccgaaccggtgatcgaaccggaaaagttaccggttcacggttcactggtcggatcggcggtcgaaccgctattgaaccggtgacatcataaatatataatttatattttattaaaattaaaaataattataaaatttttaaaatatatatgaataaattaaacatcaataatattattttatatctttgatattatcaaattaaatcatattaatattttaaattttattaaatgaaatatgtgtaatatttaaatgtgaatatataaaaaaatgaaaatttaaactaatttcataatttttaaaaatattatattatttttatttaatattataaaaaaatttaaaatctaatatgtgttgttttgtttggcatattagataataaaatccatgtagccgagtggtgttctatgtggactttagtataggggtggtctaaggttcaaaccttcttggagttttgttatgttttttttctttgatatttagcaatcccacatcggcaagaaagaggaacaaggagtcaaatgactcctataaaagccttcctcagcaaaggcttaagagttaagataggcttgtggactcaaaactcagcccacataaagtggaatgggtatgtgggttgtgggctgtatcataagataggcccaacatcctttagtaaaatctattttaagttccatggaatccttggtaatattttcattttctaatttttttttaaagaaaaattaaaatcttttgaatcggtcggttcgtccggttcaccggttgaaccgtcggttcgaacggtttaaccccggtttgatctcaatccggtctaaatgactggatcggaccggaatggtgatcggccgacggttggactggtccgaccggtccgatccggtttttaaaatgcatttttcttattatggatgcgacaattgtcataatttatcctttcagattaattattatttttcttattgaatgatccttaaattattaatggagtgatatctcccaagttaaccaataaattgttacaagagtaacctaaatgttcttactttgataaaataataataataataataataataataataataataataaatagtaaataaaaataaaaagatcatataccattattgaaaagatcttactttgataaaataaataaataaaaagattattgaaaagaatttaaataataaatcattttcaaatgaatttaacaaaaataaattaaaggagctattaattaaatttatattctatcaaaatgaagtactggcacattatttatcatataacataattaaaacattcatacataaataataaaacatgtattcagtctatataaattctttaatagtttttttcaaacttttaagtgtcttactagccttcattgtaagttaagttcataattttgttccattcatcctattttaggattctacatactttcatgtgatttagactcctttaaaggttcaaagttgttgtaaaatcaattgagattaaacatgaaagtattgttgatttatttgagaataatgatataaaagacttaaagcagacttatagaattagaaataaaattaatttgaaaagaattttaaaaggagaatttaaaaagaaaaatcttttcaaataataaaaataattttaaaaaaacttataagtttagaatttttttttaaaaaaataatccaaatcttttatggaatttgaaaaaaaagttaaattaagaatttaaattttttttttcaaattttttaaatttaaaaaatgaaaattttccaaatctttttaaaattcttaagtttctaaattgactctaggtccattgagttttctcttatatacacctattgggcaaattctctcaagaactaatgcacctaaacttttaggtcattattctttacacttaactctttctcaaaaagtttgtgatttttatacttgggttcatgagatagatttgttgaattgagcccttaaaaaacaagatatgatgtaataaaatcgaacttaattgtccctttactgtcatttttatgcattgacattgatttttacattgtatatgacttaggtatattaggagttataaaaaaaatataagtcatatgttatttgtaaatagataagttgtgcacaatcaattcataaatttgggcaatctattagagattatagtgcaacacctcttaactgaaaaaaaagacttatcttgactatcaggatgagtttctcctagtgagtctactagtatatgtaatgcatactggagagaacctacgatgaattataatataaaactatcaaatgtaatgattcattaagttactatattgtatgaactcttaaccttaaaaggatattaaatctatactgaaatcaacagaagactttgacttatagatgagaccttaaagttgtcatatatccctatgaattaagtcactattgataaagactagtgacaacggatattctcaatagagacatcataatatttcatgagattgagacattgtgtccccttgggtgatctataggatatgcgatcataaaatctatgattgcaataattcatttagtggaatttaacatgtttcttagagttaaagtatgtcagttgattacataataaatgagatttataactcaatgatttgaaaggtagtctcaataagtgataacactatattattagattacaaatattagttcattgaatgtttgcatgtagtggataataggtatatacccaagtttcatctcattgtcatttatataaggtactaaagtgtagttgattatttatagtgtgaaatcttgcatcaacttcataattagattttaagggagttaatactcctatgggtcctagtggtccttactctaagttcatataccatgatgacaaggtttagaagagttggattaactctaggtttattcttgtacataagagtgttttggtaattacacaaagttgcataaggaatagtgaacaagttttctgaaattgactaattgattaattagatgatcatgtgttattaattaatcaattcagacttattttgtgttatattaagtaacccaaactttggtgagttcaagtcatataaattaagaaaattgtataaatactcttttaagagttaaagtttctagtaatatatattgttgtaaacttaatattttatttatataaataataataacaacaattcaagtgtatttaacaaaaatcttaagatatatgattgaaattaaccataataataaatatatatgcattttattgtggtttctattaagtaaataagtcaaatccgtcaaatttcatttttaatgcatttccggattcttatcctagacacttcaataaatttcttaattttgatttatattaggtgctttcattctatttccactccattttgattcctcctgtcttcgacttccaccctgctttcaatagttaaaaaatgccaatctaatcaagggctttattataggaccttgcaaattaaccctccatcaagcgcaaaccctctaaaacttggcatcacagatgacggtatgataatgatatcgtttctggcacacatgattctttttttttttcttttttttttagtcaaaacctgccacatgatttggcaatgaatttgtaaattccgcacgtttatgggaagaagcttagaaaattcatgtctcaactaacgcttaaataggagaaagggacacccatccatcatgcaaccaagacttgctcaagggctaattatgagataagaattaattattattattttattgtctatgatgttataatttaaaataattttgatttgtaatagcaaatttattctagactcgattaatcgataacttcttgtgccaatggaaacgtcatggtaaacatattaatagaagaatataaataaattacatataaagatatacaagattttaacgtgatccgatcaatcatgtttattttaatggatgagagatatcatttcactatacgataaaaaatattataaatgacaaaaataaatacaagtactaggtcttgaaacatcccatattttttacttaactattatattttttgttttcataccataaaacaaatattttgctttagtctacaccattgcggttctcacgtggctttcactgttctttgtaaagtataatttgggtatgtcatttgttgagaattatctaccatttgcttttgatttgtcaaagaacaatagatattcatcaatgtatatgttgttaaataaaaaccattagcattaatttcagcctggtaaacaatattactaatgccaaattcgatgagagagtggtcacttaatatatatatatatatatatattggtaaagtttacatggtttacttttggaaatccaacgtaacaaacactaaacacgggcattgcatttatcataagagcatttaagaaaagttcgaaaaagggctcacacttcacatgttttacagacatggaaaaatattccttgagcgctaagtcttacatttctacaaggaccatcttcatcatagacggccatgacaattaacttgagtgattgatgggatatattttctgattttttgttttccaaattagaaaataatacggtatgcttatataaaaagtataaatttataatttttaaaatttgaggcattgcctttataaaataaatcttataaaactcttctatttctatttttaaaaatagtaaatatatccaaacaacaccttatgcttctcgtaatattttggagtagcctcgaagttataacgtgaataacagtggtttgacacggttcaattgttgttgctgcttttgttttgttttgtttttttccctttttccttttctattttttccccctcccttaagtatatttgctttataaatacccaccttaag

SEQ ID NO: 12454 - DNA, 3463 bp, Vitis vinifera
  Intron number 2 from transcript GSVIVT01034292001 (locus G SVIVG01034292001) derived from phytozome v7.0 (chr-ID chr9 ; pos 14197442 to 14200904 reverse strand)
aacctatcttcctctgccactctcaatcctcgcaggtactaatctaatcacgttgatattattttttttgcaacccccgtttgattcccaagaaaatccatcccccatttgatttccgggaaaattcattctcgtttgatttccgagaaaatccattcaaaacccccaaagaaaaccaaaaaatttgcttttcttttgctccctgtgttttctggatctgttttaagggtttctttgctgttgtgccattgtatttaaatttcacgaaccctaaatccacgatttttgagccagattttgtatcctgtgcgcgggctggactggtaggaaaatatcgggaaattttccgaaaaatcggtaaaaataccgaaatatcggcgatattttcgacgattttttaaaattctcctccggttgctccgcgcgtcagattcactcgcgatttttctccgataaatcggtgcttcaccgatatatcggcgatttttccgattttttgtcgatttttccgtcgatcgataatcggtgacgattatcgtttcggcgcccgtccgatatccgatatttctccgaaatatcggcgacatttctccgaaatatcggcgacatctctcgatttttcaatccctgacttattcttacaaaataatactctcaaagaaatctaacagcataagtttcatttcatttggatgatgataacctagtgcaaaattcaaccaaggcagatttaaaccactggtctttctcaaaattcttggatatttaactcaagcatcttgaccccttgttatttttatatgttagtaaacttaaaacatgagactaacgagttcaatctcacttgattcttagtcaatttagaaaaagagtttggtaaatatcaatagattttcggtagtatgtgctgagacagttttggattctggggattttggcattattttattttgttactagtttataaattattttaattatgattttataagcttatcatgaagtatatttggagagcttagtaacttttggaacttgtttgattagagtggaaaatccaagaaatgagtagtatttgaatatactctatattttgggtaaatttagaatcaaatttgacctagttatcaaattttgaattatctaaatttgtatagtgtctcattagctcaagtttcattcaagttcaactttatttcctagatggttacttttataaattttatagatttcaattttagatgtaatttgaatcgaattagattagcaaggccttagaacctttgtttctatttttactaaatttcaaaatctttcttattcatttaacttttcatttgttctagaagaatccaaagtttaaggaggctcatattgcaaattccattgtagttttttaccaagatttttgttagtagttatacaacatatgtaattttactaaatttttcataaaatgaatatttttacatatgttatatattacttgtttagttttactaataaaatgagatacatgttgaactgttatttagttaatgcatatgtattatgctaagtttgcaaaaatgaatactaatttatcttcaagcgattattgaataccttgtgtatgtttagaatcaatgaaattacatatcttgttatgatattaataaattgttaaacttttggacattgatatttaatggtcatgataacaaatgcacctggggtttcatgcagctatgagttctaatgtcaagctagagggtagagtctaaagtggcagagtatgctctcttatgcctaatgggataagtaggagatgacatccctagtattgtgatttgaggtagtgagactttgaagaccatatagatatggtgcatgtttcttggatagtaggtttatttatagtcaatggtttaactacagtattttcaaacttttcagtacatattttacatctcatataatctttaaattctattattattacattatggtagtttttgtataccaaaattgttatataatatgtttttgactagttttaagtggacttaccatcctaatgcttgaatattgtaacaattcattataccttgtgttcatcccatagattttgatatttttcatgtgaagtcatgtgtctattgaagagagagaatcatctttagagagtaattagatggaaacctagctccaatgtttttccttaccaaaacttttgggagatgtagtgtcatttcctttatgtatttttagttccaatttagttatgctctgcgatgtggcatcctgcaaccattgcttctactagcaatttatctaccagttgttgccgtatcaaaatcatttagtttttattatattcttgctctatattcatttgttgatgcgacattctactttagattgtaattgggagtgtgctcactatttcctagtagactcctttcggagcaggtcattataaatgcccctaaaatataccaacttgtttgccttgcttaaaatccatcattaacctttttttttaatcaaataaaaggctcatttttgtattgttatgcatatcattccaattctattctaaggtttattgtgtttgcaagagaccttgagcaatattatcactaatatagaaatgtaaaaaaaaaaaaggtgaaattttagaaataaatatataaaccttcatttcctctattcgaattccatcaagatgattgttataggcatgataagaagagaggcaatggagaatctcaggggcaccaccatagtcaagagacaacactgtgctcattgtgaaaagaaataactattaaagaaaacccaggaagcaaaatgactcaggcaactcaaaactaagttgtaattgtcatgggaagcaaggatatgttaaagaaaaatgttacaaggtacatgggtaccctctgggccacaagctctacaaaggaccaaagcaacaaaattagtcccttccaaatcaagcatcaaccaaccaagtttttgctatcatgtccatcccttaggcttttcccttcactctagagcaatgccaacaaattttaaccttaataagttctcattcaaactttgtaggtaacacccttccacagtaatctatcaagtattgctttaaatgtcatttcccttccaaactccatttcttggattgttgattatggtgcaactgaacacatagcgtcttctccttcattactttcttttatcacctcacactgctctaaaagtgttcaataaccaaatggttcaaaacaatccataactcacattggaatcatttatttaactttcaatactgttttaaaaaatatgttatgtgtgccaagtttaatgtcaacttatatctgttgcaaaaataatccaagatgccaattgtatgattgtttttttatgttgattcttgtcttatataggaccagtccttgaagaagacaattggagcgggtag

SEQ ID NO: 12455 - DNA, 3621 bp, Vitis vinifera
  Intron number 3 from transcript GSVIVT01037870001 (locus G SVIVG01037870001) derived from phytozome v7.0 (chr-ID chr3 ; pos 6908541 to 6912161)
agagcacgaagggaacaagaactaggtacctttttgtacacaatagagttcctattttattcagagaatattataatttttgcaacaaattgttttttgctgtagtattatcaggaggaattaaaccgataactggagaaaatttttcactaagaaacaagtcatttgttttttgttattgtacatgcatggtttcagttttacatactcctacttggttacttttttatagttaaaatctcttgaaagaaaaatgtctggcacttctctgttgcatgtgttcagctgcacaagtcacatgaatgtgcactttaagttgcttagaaatgaaatacaaggccgtttctcttgagagggaaggagaaaaaaggacatgttctgccaatattttggaggttgttcattccaaacaatttaatagcgcaacatcaactcttggattccatggtgtgtttttttttccttctatatcataatgattagatagcaaaatctcaaccggaattttttttaataagaaaccaaatctcaaacactctcctgaccaactcttttctatcactcataaatttgaaggtaccacagttcacctatatactatccatattctttgttgatgaagcttctttgtccgtattagactttattgattgattgggttctagttaaaggaagggaggtttatttgtgtttaccttatttttcttggttgtttagcgattgtcttatactacttgtatactttgattgcaccctttttgttaggctcttttagttgagtgtttgtttgtcaaaaaatattttaacataccatgtttttggattaaactgacaatttttatgacaaagtgatggactcgagaatttctgcatctattgtctatatccatttaagaactgtcattttggggtattaacatgcactatgtcactgaactgtttattaattaaaaaagaaggataaaattttgttaatcgtagttatgaccttactggaggatttaggaagttgaggatattgctgaaactgcatgagagttatatgatatttgcatttgaacaaaagttggtactagtatgaaaaagttgtaaattttctcatcacttctatgatatttgcatatatggatgtgctttgtgtcatttaaattttaacccttcaaaatggactgcagaattggtattgaatattaggagttctacaaataaaacaattggaacttttgactttacaaagtcatgaattatattttactatttactagagcatgaccagggactgtttttattttattttatttttttctggtaggtaatatgatcagggactattccctctatgaatgcatgaaaagatactgtagcagataccaatttatggagatgctattaagttggtttttttatataaccattatgtccttgatcaaaacataaataatacaacattaaaccagtatcaaacactctgtttttaaacccatagccactcagaatatcccaaatactcttttctttgcaccctcactactctcacatggacatctctctctctcccacaacacactcacacacatagtagaacacactctcttatctgattcccttccaacttatcattctggtatggtgggtcactctcttgttcttttgttttgttgctatggagctccatgttctcacctttttatttttatttattttttaattttttcttagatgatactctataaaatattctatctcaatgctctatctcaactctcttttttgaaggtgggattcagaattcactaaaacatttcctcatagcttaagtttcatttggatacatttcccattttttgtttttaaaaacaaaaatagtaataactttatataaaaagtagagagacccgtataaaaagtatcgactcaccttgtgtccttaaaaatcactttaaaaaatcttgaagtttaacgtagtaaaaattttctaaaacctaaaatttttaaatagtttttagaaatcattatcattttaaagtaagtcttttaagagttttgcattttatacaggagttactcttcttttttgtttttaaaacaaaaaactgaaagtgcatctaaacacccacttaatgttttaatttggcaaattacagacacatattatgagtgcctatcaattaattagggtttttaaattatgcaaattagagatatatattaattaggattctcggacctttttttttcttttaaaatctattcttataaatttattgtatttgagatatgtctcttgataatgttgtgcttggttgataggaaaattgttaaaaggaaaggaaatgaatatattggcttatcagccaaatggagggtccaattgaatatttatttcacaaacacaaatgatgcattcaggaatctaaagccaagatgctagtttcttgccttttactgcatttttcttttcccttttttttcgatagagctttaactacatttttcttatcaaccaattggaaaattagcaagaatatatcccaagcataagtacaacaaatttatgagaatagatttttttttttttttaaaaaaaaaaaaaaaagaaaagaaatgaaaaaaggctcgaaacataatttagtaatgaacccaaattcagaaaccttagtcagaacaataatttataagatttgggtctcacaccatcttgcgctgattatgaatcatatgaaaggaaaattaaatccatattttgtttctctctctctcttgaaacagatgtacaagaaaagatgcaagttaactttttttttgtttcaaacaaaatataaaacattacgtaaaatttaatttacttgtttgtcattcataagtgattttatataatgaccaactctatatactgggttagggtaggatgggtctacaaatcccattttcccacagtaccttcaagtttgaccctaggatgggaaattatttagatcatggatgtagggttcagataagggtccgtcacattgacattcctaaagtgaaagaatgatacagagaaagagatgacatccaaaagcaaagagggttcataagggcatgtctaggatattaggagtgctcatggatttgggtgtttggtatggatttaggatttgagtgctggtttatcttttagagttgagggcaaaactgctaaattaaaagccactgaaaatggaatttgtagaacttgaatattttctaaagaggcttttcatgccatcttaaataaaataaatagttccctaacacaccctagtaaatggagaaatttttttgttactcaactttttggtgcatggaatcaaacttggatttttctccacaactcaaccctaactccttttccatctgagccaaggctagagaatatggtttatacccttgtattccctcatgtaccaggtccacaatatgatcaataaaattcctctctagattttacataggagttgattgatgatagtactcttattttcaatttcattgtttgtttgtaaattgcatgtgcaacatattattattcttctttctcagcttattctttcattggcaacagttcaggtacatttattagtgcatcagaagacaaaa

SEQ ID NO: 12456 - DNA, 3860 bp, Vitis vinifera
  Intron number 2 from transcript GSVIVT01009863001 (locus G SVIVG01009863001) derived from phytozome v7.0 (chr-ID chr1 8; pos 11910138 to 11913997)
tcgtttacggaagcttgaagctcaaggttctcaaggtatgctttcatcggttactgaaaaaaccatctagagtttgttgtgtgttcacatatgatcacgccttctgatcagatttactaatgcttggttatggccttaatcctcattggtcatttctatttcattgtcactgttgtttgtctggcgtcgatttttcttccctcctagttttgtgtctgtcacataattttactcttctaaccatagaaaatttcattttttttagagaattcttaagcccaaactggaatagctttttgtttctggctttagcaacaagctgaagtgaaatccaaagccatcatttttgaagggcaatttctagtattataaaaatatgaaatagatttctacttacgccaaaatagcttacaagagaagcagtatttcccaaatttccatgttaaggctttttttttttttttttaaagtcatatgctctttgaacaaaatctcccgagcacttctattaagcttaaaaagatcatttggcttctcaaaaaccaacccaaacaagctatcagttgtgtttgggacttggaaggattttaattagatgaatacctgcatgtggagtctcccttggtaggtgatagtcattgtaacctgaaaaggcaccactctcacccaagatttagtagatttatttattcccttggtacttgatagttttccctttgatccgtgattcaagatactggaaagaagaataagagaaggaaatagattttgaatcttatggttgattctgttttggtttctgaaacatgaaaagataacctcaaacacaccaagtagttgtatctggcatggtttttttttataggtagttgtatttggcatggttgaatcgtgattattgttcattggatcccaaacaatgaaatctaaggttcatcaatttaatatttatttcctacttcacttagacaccaagcagagcactaggattgttggattgaaggaagaaagatggtgtggatcaactcaaatttttaagggtggcgttactgccagatctgtttttgttgcttccatggtttctccacatgtgacaattcaatgagttatttgtattttccatggaagcaaccaaatagctctggcaataacattgtccttgcattttcttttggatttgatgatactctagatgacatttggaagatatttttgttgtgagtagactaaatttaacaaaatccgtgatttccaatgagtttgcatgaaatatagccatcaagagaatgaaatggtgactttcatgcaatcattcctttagtggcaagagtaactatgccatgattgctgatcataatattagaaaactgctgattggtgctgacatgggatggaagtacacacctattttcatatttcactacagtcgtgataaaattacctaaacagctttccatggttactccatgttactcttagcaccacttttactacccatggtgtaaaaaggcttaactcacaagctgcacttaagatgcaaaactttcttgagacttagacgccccagggaacatgcctaaccaaaatgaagtgcaacctagggtgcatgtcaattttctaaatattatccaaaatttgatacaaaaaattccaaattccaaatatttagaaaaaacatccaacaaaaattaatgaaatataaaatttaagattcagtaaaaaggtttaaaataaaaataaaaatgagacatgtctctccaacaaggcgcacacctttgaaggtgaggcactatgactatggagttgttgcatcttggacataactatgttgctacctgctgttttaagttttaagtaaatctagacaatgacattggctagattgtaggttacatggatttttaattctgttttgattaaagctgtctgtatcccttctttattgtgacttaagaaaattacttcctaatatggtatcatctgacctccacaccttgagtacttaagagggtgggtacagccaagctaattggtcagaccatgtggacataaaactcatggttttagacgtgtaagatttacattagattagtggcttgtatagttaaaacgtatgctataatattctaggtcatttaaagtgtcaagctgtaatattttttcataaagagcttagatagctggaactagtccaagaggatggtgaagtccacggaaaaagcacctggtttgaaggagtcacactggattttctgcttcatatcctaatatcctaaataaggttgaaaaaaaattagtaaaagcagtgaaaatagctgaaattttaggactttggacatcctgatatgaatatgtgtgtgtagttgagattgtgggttttgtggggggggtggtttggtttggggtttgtttgtttgctgattatttggtcaaatttcattctatgagaaatataatggaaaagggtaaaattttcaataaagaatctgggcctttgaatttgaggatgtcaagtggatttttgtattgatgtaacatctaataccatttattaattctatatgtgatttttcttttctttttccttattaatcatgtagttttaattaaaagtgccctctactgttaaccgagtaaaatcttattatttaaacaaattaaacaaaaattatagtcaaaatggacaaggatttttataggagtgaagttagatctaaggtgttggaaataagggtgaagatgtaattttgattaaagatgtgaagagaagagtatgaaaagagtgttatgattttaaggtttatacgagggactccttcagttgatgaattgctattgacatggtaatttttggcttatgtgtcattttactcttacaacttaaaattttttcttattattcaacaagaggtcataaatgtaatttatattggctaatcttctctcactattattaagctcaattggaatttgatgtgtaaataaaagatgaaaagagtaacagaaccacatttccttggtatagttttgggtaaggagatatcatatttatatgttctcttgattagagtttgtaatgatttcttatctgtcgcatatacttcaaaatcctgattaatgaattttatatctgattaaaaaaaaaaagaaaaagaaaatctcatcatgaaataaatgtattttaatccttcaccatggcattttggcattcttgctgggatttcaccaaagcagagattatggctttctttggagaattctattgtcttggcacgttctagaggagcctaaactccaattttctggttttgattccaaaaaaagggggtgcggaagagttggaagactttagacagatcagtttggttgggggactgtacaaactgcttgccaaagttttggcaaataggctgaagttagttgtgggggaggtggtttcagagaaccaggatgcctttattcagggcaaacaggtcctagacgctgtgctcatttctagtgaggctgtggattctagattaaagaacaataaccctggtcttcttctaaaattggacattgagaaggctcatgaccatgtcaactgggaatgccttctttctgttatatctaatatgagatttgggtaagggtggattcgttgggtcaggtggtgcattttcaccacttctaggtgtttctaatacaagcttgtttttacctgtcaaaaaaaaaaatcctttcgaactgaaaagttaaagagtaacccatatttttttaatcatttttatcccactataccctgtcacacttttctccaattttaaaacatttctatttttgcagataaaaagagagagaaaatctcatctttgcataag

SEQ ID NO: 12457 - DNA, 1887 bp, Vitis vinifera
  Intron number 3 from transcript GSVIVT01015540001 (locus G SVIVG01015540001) derived from phytozome v7.0 (chr-ID chr1 1; pos 4677928 to 4679814 reverse strand)
gtgaaggtacccgttgcatgtagtacgtactattatatatgcattcatgaattaagtttagggtttccaatttgatccaatttccatgggtttattatcattatgttcaacaaatagaaaagagaaacagaatgaatttaatttggggtctacctatatatatatatatatatatagaaaatgtagcaggagaagtagtatactagctagtgaacaaggataccagcatatcattttgcttatataatagaattaatggacattaattgaactttataattaattattattaaatcattttcttatatatatacatatatgacctttttttaaaaataattgttagatttcttattgggtaaataaatattattaatcattattatttttaatgtactattattcattttgaacaaaaacattattatgtcttttaataataataataataaggatacattattaaaagaaaaaagaaaaaaaagaagctacaaattttaaatccgggaattacaaattttaaactatgattggcgagttttagttttttttttaaaaaaaataaaaataaaaataaaaacaaaaatatctaacaaaatttaagagtttggagaaaggaaaactagagagaaagatgaggagagaaaaaacatagtgagaaagatgaagatataaaagagagcaaaaacaaagagataaacctctagatttcaccattgattatttttacgagtaaaatttaaggtaagtctttcaagtagtttagtataggtttttttagattttttttaattttttttaaagataaatatattatactatcgttcaaatattttctaggttagatgtagaaaaaaaattcgtatagttcatctaatcaatatagagtgaggaagtcagggaaaaaaaaaaaagattttaataaaaaaaatagtgatagtacattgaatgtggtccctaaataaacctcggacaaaaattaagtccacatattattatttgggagaaatttatatataataaaattctaaaataaacgtaagtatttagtttgaaggaaaattctataaatttaagaagtgatattttgtgaaaaaaaaatataagtataaataaaaataaataaaaataatattttatttgttcaataaaaaaaatgcaatgtagaatggatattcaatgtgaataaaatatgaataataaagaaaaataaatagggaaaataaaatatgaattgtacaatagagaaaaaaatatattaattagtatagttggaaaaaaaaattatatgttgatattgtacgcaggataatgtatgaagaataaataaataaattattaaatataaaattaatcataataactaaaagcatgtgatataaaattatttttaggataaaataggcttgtattaataatattcaatttatttatttaggtaaattctaagtttaatcaacttctttgctcgattcaacttttttgcataattatagttctaaaatattttttgaaatgttaattttttgaaagggtaagaaaatattttatttatattgtgaaaaacatcattttttttgtcttatgtagccttgggcaacgggggttgtattgttgatcatcaatgcctagttgtattaagattagaaaacttagttaatggggtagtcattgaccagatagtaccatttgattggctagtcccttctgaattaaagaataatctatcactaaagatcctactagtttgggaaaagaaaatttatttatagtctatatgtttgaaagttaagttgtgctatactgctatgtcacttttatttttataacagtattgttagtatattcatttactgactcgaaactcaccacctttcaggtacccaa

SEQ ID NO: 12458 - DNA, 13423 bp, Vitis vinifera
  Intron number 6 from transcript GSVIVT01036006001 (locus G SVIVG01036006001) derived from phytozome v7.0 (chr-ID chr4 ; pos 7061816 to 7075238)
gcggcgttccccagttagcaaagaagttaaatcaggtatttctattcccatttacatgtgtacatgggttgcaccccccttttcttggcgcctgttaatcaatttagtacatatcaaaaggtttttttttttttttttttcacttgcattaagtgcaatttttttgctatgagactcaaaaattaaatatgaaaatgatggttgtgtgtcaaatgcaataataggtgtgcaataggaatgtaaaataataaagtgtcaagtgcattttttgtgtcaattgtaaagcaacatcgatcatattcccattaagtattaatgtccaatttacaaaaggatggctaacttgatcattaggcttcatttggaccacgaaaagtttgaatgataatggaaagaaaataaagaagaaagagggagggaaaaagtgagttaaaaataagttagagtacacatagtgaaagtatacacctttttatggagattaagggcagacaaaatcttgatgcatttttagtagtctatgaagtgatagataagaaatggtgtgtaggagaagaaaaggttgtctttaagattgattttcaaaaaacttatgatcatgtggagtgagatttagcaaacgtattttaaagtctttttgcaatgaactctttaaaatgtggttttgcgggaagaaggttttgtgaagtggaaagaaaagagttttaaaggcattcattgggagaaactgaagaacgctctatacgggttgaaatagtctccaagggcatggtttgaaaggtttgctaaagtgatgaaaaacatgggatacaaataaagtcaaggagatcatacattgttcatcaaacatttagatttagggagagttataacttttctagtatatatagacgacatcatcatgacgggatctgatgaaaaggagagactgactttgaggcaatgcttgaccaatgaatttgaaattaaagagttgggaaggttgaaatatttcataggaatcaaagttacacattctaactagggaagttttatttctcactagaaatatgtaaggaacctcctcagggaaacaagaaagttggtgtgtaaactaggaaacacaccaatagatccttattataagctttgagatgttgaggaagatgttctagtaagaggagagatgtatcaacgtttggtaggaagactcatttatctctctcacataagactagatataacatatgctggaagtgtgattagtcagttcatacatagccaaaagaggttcatttgcaagatgctaactgagtgctataatatcttaaagagtctttaggaaaggacatcctatttgaacgaaacttaggtctagtacttgaagtatacacaaatgttgattatgctggatctgtggttgatagaagatcaaccatcgggtattgcacctttcttaatgggaatttggtaacatggagaaataagaaatagagtttgtggcaaggtccagtgcaaaaatggaatttcgcgcaatgacccaaagagtttgtgaactattatggttgaagatcatttggaagatttgaaaattaagtgggatggaccaatgaaactctattgtgacaataaatctgcaattagtattagacataatccaatacaatatgatcgaatgaaacacatagagataaacaaacattttattaaggagaaactagatagtggattgatccgtactcctttatgtatctactgactgccaacttgctgatatacttacaaaaggtttaagcactacaaagtttcaagcaagcgtatccaagttgggaatagaaaccatctattcaccaacttgagggggagtgtggaagaatgaaattagaaaagtcgtgattttgtaactgatgagagaattaggcaatcctgtaatcaaagggatttggtatagttaaggaaaagaatttcataccttgtattcctttatctctcttcttctatagtttattttggaaaggcttgatgtgatgaggataatttattaaaggaaatgaagttgtagatgccatgcttggtacatttcttgagtcctttcctaaaagcaagaggtatagacaaatcctcaaaggttggtaggtaagtggtagtcttttgagtgtgttctctttgtttcttagaagatgatgaagaaaaattaagggtaaagttcagtacttgttggtggtttagagtcttggacttgcactagataggaaggcaacagtctcttttttgaataaactcacaatggtagtgtgtgccaaccctctcttactcattttctggaggcaagttaatggttgttttaggaatattgactagtggtggagggccactagtcagaacaacaataggaggacttggtatagcgggttttgggttcttgttggtatcttgaagagtaggtagatcaagggacacatttaagttccccttgtcttctagtaatgactccccctaaagatgaggggtaggaaagaaaaaaggctttctacaaaagtaacatccatggatacaaacatcttttttaaggttaaatggtaacatttatatcccctattagttggggaataaaaataataataataaaaaaaaaataaacaacacttatgagctcgaggatttactacaatgatcggtaggaacatgtataaaacaatgacaaccaaatacctttggatgaatttgaattaaattttgaaattggggaaaaacccagaaaaaaacaacaactgaagttttgttgcctaaagttctacaaatgtaattgattgattgagcatgttgcatttagaattgcttcccttgggaatacctttggaacatttttctggaacaacaaggcttgagttactttaaggagatgacggtgttttctttcaataaccccattttgttgtggggtgtcaatataggaagattgataaacaatccttacttttttgaagaaagggtgaccagatttggttaaaatactctcttccattgttagatcttatacttttgatctgaacttcgaattgattactaatcattttatgaatgctggaaacacaactcatattagatttattttttagaaggaatatctatgtaattctagagcaatcatcaacaaaagaaaaaaaaccaatgaggcctattaacattaggaatgcgagaagaattaaagtaaaaagagtaaaagatgttatatttgtcaatggagaagaaacatgatggtgtttggccaattgatacacttcacaattaaagtaattagcatccacactcttaaataacaaaggaaacattgtttttaatattgaaaatgaaggatgtcctgcatgaaggtgatgtactcaaatatcagctttattgaataaaaatttcttgaaaagatgagtcaaaaggagatgatattactgccattatccatttcaaggagacaatattacttcttttccttaccatgcccaatcattctctttgtgacctggtcctgaaatatgcaataacttggaaaaaatggtcacactacagttaaggtcttttgtaatatggtgaatttataaaagattaactaatagcttaggaacatgtaacatagattttagtgaaagagattaggttaagtcaattgatccttgatcagccatggtggctaatttctcattgtctattttgattttttggtttttggggctaaggctatatgaagtgaattgtatgagaggagtttgtcatatggtttgttgcacctaggtcaattgctcaagcaccaaaagaagtccttagaggcacagaaggcatgagatggagaatacttacttgattgtgccaaggaacaatggacattaggcttatcaaatgatgtaactagaccttggagttgctcaatctcttccattctatattgtgttacaaattacattctactggtgggaattgcctttagaatgagcaatattggcttgtttaccttgttgtccaaattgagcattgaggttcccattgttcctatcgaaggactatggtttcccatgcagtttcccagcaattctccttagtatgccttggattcttgcaataattacacaaaaggttgtccttattactcggtggccttggttgttcactccttccaacttcagttgtcactccaatacctaaattagattggccaacatttggtttcgtagtggcaaaacttgagccttccatgttaagggaatcaagcataacaattcttcttccttcttcagcctcatgattgaaaaaaccttattcaatgacgctagtgattcccaccaagaactggaccctcacttgatcatattccacattaagattagtaaggaattaaaaaatcctctctttcaacaaatttttgcatcattgttgcatcatcactgcacttcatttaaaaatcctgataataatctaattcgagccacaaacttttcattgtgttgtgatactcaataaaggataaattgattcttggtggctgtaatttttggtctttatctcataaatctgagaagcatcttacactttggaataggtttgtttgacaacctcccatatcttccttgttgttgtgaggaacatacacgtctcacttatttatgattgtattgaattccaaagccaagacatgatcattgaatccttcttatcccaagctgcaattttagaataatgttcactgggcatagggcttattaggtgacttagctttcctttgctctttagaatggtcctcacaagttgtgaccaagccaggtacttgcagtcattgaacctaaaggaggcttgcacattctggcattctttagctgaatgttgggtggctttgatattgagatcaacattggttttgattgcatgggcgattttagaggttgcaaacattttggatgggaagggtggaggaattattattttttttataaaaaaaacaggtttgaattaaagggaatgataaagaatatttagcaataaggctaaggagcttttttgctagcaatgacgaccttgcaattctttttttttttttttttgtggcaattaaggcaaaaaaagaaaaaaaaaaaaagaaaaagaaaaaaaggaaaaagcctagagctctaaaaccatgtggaaaaattgaactgaatttttactatgtgcattgcctaggatgcaaggtatatacatgtcgagttataaataggttgtaattgagctgtaaatagaataggagaattattttcctattatgttagtttcctatttctataaatagatagttttatgatttaggaataagttagtttcctattatgtctcttgtttcctatttcttctattgtaatctcctatataaactgtgtgtatagtcaatctaaaaaatagaacttattatttttcatcccatatttcatgtcatggtatcagagcagcaggtttttaaaacctgggcatcattctggccttcatcgccattttttctggccttcatagctgaattttttttttattcacgtgatcttttaccagtcttcattgttgctgttctttttttttttttttttttgtttcgcgatctgccttaattcccaagagaacaagttttttcgtggaagatgtcggaggttgcagagacgactactacagcacaatcgaaggagattgttcgatctcaacaacccgaggaattgcaaaacatttaggttgcgtataggctggatgaaaaaaattaccttaaatggtctcaacttgttcacactgtgctgaaaggaaaagggaagatcgtccattttatgggtacagggccgaaactaggagatccctgttttgaagcatgggatgaagaagattctatgataatggcatggttgtggaattctataactcctaagattagcgacacatgtatgttcttggctacggctaaggatatttgggacgcaatccaacaaacgtattcaaaagctagagatgcgactcaagtatatgaggttaaggtgaagacaattgctgtaaaacagggaagtaaaacagttattgaatatgccaatcaattgaaagctttgtggcaagaaattggtcattatagggtgataaaaaccaaatgtcctgaggatgccgttgttctaaaggatttcattgaacaagatagagtctatgattttcttgttgggcttaacccagaatttgatcaagtgagaatccagattcttggcaagcaggaggttccacgctttaatgaggtggtggcactgatttgaggcgaggaaagctgaaggagtgttatgcttgaaccacaaaccttggatggatcaaccctagttgcaaaaacagaatattcagagcaaggaaagaatgatctgcctaaacacttaggtagagacaatcagtggaaggagaacaaggacaatctctggtgcaccttttgcaagaaaccaaggcacacaaaagagaagtgttggaagctgaatggtaaaccaccaagtcgtgaatggggaaaccgtggagggcaacaaaggcctcaagcacacatggtagagcaacccaaaattgaggaaaattcagcaacaggcgggttcaatagtgaagaaatggagaagctgagaagcttgttgggatcccttgacaaacctactggaacttgttctttggctctttcaggtacaccttcactctctttttgcataaatgcctcacacagagtttatgatgactcttggataatagactctggtgccacataccatatgacctccaaatctcaacttttccatacctataccccaagcccaactaacaagaaaattgcagtggccagtgactctttagctaccgttgcaggtttcagagacatgtacatcacacctacccttattcttaaaaatgtcctccatgtaccaaaattgttggccaaccttgtttccattcaaaagcttacccatgatcttaaatgttatgctatttttttcccttcttattgtgtttttcaggaacaaggctcggggaggatgattggacttgctaaggataggagcggtctttaccaccttgaatcatctaaaaaaactagtaataatttgtcgttatcttttctcagttcctcaaataaagataccatttggttgtatcacctacttctaggtcatccatcttttagggttttaaaggtcatgtttcctcatttgttccaagaattagatatttctaagtttcattgcgaaacttgtgaattggcaaaacatactcatgtatcttttcctattagcaataaaagaagttctcatcattttcatttgattcatagtgacatatggggtccttcgaccatacctaatgtttctggggctcgttggtttgtatccttaattgatgactccactcgggttacatgaatctttcttcttaaacaaaaatctgatgttagcattgttatacctaatttccactcaatgattcaaaactaatttgaggttaaaataaaaagctttaggatagacaatgttagagattactttaaccagattttatcaccctattttcaatcatagggcattctccattactcatcatgtgttaacataccccaacaaaatggggtagccgagaggaaaaatgggcatttactcaacacaacccgagccttactctttcaagggaatgttcctaagtcctattggggggaagctgttcttactgccacatacatgataaatagaattccctcacgagcgttagacaacaaaagccccgtagagatacttgagagtttctatccacacttcagaacctcaaatgggctcactcctagggtatttgggtgcactgcatttgttcatgtccacaatcaacataaagacaagctagacccccgagccataaaatgtgttttccttggttactcatccactcaaaaaggatacaagtgttacaattccttagccagaaaattttacatctctgcagatgtcaccttcacagaaaataaactttttttttcccaagtcctttcttcagggggagatttcaatgatggaagatagtccttgtgagtcatttgaatctcttgacctttcttatgtctcaacacatggtgataaagaacttgagtcatcccctgttccagccagtgtcacttgcaattttctacaatttcctaagttgtattcaagggaaaaggtcattccaaaacaaaagcaggtccaagaatccaactcaaaccctgggaatgaaatcatggaaagatcagacccacctttgcatacacaacctggtgaaacttccattgactcaacaggcaacctaaacctagaccttcccattgctgtcagaaaaggcaccagagaatgcactaaccgaccactctatccactatcacactatgtgtctcttaaacacctatcaccagcccacaagaatttcattgtgagtctaaacaccactatcatccttaacattatttctgaggcattgacaaaaagggaatgaaaagatgttatgagagaggagatgagtgcattaaaagggataaaacatgagagattgttgaaagaccgaaagggaaaaacattgttgattgcaagtggattttcacactgaaatataaggttaattgatctcttgagagatataaaacaagattggtatccaaatggtacactcaaacttatggagttgattatcaggagacttttgctccagttgcaaaaataaatactgtaagaatcttgctgtcactggctgcccactacaagtggcaactcctacagtatgatgttaagaatgcatttcttcatggtgatttagacgaagagatttacatgaacatcctatcgggatttgagggaaacacaggtgacaaggtgtgcaagctgaaaaaggccctttataggctaaaacaatctcctagggcttggtttgggagatttgcaaaagtcatgaaagagtctgagtacaaacaaagccaaggtgaccacactctcttcattaagcactcgactgcaaggggagtaactgctcttctagtctatgttgacgacatcatagtgactggaaatgatgagagagaaaaatatgaagtgaaacagagattagcaacagagtttgagataaaggaactaggaaaactgaagtacttcctcgatattgaggtgacatattccacacaagggatcttcatctctcaacaaaagtgtgtaactgatttattgtcagaaatatggaagattgggtgtaaaccagtctttaccccaatggatccaaaccacaagttgggagaagctaaagaagaaccagtggtggataaaagaatgtactagaggttggttggtagactaatatacattgctcacactcggctagacatcgcctacttggtgaacatgatcaatcaattcatgcatgatccaagagaacctcatcttcaagctgcttatagggtgttgcattacttaaaaggtaaccccgggaaaggaattttgttcaagaagaacaataatcttgctctagaagaacaatactcttgctctagaagcatacatcgacgttgactatgtaggttccctagtggatcgaagatcaactacagggcattttacttttcttggaggtaatttggtaacatggagaagtaaaaaacagaatgtggtagcaaggtcgtctgcaaaatcagagtttaggcacattgctcaagggttgtgtgaactactttggctgaagattattctagatgatttgagaatcaagtggaatggtcctatgaagctctattgtgacaacaagtcagctatcaatattgctcataaccctatacaacacgatatgacaaaacatattgagattgataggcatttcatcaaagaaaaattggaggaaggagtagtgtgtatgttctacgttccatcagaacatcaattagctaatatcctaagaaaagggttgagcagttcaatgtttcacgatcttgtattcaagctgggaatggaagacatctattcctcaacttgagggggagtgtcgagctgtaaataggttgtaattgagctgtaaatagaataagggaattattttcctattatgttagtttcccatttctgtaaatagatagttttatgatttaggaataagttagtttcctattatgtctcttgttttctatttcttctcttgtaatctcctatataaattgtgtgtatagtcaatctaaaaaatagaacttattatttttcatctcatatttcgtgtcaatacatacaaaagcaactaaactataggcaaaattacaacacaattatagtatattattaaagttatacaaaggaattacaattaaggaatattacactatgcggttggaaattaatcaaactaattaaggaacgattcaacatataaatcagggagaaatgagctctttaatctatcaatcaacgtgtgtgtacaacctatatgggtttgtcgataaagggtttgggtataggtaagatatcctttagaaatagagctttcttaggaaagtatttgtgaaggtttagggaaacaacactttaagacacaaagtcattttaagtatctatgggccacattctaatgaatgggaggccaacattattgttaggtagttgcactatcggccttggaaggctattgctcaaatcttctttagttttgctcctttcactcgattttcagtgagtaatggtttgaagatctactttatggaagatacttgatgtggttatttaccttttcatcttcaataccaaaaactctatcttggaaacttaaatttcaccaaaacctctcagattatgaaatcgatgaattagccctcatgtcttttgtagctttagtgtatttattagcttagtatctcgatgctcgggtttggtctttaacctcctcgggtttgttcttagttcattcttttaagcactttctcaatcgtctactccttttactttagctaattctctttggaaatctaaagcttctcccaaagtaaagtttttcacatggtttatggctagtaggaggttaatgacaataatatgctctaaaagtggagactttttgacggtcttaaaatccgtagtggtgtgttatgtgtaagaagagtgaaaaatcgactaatcatcttttccttcattgcccaatcactttaggttcctcactaggattgattggttcccaccttgtaggtagcaaagatgataactattttttttagaggctatggggatcatcctagagggaaagttctatggagtattgttagtctcaatttaatttggatgatacggaaagaaagaactatgaagattctttaagatgtttggaagaaaacatattaaatctttgatgctaaagtcttcataggtactcctttgagccttatattattagatttatggtcattgccacctgaaggttttgtcaagatgaattttgatggatattcttaaggtttttctagagcaacttggaattggagtgatcagagatcactgtagtacaatgataaagatttgctctaaacttacaggtgatagttttgctattaaggttgggattctagctatgttaaagggcctcatgtaggaaaaagctttggggttttttaatcttgtattggagggagattttggtgtggtcatttcataagtgactaaaaaggaaagaggcttacaaaggtttgacgggtggctgtgctaagttttgatattggcatagagttagggtgctccttttctttggttcctcacttagccaatccagtggtggaccttttagccaaaatagaagccgagtgtttagtgtcttttgttgggaaattttttcttccttgaattgtaattggtgtttgttattgtcaaaaaatttgattgaagatactagagaattaactcccggatttatgagatttaattaaaaatactagagaattaattccctaatatatgggattgtatagttgtataattctttgatttttgagattatatagttgtatatttcctattttatttgtagatgatttataggaattagtcaactttttgattttatgtagtttagttttctaattttttgtagtattgtacactagaattgttgtatcattttgtcagaaatgcaatgaataaattttttttttccacatggtattagattttgttcaaggtctttaagagtgcgtttggtaaaacttaatacttaatgcttaattccttagaatacctttaaacaaaattatgattaagttattaagtcatattaagttattaagttgatttaccaaaatcatttttagtttcaaattgtaatattaagttaccttaccaaacatgcttaatatgcttaataacttaaattaagtcatcgagtcatgttaagtcaataagttgattgctaaattctcttctaattttttcccagtggtcttcattatcatcaatttttagtggccttcattgttgctattctctgccttagcagccttatttgctgtcaccattttttccttcccaacaaacttctttacagtgatatgtctctattttgctgtccactaagttgaaaatctcaaaaaatatgaccataagcattgcattccaaaaccaatcacccatcggtctatatcaaaacctttagctgttattcagacttaatggtccaatctatctggtattgtctcaacatatgtgcatgttcctaaagggtacatgggttctttctcagagggtcaaagacatccttctagggtctcatgggagctttatggaataggagaaagtttgtatggaagatgaccgtttttctttttctagattacctgaaaagagagagacaaaaaaatatttgatggtttggtttgtttaatttaggtggtgaaagatgtattcttgaagtctttgctttcttggttgaattgtgttggagagttttctgacattaccctttttgactttgttgctaattttggggatggggcaggcatgggtgggatttcttggcttctcattgttttcctttagccttggtgcaacttgtgtactccttgtgtgattgggttgcactcagtttttatatgcacttttgttcatttatgtcatcttagtttgcctgtcaaaaggaaaaaaaataaaaataaacctttggtacaattatagcttttttgacggttgatgtcttttctctgacaccaagggaggagggagagggacactttggaacagtttcaatgttataaactaaacaatggaacttgaaaaggattgggaaaaagattataacaaaatcatggaaagagtttgggaagttcttaaggaataatgtgatctaattctgtacattattatttacttctgtctttattctttttcctctgtttcagattctggagcaccacattaga

SEQ ID NO: 12459 - DNA, 9226 bp, Vitis vinifera
  Intron number 10 from transcript GSVIVT01029407001 (locus GSVIVG01029407001) derived from phytozome v7.0 (chr-ID chr 17; pos 16530718 to 16539943 reverse strand)
aaatacgacgccatctcttcaaatttatcaagaatgtgagcttcaattatgaatatcagaattattttattttattttttgaaattattacatgtttaatgattgcataatttatactttgtagtttacatccatgaagctcaatatcccagtttaaaacaccttttttcactaaggcaatagcaatctattaattaatcatttttcttttctccttgtcatcatggtttattactgtaggcaactcatgtaaccttcttgaatagacatcaattaatatatagagtagatggaatgggcaactctttatgctacatattttagttatactttacaataaaattatatgtcattattattccatgctgaatagtggggaatttttacaaagcatttgaacaatgataaaatattttacataataaaaatcaaacctcctctgcactaatcccaaaagaagatttagtacaagcttcacattttcatattattgatttattattaatatatttatattgttggaaatttagtttggttagactagttcaaattggactcaaattttagaatggataggttccttgatttgaggaattatttgaattctagtttttttgtacatagtcaaagtttattcagattaggattagaatcagatttgtttttcagtttccttatttttcgcctaggaatcatctatctgctggttatttaaacggatgtagcctatgttatgaaagatagagcaaaaaaataatagtttatccaaaaaaacctttcacggttttatggtatcagagccagagacaaaaaaatggagagtagaaggatggtgaagactactatgactggcgcaattcatagggaggaatctgatcacctgggacttcacagctacaatttccaacaacaaatccgggtagtacaaagaatccaaccctacaaattacgatccataaattaaatggacgtaattttcttcaatggtcgcaatcagtgaagttgttcatcagaggaaaaggaaagttgggttatctcacaagtgctaacaaagcacccaatccaaaaaatcctgcgtaccaaacctgggattctgagaactcaatggtaatggctgggttaatcaaatccatggaggcagctgttgtgcagacctatctcttttttcctactgccaaggacctgtgggatgcagtccaagagacttattcagatctaggtaatgctgctcaaaggtttgaaattaagactaagttgaaagatattaaacaaggtagttatagtgttacacaatactataatacccttcaaaatgcatggcaagaacttgatttattctctcatatggagtggaagtgtgttgaagacagtgcctattattgcaagattcttgaaaaagaaagggcatttgattttttggcaggactcaataaggaactcgatgaggttcgaggctgaatcctaggaaaagagttgctgccatctataagggagatcttctttgaggtgcaacgggaagagagtaggcaaaaagtgatgttgggagaacaacaatccagccaatctaagatttctgccctggttattcatggtggggagacctttcaaccaaatgaccagcgactaggaaaaaggggtgatcgtccttggtgtgaccactgtcgaaaatgaggccacacaagagatacatgctggaaaatccacggaaagccgcctattgggagaaacctgagactcaaccgcaattccaaagcctaccatagtgaatccaagaaccttaacaaccaaacaaccacttcaccattcaccaaggagcagttagaggtcttgaaacatctccttaatccacaaatggcatccacttctgtctcaagttcaccaaatgttgatccctcaccatcttgctctctagcacaatcaggtagaactcaatacccatttagtgccttagccaattcttataaaccgtggatcattgattccggagctacagatcacatgacagggtcatctacttcatttacaacatatgtaccatgtgttggtaatatgaaagtctgaattgtggatgggtcatataccccagtcgctggaaaaggaaccatctccttgacaaaaactttttctcttgaatcaatcttacatgtcccaaatttgtcgtgtaatttcttgtccattagtaaactcactagagatctcaattgtgtagctaaattttcttctactggtgttgttttttaggtcttagcttcggggaggacaattggtagtgcatgtgagtgtgaaggtttataccgctttgatgaccgtgaagttgtgcaaggacaagccgctggtgcttgtagcaatgttttatcttttccttttgatcatgaaataatgttatggcactatagattgggccaccctagctttccatatcttaggttcttgtttccaaaacttttcaaaaataaaaggctatccaattttcaatgtgaagtgtgtcaaatggcaaagcctaccggatcagtatttcctgctaaaccttacaggtcctctaaaccttttactctcatacatagtgatctttggggaccatctcaggtaacaaatctaattggtgcaaaatggttcattaccttcatcgatgatcattcaagaatttgttaggtttacctccttaaagaaaaatctcaagtctttcaaaccttcaaaagttctatttaatgatcaaaaatcaatttcaaacgtcctttaaaattcttagaatcgacaatggtagtgaatatataaatgttgttcttggagaatttttatcatctaatgggattattcatcaaaaatcatgtgtagatactccacaacagaatgaagttgccaaaagaaagaatagacacctcttagaagttgcacagtccttattattttcaatgaatgttagaaaactacattagggggatgccattcttacagtagcatatttgatcaataggatgccctaaaaaattcttaattttaaaactcccattgttgtttttcttgcttcattcccaaattcccaaatttgccaagatttaccaattaaaattttcgggtgcactgcttttgcacatgttcattcacataatcgtggtaaacttgatcctagtgctataaaatgcttaattttaggatatgcaacaactaaaagatgatatggatgttttgatcctgttaatcagaaactgtacatctctaaagatgtaaccttctttgaacaacaaccctattacacttcgcttcagggggagaattctagtgaagctttgtcattggaaattccacaatctccttttttggtccccacactcccagcaaccagtccgaaaaacagtctactaccagcaaccagtccaatgtctactcaaatctctccatccattcctttcgttcagtcgaacccaacaatagttccaatacatgatagattgtcaaatgcagggggagataaagcattgccaccaatagcccagtctacaccacagttcaaagtctactcaaggaggtgtagagtacctgatacactcatgccttgccatgaagccacatcggagataatgcctgaatcaggtttggataattcttcatccccctcacattcctcacttcctgtagacctagttcctagtgacttagatctcccgatagcacttaggaaaggtgttaattcctgtgccattcatcccatatctaattttgtctcttatcatagattatcctcatcttttttctgcttttacctctcacctttcttccatagaaattccaaaaaatgtaaaggaagcatatggtgatccaagatggaaagtagcggttgtggaggaagtcaaagctttggaaaaaaatggaacgtgggaacttgttaccctaccgaaaggtaaaagaactatgggatgtaaatgggccttttcaataaaatacaaatttgatggctcggtacaaggcaatattggttgctaagggatttactcaaacttatgggatagattaccaggagacttctgcaccggtggcaaaactgaacacaatctgaattcttctttctttggctgcaaactatgattggcctcttcagcagctagacataaaaaatgcttttctcaatagggaattagaggaggaggtttacatggatgtaccaccaagacttgaacaaggaagctccaataaagtttgtcaattgaagaaagctctctatggtcacaaacaatcaccccaggcatggttcaaatctactaatgagggtaaaataactgttctcatggtttatgttgatgatctgattttaacgggcaatgatcatgtagaaattgaagatttgaagaagatcctagctaaggagtttgaggtgaaggaccttggtgcactaaggtattttctagggatggagattgccaaaaacaaaaatggaatctctgtttctcaaagaaagtacactttagacttactcaaggaaacgtggatgcttggttgcaagcccaacgacatttcgatcgattcaagacacaagatagacctagctgaaaaaggggatccagttgacaaagaaagataccaacagctggttggaaagctcatctacctctctcacactaggttggatattgcttttgcagtaagcacaatcagtcagtacatgcattctccatatgaaacacacatgaatgttgtctataaaatgctgcaatatctcaaagaaatcctaggaaaagcacttcactttggaaggcatgaccaattcaaaatagaggcccttacaaatgcagattgggcagggtctatagaagataggaggtcaacatctagttattgtacatttgtgtttggaaatctcatcacatggagaagtaaaaaacaaaatgtggtggcaagaagtagtgctcgctcatggaatttgtaaagtcttgtggatcaagagagtattagaataacttaagattacaatggaataactaaagattacaattcatcccccagctatgatgtattgtgactacaaggcagctataagcatctcccacaatccagtccaccacgatcgaacaaaacatgttgaggtggaccaacatttcatcaaggaaaaaattgagcaaggggaaatatgcatgacatatgtgccatccaaaagctagattgctgatgttttaactaaagggatcccaagagaaaactttgaaaattatgtggacaagttgggtgtgatagacatctatgccccaacttgagggggagtgttggaaagttagtttggttagactagttcagattggactcaaattttagaatggataggttccttggtttgaggaattatttgaatttttgtttttttgtacgtagtcaaagttttattcagattaggaattatctatgttttgaaagatagagcaataaaataatagtttatctaaaaaaacctttcacggttttatatattttatccgttaaaatattgaggagtatatcttaccctttctggaatcctacatgtggatatgaatgattttgttgttacttccctcattgaaattgttggctgctaagtgtttgaatctatttgcttgtgtagattcagttatctgatgaaacgggcgttaaatgcacctttgtgcatagtctgtctcacttattgaacaatgttgattatgccagtatggatttttctttgtgaaatcacaatatctttaatatttgacttttaattcagctttatagcttgtattaatttagtaatggcctgtagaaactcctattgtttacttaaaccttggtgttaaggtaccaatttgattgaaatgcttaaacttttagagaatgaacccacaatgcatatcacactaacacctcctctcatatgtagtcttatacccacacatggagagacaaattatagattgtgtattatagataagcaaatggaagaataaaaaaaacaagaagacttgagagatacttgaacatgagaactttggttaacaagagctctgataccatcttaagatataaaattgatccaaaagtttaagctattaggaaatggacctataatctattctagactaacattgggattagttttgtttggcatgtgaaaattttatgtcattggataatatgttttattcctttaaagctatgttgtatgagttcgggtgcaagtgttgagtacgactatgtgtctaggtgtttgatcctttacacctatatattttaggatatagggatttgacttaaaaggatctcaataatgggtataaacacttggatataacataataaaacgaaaaaagaatgaaaaatcagttaaatatcaatgaaaataaagatatttttttataagaattcttcttttcttattgatccttatcttttctttcctatcctaaatgtttttataaaagttcactttcaacaaactctcctttttcaatggaattatttgttaaggaagttgaacaaaaaaaaaaaaaaaattcaataaaaaataaatagctagatcataagcaaaatagaaatatcctataaggatcccatacctatacttattttgtgtcatgtcaacacttttggaggatcttaagtatcatagctttaaaatacttaacatagaaatcctcagatgaatctttgatgctaatgatattgtaaattctcacctttttttagtaatttatatgtttatttggagcttactagaattgctattaagtttctcttacataatgcatttatgttgtttggtgctcatgtgttcatgatgactttataactagtaagctaaagactactaacctagaaaaagtaataaaattggaatttgtggattcataattatttgagtgtgtagtttatcatttaattatataatttaatcttttaataagatatgagttgacaagttaatctaataatcaatgtcgcatttccataattaaacatatatggtggtttagattgaataatttgaggtagaaccaaatttaacctaattgacatcatttgaatgggttctattagggatttaacctaactaagtaggcatgatattcatactcattatatgatcttggtagcttaacatgatatcataaccttaagtttgaaccttccttatagcttgtttattttctctattcattaagcttatgtgcaagttaccgttaaatctaccaaaaaaaaaagttaccattaatctcaattgtgtaaatactaaagtctaagtatatagtaatcatggtcaagaaaccaaagataggatcattatggcttgtagtatccggattgtggtcatcaaggactagcactaatatgtttagttatttaagtcaaaaagaaccaattgtttttcggatctcaataaaaccctatatctaaataagtaggaataaaagtatgaatgaagattttctaagatatgtaataaatttaacaaaagaaaaaaaaagacatccagataatgtcacaagtttgatttcaaatccattaaaagaaagtggaattttaccaaccttgaagatcaaagagttaatccaagattaaaatagatcttaagattggtttaaatttgaactttggtttgaaaataaagtctagatctcaatagtattttgaattaatcccaactttttttgttcttttaattcatctcaatctcatgcacgatcaatcaacataagttgttcaatgatcaagcagtgatcaagtatcattgaaaccaagttaagtattaatcgtctcctaattaaaaaggaactatgtagaggatataattaatcataatttaaatgaaaaaaaaaaaagatatgaacattaccgcccttacccaatttctcatatggattctccatctcgcttgtttctttctctgaatcatatacaattagctaaacatggtggctctcacaactaatgtttggttgctaaaaaaatatagaagaaaaaaggataagagaaaactaaaactttattgaactaaagagaatgataatgtctccccatgtacccatatatcccaaccctaacaatgagaatatatatttatatacatatatatatatacacatacatagcaaagccctaaactattacaaaattccataaaaaaaccttggaaaccccacctcagaagtttacaagtgggaataggctctgaaatcagaattttctgctgaagtcggtttggcatttatcaaattggtttaaaatccttttgaaatcaaaattctgatatcaacttctcaaattggtttgaaattagaattctgattttaggcactgccaatgcattccccttgtagctccaaatcagtttgcctccttcaaatcagtttgaaattggaattccaattggagctactgcctcctcttccttgctccttcaaatcgaaaatgaaattggtttcagcattctcaaatcaaaatttcaatttaagattctatcttctccattctccatcttctctaaaattgttttggctcttcaaaacacttttaaatcaatttggactctgtattttgacgtcgtgcctttttcatactcaatcagtttcattggaactccaagtctttctcttgctcttggtgttgcttccatcaaccttggtctcaacttaataccttgaattacacctaatttgcaccattcatcctctttttgttgcattttatgctagatataaacattagtcctcaaatgtgaactcagcacacattcaagctaagatgacctgattaacactcaaaatgtatttaaaatccttgttttatgtataagcaaacctcaattttgagtgttaatcagcaaggtcaaaagaaggctgcctctaaggtggggttttagggatttagccgaaataagttagcatgatgtacatagttgatctattatctaacagtttaagccattgggtctaattagtagattaataggttcattacataaaatgctattagattcaagaaaacctaaaattgatccaaaaccatacattttggagtggtctcccattttggatggacttttaaatacaaatgctaagtaacatggtagattcattcaagctccatgggccatcaagtgatgcataaaggtaataaacattattgatctaaatgatgattttatgtgatacttggtataaatttatcatctttgttcatataatttacaaatcttttgaatttgtagatccacattttttctaag

SEQ ID NO: 12460 - DNA, 13345 bp, Vitis vinifera
  Intron number 4 from transcript GSVIVT01034890001 (locus G SVIVG01034890001) derived from phytozome v7.0 (chr-ID chr1 8; pos 16037202 to 16050546 reverse strand)
cttactcggttggttgacaattacaaggtactccataatctaaagtttaaggtaactcttgtagtatccatgaatcatgtgttacttaaatctttgatactaatcacaaatagtgcatcagacaactttgaagaattcttcttaaggtttaggccatgcatatttaccccttaaattgggaattattccattttctttggttgtgatatttaggtgtcatatttaatcaacaggattaaaacaattacaattacaaatttttagagtctcagaatagcataaagtctgtgggaacagagggcaggttttcatctaaacattttcttgttgaagagaatcaggtataggagtcaccttgctatatgccttatatagcattcctcatatcctcttcttttcattagctgcttgaaatcttgtctcagtggcatgaaccagaattttgaacctgtacactctgataacatctctaatgaaatcttatttatatccctgccactgccaccattgctgccatcattgcatggccatcactaccattcccactatcctacttcaacaatttcataccagtgtgaaaggttcaacttattttccatcactaccactacttctactatttcccaacattttctttcattatggcgtcaccagaagcatcaatgccagtcatcactggtatcattattgcatggtgcacatttcacatgcattgtatttgtgccattcactaattgatatggaactggaagctctttgacatgctttcaatggatgagtatatctattcaatttcatgtgatgttatagcccatctaagcttaactgtttgagcatgtttctacatgtgcaacataatatgctattacttagttattcacatttagtgtcagttcttttgtttgagcttcagcctctaattctttttataacatcactccacttataatggttgtttaagttctagcacccaccaaaaacacttctaaattttttgtgttttgagattgagaaactattaaaatttgagatatgcgattgtgctgaaactgaaattgttttcatcaggacgcttaatcatttgcaatgttgaaatagaaaaaattccaattaactaacctaaaatacttggattacaatggtagatatagagaaaatatggaatcgtagacattttagaaattctagatgatgggagagatattaagaatccaagatattaggagagaaataaaattttttcttagtttaacaatatctaagttaacctaaaatacttggattacaatggtggatatagagaaaatatggaatcctagacctattagaaatcctagatagtgggagagatattaagaatccaagatattaggagagaaataaaaaattttcttagtttaacaatatctaagttgctaacttgtttttaactctcctcctcaagttggggcatatgtatttgtaagacccaacttcatgtgcaaagtggggaggttttcttccaagagcttcagtaaacgccttgcctacttgatcctcaaacatcgcagcttctcaataaagtgagttcctgatgactgaaggtttcataccatatagcaaccatgttatcactgcaaaaacatctggctgtcacacatgaatgctttagattcttgtggaggaggatcttctaatacgtgattgaacttttttgctccaacatacgcttttataatagtagcctataaatctgaacaccaacattgtatattgacactgatttcagcacaaagagcaatccaaacacttgaaaaagcactagaacagagttcatgattcacacattagcatattttgaaatcaatgccacacagcaaaaagcattcaatctaattggatcacatcagaaataaaactgtcagcctcaaaaaccttaagttaccaccagaaaaaaaaatagcctgatcactttactcctgttctgataccatgttaaaacaaaaaagtaaaagttccactttattcactaatacttctagaaaatatggaattctagaagtattaggaatcttagatattggaagagaaattagggatcctcccagcacaaaaatacttaagctattagactatatatgaaacacaacagcttctcccagaatctcatgaagctgtatattttcctttgtgttttagtatattgaacgaaaaaacttgttatctggttatagaataaccaaaccattgaatttgaaggtaaaaaaagttggcattcattgccaattggaaccagaaggggaattttttaatagatatttaatggtactggaatctggtttaaagcttatttcccttgtctgtgaggtaatatgtaagtgatgtaaatttatggttttaaaacttacttcccattctctgaaataagctgtaggtgactccaccatcctgatctcctagtcatggtggggatagagaggagtttgctagaagatgtctatataatggtgcttctcagtaaaattctttttaaaggtgctttttccaagcaaatggtcttccttctcacatctgtggtttggtgtcatgatatttttttatcagatgtgccatgatagcccactgaacaagtggtttttgcctggaaagcagttttggtgaagatgtgggtctttttaaaggaggaaacagttcaagaaaaagaagggtaaggaatgtcttaagagatagaaaaagcaagaaagcacttcaaactatactctagttaggataaatgtttggatggttgtggtgtatcagatgaagatttctaactcaaagctaagtactataaaaatattgctaagttgctaagtgatcatttgtttttgaaatcggaaaatagtggtaactttgacataaaatacagaaactctgaaaggctttcactgaaaaagtaatggttttaaaaaaattgaggtatcaaaaaaatgttactacctcaaattttaaaatttttgaaagtgatttttaaaaacataaggtaaatctataccctttgtaaaagatagtttacttttatatagaagcttctaattttaaaaataaaaaacaggaaatgcactaagggataaggagaagaacatgggataaaatttatggtagttaaataaaataaaataaaatttagagaaagataagaagggataaaaccttaaatttgcactaagagcttctaggagtctcatctagaagcaaatcaatggagtctcataattgaaaattacaaaggatgcaagaaaatgtaatattattaatcatcaatcagtactttggttcacattaattagccttatttataagtttctctaagaaatccaaattatactaggattctaataacctattatgattctaattctcctataatctaattagctactcctaattttactccaataaatgatcctaattttgttccaactaaaattaatgtccatcctcatcaactccccctgacttgaaaaaaaactccgacatcgagttttagtgattttccaaaagatcaattaaaatcttgagcaatgctttccaccttttttttctttgtcaaatctttaccatggtaagatagattcttaagatctcttgaacttattcaagttcacgtaagacaaacactaaacttaaaaaaagtttccaatgttgtgaaataaattgatagttctcaaaataattatttgttatcaacaagattgtggtaagttttatgtcatgtataggaagaagtttattaggtaatcttgcaagccacaagtcaaaaaaatcatcaaggatattacatacctctattggatattgcttatcattctctttgaattcatccacgtctcaggccaatagataaaaaataattttattttccacgccctccttttcaaattaaagcatagtaaacaccttttttggttgtgccttctttagcttcttaattggtgaaacttctttcattggacgaagtccttactaaaaagaaatgtgactaaaaaatgaaaacttaccagaatggaggtgttgttaacccatgctacttggaattaatttgcatgtgtcactattttaaggtttagcttctcaacaagctcttacgaagcaaccctgaggggtagctcagttggtccggccttgggtttgctccccaatggtcaccagttcgagtcccctcagggtcactggaggtttacccagccgttaacttcagggccccgtgggattagttgaggtgcgcgtaagttgacccggacatccatgcttatcaaaaaagaaaaaaaaaacaaaaaacaagctcttacgaagcgataattgaatttctacctccatcaatgatcatggtacataacttccctcagtaagaaatacatgtatggaaaatgctagtatgtcatcaatcttcttttcttttcacctttgggatagctagcaaaggtcgcactacaagactttggtcttccatcatatcatcataataatcacattcttcactaagttcatcttaactgtaggtctcctcttcattttggataattttccaattcagattgtggttatacaacttaaaagtgtaaacctttgtttgggcacacaacaatgtaatgaccatgcctagcatgcttaaagcatatgggagtcatgcctacctttttatctctaatgctcattgaagttttacccttattagcatctttattaggcacattcaaaacttgttgattgttgccctcaccattcacatgattagaagttcatctaagggattttcctattattattaaggaaacatcttattgtgagatcttcttttatgaatgggtatctgtggcgattatacaattagtttcctatatgaaattttcctatgtaattaggaatacacaaagaaaaatgttttgactgaaagaaagagtctcttttcggtgtaattaggcctttgagatttgagagccttaaggattgcaatatccttgaataatagtggaagttctttgtctttgctcatggatgtaggccttatgccgaaccatgtgaatcattatgtgctttgcgtgttctttgctttcattctcttattttctttttcctcttattattctttgtcgtgatttttcacaacaatctagtatcaaagcttaagttgttgaccaagaatgatgacaaagtttgaggttagaagtttgatagaagaaatgattttagtttatggtgcattaagatacatgcctcgttggttcaatagtggttgtctaaagcattgagaagtatataggctttaccaacaacgatgttattaagagaaggatccacttatggagagagcacaaaatgctattatgttgtacttggataataaggtacctcatgaagttgctaaagatgatacgactaccaagttatggttgaagctggaaagtctatatatgatgaaatctcttacaagtcacttgtattttgaaaaagtggttgctcactttatagatggaagaaggtacatccattaaaggtcgccgtgatgagtttaataaaactattatggatctaaggaatattggtgttagaattgatgaagaccaagtgatagagacaagtggcagccacctttaaaagtttattagaggcacgaaggagtgggctccaaggcccaggctttaatttgacactctttggatgataatgagcttagttgggatcttatataagtcaatatgggttcatccttgaaagtactttcaaaaattaagatatgggcttagtcaatggttataagttaccattttcagtcattattgttaccatttttcaacagtctttgatatggtcaataatcaatccaagtttgtcattttcaagttgcatttactgtgtctagttcctaggagttataagtccctagaaaagtcttatttagaagttgatttgtcttttggaaggaatgaatgaatgaatgaattttcagcagctaatttttcctttgtgagatgcaaagagtacttgggtgtgaagcctaaggtttttaggagtgattcctaaggccctttcaattatgctctccttgcattttattttttgtattgcatcaccaagccataattttaatgtgttccctaccaaaatcttttaagcgttttatagatgctatgatgtatggtagggatacactctccatagaagatgttaaggcaaccctaaacttaaaggagttgaagaaaggagtacctgagagtagagaagaaagctcaggtgaaggtttggtggttagagggagagcaagaaagaaaagtaatggaaggaaaggtttatccaaatttgaatcatggtcttagggaaataacaagcgtttcaattgcaacaaagaaggggactctgcaagacattgcctagaatgtgaaggaaaaagagaaaacttctaatttggtgatgcagtaatcgcaggagaaaatttagatattgtagatgtccttttagttattgttaggcacttaggtgataattgtttaggacttaattgaggaaagatttaagaaaaagctagccatatggaagagacaattcctttgaaaaggagggaggcttactttgattaggagtacgttatccatccttcctatctatttcatgtctttgtttgtagttcctagaaaggtgagcttaagattaaagcggcttcaaagagatttcatacagggaggggggctcttaaaagaaagtctcatttggttaattggactatagtatattcaaataataagaatggggcccttggcattaaaaatttatctcttttaaataaggctcccaatggtaaatgaagttggaaattcaccttagaaagagggtctctttggaagcgggtcacagtaggtaagtttggagaagaaaggggagattggtgctctagggggtatgagtttgtgagggatgactgtagtgcgggtttgtggaaagcaattagatccgaatgggagaattttagtagcagatcttgcctcatagttagcaatgggagaagggttaaaaattttggaaagatacatgatataaagattcttcttcagaggactctttctccactattctccctagccacgtgtctaagaatttgtggagaggagaggtatgggagcaagtaagggagaagggcaagtgaagcctttgtttctttagataactccatgattgggaatttgaaggagtgactgcttttcttcaaagaattcaatcaattaccttcttttttttctttttttctttttatttatggtcaaaggcagattgaattaataaacgcctaaaaacagggggcacaccttatgtatacagacagtatacgaccaaaagcctaaccaggctgtagaaaagagagaaaagacctagaaaagggaaggttagtctccattaaggacacttaaaaaattcaaaaaaagagagattgtctaacctcaaaaactgttgagaccactctaatagtgaatggataaagagtttccttagactttggtcagaacatctcttcctccgggaaagtccttcgattttgttctccccaaatagaccaaaaaagacaaatcagagccaatctccacattgctcttatcttcgtccttagccccttaactttccattttagaagaagatttttcattgaatccaggaacacccatactagtctgaaagaagttaacaacacagtccaaaagcttccttgtcttagaaggaatgaaaaggatagaataaattggaaggtttttgaaggtggcaacttcttggtaaaatcgttttactcatctcttgctcaagttagaagggggatcttccttgtaagtgtagtttgaaatccttgggtgcttatgaaagtggggttctttgcttgagaagttgcatgggaaaggattttgacaatagatcaactgatcaactaaaaaagagtggacaaataatgccaagcaaatatttcttgtgcaaaaaaggtgaagaatcgattgatcaccttctccttcactaccctaaggcaagtatgttgtggtagctgattttttacgtttggagtggcttgggtgttgcatttaacaattagagggaaccttattagttagcatgactcatttgtaggaaaaaaattgaaaatggcatggagggtcactcctttgtggtgttttagactctatagaaggaaaggaataaaaactccttcgaaggtgttgagtagtcaaaccaagcaatcaaattcaccttcttaagtacttaattgaaatgggttagagtttgtaatgtagatatttctttatcgttgataagtttttttgattggctcaactccaggtaaggacagagagcttatttttttgttcttctcttctcttttgtttgtctattaacccattttttatgtattatgtgtaccttggtgcatcccctttaggtgtgctattaatatacattttttttacctattaaaaaacccaggtgatgagtggatccttgattcagggtactcatatcatatgttttctaataaggattagtttagttcgtaccaactcatagatgatgggaaggttcttatgggaaacaatatagcctataaggttgttgggatagatacaattcgaattaagatgcatgatgatgttgtaaatacattaaccaatttaaggcatgttccaaagttgaataaaatttttgtttctttgggatcaattgactcaatgcacatataaagcaaaaggtgaaattatgagaatctcaaagggtgctcttattgtgatgaaaggacaaaaaataaatggtcttttatacattgcagggtagcatggttataagtgcaactgtagcttcaacctcaaaatcaattttagaggctactagattatggtatatgcaacttagacattatgagtgagagagggtttgacaattttgagcaaatgaggtttgcttggtagacaaaatgggagagctggatttttgtgagcattatgtgttcaagaaacaatgtagggttaaattcattgcaattgctcatagaacaaaagttactttagattacatccatttagatctttagggcccttcttaggttgtatcacatggttgtggaagatatatattgatatgcattaatgattactttagaaaggtttaggtatatatcttgaaacataagaatgtctatggaaagttcaaacaatggaaatttataatcaagaatcaaataggaaaattgacaatgagatggaattctatgagaaagagttcataacgaaggtattgtgcgacacaacacaattatgcatactccacaatagaaaggtgttgcaaaactgatgaatggaacttttctagaggcaacttagtatatgctttcaaatgtagggttgttaaaggaattttgggctgaagcagttcattcaacttattatcttttaagtagatctccttcaatttctattaattgtaagactcctaaagggatatggtctacttctcttcttattatgcaaatttaagatttttttttgtcctatttatactcatatgaatgaaggtaaattggaaccaaaggcaaggaaatgtatatttttagaatatgcaaatggtgtaaaaggatacaagtcatggggcatagattcaaaatccttcaaattttggattagtagaattggacctttgatgagtccgtggaagaaataatttaatacataaaataacccttgtgtgacaaagaaagtggagtttgagtcaaaagctttaggaaccatagaaaagaagcttttagtaaagccaaatgaggaagaggtgcaacatcttgatgataaaaaaaaatggaccataagaataacaatacagttttgttaaggatagaatgagggggcaaattaagctacctcaaaggtatgttagtgatgattttgttgcttatgcatttattgtaacaaacaccaatgaagagatcgttgtaatgaagattccaacatatgtgactacttaatttgttcctacatttaagttcaaggattgcctaagcttaattgataactacaatatctacaagccccttaagggtatgggagcaaagtaacattgaagagtttttagtttgtttgaatattgggaatttgagccaaggtgtagatcattggaatgtgtctcaaattctattgtgagtcaatttataagtcatcgatactttcctcgcaaaatatattaatgtaaaggactttcataatattactaaggaaacatcttattgtcatatctttttttaggaatgggtatctttgactataatacaattggtttcctatatgaaatcttcctacgtaattaagaatatatataggaaaagattttaattgaaagagagaatttcattttgggtgtaattggggctttaagatttaagaactctagggattgtaatctccttgaataatagtggaaattcttgtttgtctttgcttgtggatgtagtctttaagcaaaaccatgtaaagcgttgtgtgctttgtgtattttctattttggttcccttattttcttctccttattattgttctttattgtggtttttcaaaacaaaagttattactaaaatgaaatgttactcgacaatgaaaactcattgaaatatagttatcatctatcgatgctatctaaaagggatttggatgtttctccttcagattcaacttattaacaagttgttgtggcgtcattctagaactactacctccatcaataatcagagcgcatagtttctcttggcaagcaacacaagttcagaagatgtaatatctaatcctcctctttctttgcccttggtgtgttcaccgatgatagcataaaaaaattgtagccttgaatcttggttgcataatttgttgactcttgagctagtaccttctagccaagacctttttctttgataccaaaactgatgtaggataatcccatgatagttgtctataatcaaataaggtgggctagtacatcaatttttatgaatgaaggagaggaatgagaatacaattatagcacttaggaaaattaaagtaaaataaaagaaagaaaagatatagaagaaggataggaattctttcctatcagaaacaaggatattcctgtattgaaatattaggtataaagaaggaaatgaaatctttctcaaaaatacacaattgtctatagaaagtttaataaaaaaggcaaataaaagtctaatacacaattctctatagagtcgcactatggccttttaggagtctcatatctgaaagagaagcaatgaagtcccactattgaaaattgcaagatatgcaagaaatcataaaaactaaataaaaccatgaaaaaagaaacctaaccaatatgataacttattaggattttcatatctttcctaaaactttcaaaatttccaaacattaaaaataaaaaatgcaaatagagacttttttttttttaagaattagaaatttgaactttataaaaatttcttatcataaaaggttctaatgaaaaagatttctagatcctaataatgattaaaatggaaaccttagaaaaataaaattttcaggaaacaaaaagtttagaaataccataacttcttttaaggtgaaattttcaaatgaaaaaaacaatctcaaattctaaatgaaactcaaataccaagtactaactaattatggctctcaagaatcttcaaaaaactgcaaaattacctaaatacttttgatagaggaatttaggatttcctttcttcagtagattttggagattcatcatcgtcaggacttcaccattttcctgatctacacttaggggagcataatttagatttattctcttcacatacatggctttgttgatacctattttgcattaacacttggacctatcaatatttgtttttgtccagtctgacatgcagaacggcactactagtgacaaatgtatgcaatcagagaccatgcatcagttgtcctcatttgacgcagaattactaattgagagcaacatgtaactttatctccatgtcacttttgttgtcataatctccctattttcttcctttgctaggacgtggtgacaaccgccatcttaggatactaaagggaattcttctacccatcttaggatggaagaaatcatctcatgaggtaaaaaaaggagcacccctaacatgcgaaggttatgagtgtttgcttatgagaggccacttccccaccccacctttagtggtcagctatacatgtgcattctcaccccagcaagaggatacctctaataactaatgcaaacctctccaagaggggagtcccctaaggatctttttgttgctccaaggatatccctacacttccttttaaggtgcttaatgtagaaaactcaaatacattattgcctgcctgagatgggagtagggtttggagatgtcaatttactcatctttgtagttggcttggcccaccccaccattgtgtacatgggatattccagaggtctgggtttggtagctgcaatgggaggctcactagggcgagaattggaagaacatcagcaatccatgtcagatatatgttgggagggagaggggtgctaatgcaggggggctgttttgccatgactgcatttctcactgtctccaagtgagacccttcaagaggctactaccatatgcccactttgcctcttgcttctttgttcactctgctctccccttaaagttgggtaggtgcccattgccatcatctacctcctctaacaaagaaccttgtgtaataaactctttaacctattaagcaatttgtctgacaagattaatcaattacagtttttcttactcatcgagcataatctcgtcttaatgtaagcagcaggtcatgttataaggaaattgaagattttatggctatatttatagatgactaactgttctgcccatctagtaatctctttcggcaaggttaattgaacaccattatttgtgttatgtaaattattaaattttaaaaacttatttacatttcactggaatgtcattagctctgttttttttttatgtagatggtttgtgagcaaatgcaagtaattgttttttctttgtaatttaatcaatgaatatattttctgtacgttctatatattcttgcctatagctctcatggtaaaatggtaaaaccatgtccaatgttagtaatttctgtttagttgcaacttagatatttagccattacatttctcatgaattttctttgacaaaattcagttttgctcatctcatgccgattctttgtgaatcttattttgaaatgtatgtgcagacggtgaa

SEQ ID NO: 12461 - DNA, 19786 bp, Vitis vinifera
  Intron number 1 from transcript GSVIVT01035308001 (locus G SVIVG01035308001) derived from phytozome v7.0 (chr-ID chr4 ; pos 258122 to 277907)
acacttaccccgccacttacaagttatgaggatagagcccttaaaaacatgatatgatgtaatagatttagaattcattatttatttaatgatgttctgatttcacttttatttatccttattacatgtattatactttatgagcattcttgtctgcatattttgcattgcacgtaacttaggtgcattagaagttgcacagaagatctaggtcatgggttccttgcaagtagatgacttgttcacaaccagttcatgggtttaggaagcccattagaggttgtagttaactacttcctaattggaagaatggctagtcttagctattgggatgagtttctcatggtgaatgcattagtgtgtatgattacacattggacatgacttatggtgagtcatgacttaaggctatcaagcagtcataacctcaccaagctacttcattgtgttgtttcccaaccttgagagaatatcgagtttatactaaagttagcaatgactttaacatacgtgtgagatcgtaaattgatcatatattccctatgaattgagtcactattgatggaagatggtagcaataggtattttcaataaaaaccatgatatctcttgggattaagacaatatgcctcttttggtgattctaaagaggtgtgttcatggaaactatggtcatagtagttccttaagtaaaactcgatataggctctttgagagctaagacatgtcaattgaatacacaataggaggatttataactcaaggatggtagaggtagtcttgaaaaactaataactttcactttgttagactatgaatatcaattcatggggaaactaaacacaataaatagcaagtcacgaacccgaacatttggtatctcattgttattttcaataaaataacaacgagatggtaagttaatcatatattcctaaggaagtgtgttcatacaaactatgaccataatagttccttaagtggaacttgacataaactctttgagagctaagacatgtcaattaaatacataataggacgatctgttattaaaataaggaaggaagaagattaaaagaaaatttaaacttttttatcttagaatatcaaaaaagaataaactttaaaatgctttttaatacaaaagaaaacaaaatagtgaatatatttattttaaatagtattttaatcattaaattatttacttttaaaatataaaaaatagtttttattaatttaaattaacatatttttttagaaaatatttttcaaaatactttttgaatcattaatataatttttgtttatttataatttaataataaaaaatctaaaaatggttaaataagggagaatttgcttgaggtggtatgtgaagagtaatgttttaaaaaccggatcggaccgaccggtgtccggttccaccaaccaaacagttctaagttaacccctgattttgcaaacatggaagggtgttccattggatttaaatgttttgggctaaagcccacacccatctccacaattttatgagctgagtcttgagcccatgtgatgatggcttttataggcattctttgtagcctatttcctctcacaaatagttgtgggattgctaacttatcaaagaaacaaatataacaagcctctccaccaccaagagggcttgaaccttgcacctcaggttctaccatcagaatatgacaccacttggctacatgcagtttgttatctaacatgccaaacaaaacaatatacgttagattttaacattttttataatattaaataaaaataatataatattttaaaaaattataaaattagtttaaatttttatttttaatatattcacatttaaatattatacacatttcatttaaaatattaatatgatttaatttgataatatcaaagatataaaataatattattgatttttaatttattcatatatattttaaaaaaaattaattatttttaattttaataatatataaatgacatatttatgacgtcaccggttcgaccaccgatccaaccaatgaaccggtaacttttttggttcgatgaccggtccgattttgaaaacattggtgaagagtgagggataaagaaaaaaatgatggcccacaaacaccacatgacctttgatgtgataaatgaaaatgggtatgttagtcccatactattgccatccaacaggtccgcgagtttttttctagtcaatggacattttccactttcatttcggattccacgcagacttgcgaaggcaaccttacaattattggtggacgcattttcctgataagcttcgtggaatctttaagacgaaggaggatgctactgtccacattctttaaccgagcgagctaaacacgctctctaagttttctatattcttaatttctaatgttatatatatatataatattttttaaatgtaataattaaaaaatgattttaatttatcataattttaagagtcaaataataaaaaattatttttaaaagataaaaaatcatttaaaaaaaaagaagaaaatttcaacattttatatccatttaaaaattatcttttaaaacaactttggattgatattttataaattattataaattttaaaatattttttcaattgttattcattaaattatttttagaaactaccatatatattttttttttgtctcattctagtttaaaaacggaaggaagggtaagatgcgggcttaaattttatggtcccattaaaatataaaaataaatatcaataataagatggtttcatgcatattttctttattcttttattcatactataattttatttatttatactggctttgttagtacgttggatgaccagaatttcatgataccttttatatattactaatggcagtgaggtgatggaatagacctatatcatgggtctattcaactttattaaagtttggattctttcaaagttagataaaaattcgtattattcctaccactttgacccatgataaaaaatttataatacataaagaaaaacctttttttattattattatcttttttaacattcggttgttagaccttcaaaacaatgaactaaaaagatgcaaccaagtccaagttaaaataaagaataaagaactcaaacatcttataacacatacttgatataaaaaggtaaaatatatatatatatatatttaaaaaaaaaatagttcatgcttttgtgtgaaacaaagtactattatttttatattattttattgtccataaagtaatataaataattttaatggtttgaatgccctccagtttttaacataagaatcccttacacatatatgaaccaaaaaaggaccaatcataccataccatatgacataaacattttaggttttattactttgtacatgaatctaatttcattattttatatattaatatcatttatttgtatttgattttatctatttatactttgatcccaaatattagtatttacattcacttaaattttatcgtacattttcaatgataaaaataaatgttgatttaatacctaaactttttctaacattaaagtaaatatgatttcatgaatttcacattttctattatcttgacctaaatgcaatggggttgatcacttttttctcattccataattcgatccagtgaagatgatttggtcaccaaccatttactaagttgtgacacccattttctacaccaactcaaacactccacttttgttaataacttttagccaatataaagaaatgaacataccatttgatatattcacatggattaaagcatgcattttcttttaatgatgtcatattttgaattattttaaatattaacatcattacattcatttaaaagaagttattttatgatgggatatactttttactttttatttttaaaattgaaaccgttatatactctctttatctttcttttacacttgaattctttaaggttttaggagcttcaaaaatattatatgcacaccttccacataatctctagagcataaagtggttgtacaataggtacaaaaagcaactagcatgtagacaatttatgacttaagagaaggtattgttacgacaaaagacatattcaagcttattatttgaaaaggctttaaagaggatattcaatggagaataaatgatttttcaaggtttttaactaattttaattatatttgatttttttttcatgtttttcatatacatgtataatcaaatgagagaaaataattttttttaatatttttttatttccttagtatttttcaagaactaaacataattataagattagtcatatttattattataagctccttgggtaaatttcccttcaatgattatcctaaaacgtttttacatgttttatcattattatgattttgaaaatctatagaaattcatggtttttataacttatttagatgacagaatatgattatacaagaaaggccaatgagaagatcgatgtctaccatttgaagttgcacttctagagttagctactataagagacctagggggaaggggcaggatatgaaccttgctcaatgggcatggcagcaccttggaggaggaaagtcgactgtgaaagcattggattgaggagatcatggcactacgctccttagaagaaacgagcactgtgttcaaactctttggctgccaccagataaactcattttcattgcctactttgccttcttatctaatactatcatatgcctttaatgccttctttatacaattttgcgtgcatgaaccagaaagcctattggtgggcaaggagtgttgctctctcttagaaaccaagattggttctataatgaaaataccgtcttccgagggcatatgaaacaagaagataattctaataatcaaagcttaatcatgaaagtcttcatcatagtgagaattcccttatctaaaagcgcaaagacagatagacctttagcaaaataaattatgaataagttaatttgagcttaaaataataaatagagcaaataaacatgtaataaagttggaactcatgaccctcctactaaatgaagttctaatattatattggataattaatttttttaaaaacttcaacttaagatttgcatcaccatgaatgttgtgtcatgctttctaataatatatcacatatttttctagattttatgttagacctgtgattacttctctaaatcaaattttgagcacattgtatatatgtacttgttaggatgaatcaattatcaatgaatgaagaaatacaactcctcgtagagtctctttgcttatttcctctacaacttgattagttgaacttaaaagaactcctgagtgctttcacaaaatgttttgaacttcaaacctacacaaagatggaaaccatattgttgaggtctcacgtccctggtgacccacgtagttgccaaatggatggacgcacgatctcaaccaatatagattcctagttcagtggttcctgcaaaaggcgtccggacagggtgtccggacacaccctttgatggttttgtcagccatggtaagagagataaatcagttggtctttttctaggtataacaagcttaccttcctctttgtgtgaaggttcatatatatagtaccagaagctctgtttccctctttaatggtagggagatattttggcttgtcatgatgccactaggtggtggcagggccatcatcaccctacgggcggctgacagagattgtgggaggtgccgcggctgtcaaagatcgtgggaagtgacttgccatcacttcattcctgtcctttcactctgcatgtggcggaatgtgggccatggcagactgttgtgataacatgcaagacttgcttacttcagtcaatgatccggacaaacatatccggatagtatatgtcggtcgtccggatgcgatgtggcgttcgtccggatgttatatttgtgagtgttgtgtgtctctccttgagggagtctggataggagaggcgcgccacgtgtactcttagggaaatccggatgggattaatccggatagaaatgtatgccacgtgtcaccaggaagtgtgtgccacatgtcatcagggggaggggtccctacaatgatagattcctggttcagtggttcctgcaaaaggcgtccgaacacaccctccaatggttttgtcagccatggtaagagagataaatcagttggtctttttctaggtatagcaagcttaccttcctctttgtgtgaaggttcatatatatagtaccagaagctctgtttccctctttaatggtagggagatattttggcttgtcatgataccactaggtggtggcagggtcatcatcaccctacaagcggctgacagagatcgtaggaggcgtcgcggctgtcagagatcgtgggaagtgacttgccgtcacttcattcttgtcctttcactttgtaggtggcggaacgtgggccatggtaagctgttgtggtgacgtgcaagacttgcttacttcagtcaatgatccggacaaacatatccggagagtatatgtcggtcgtccggatgcgatgtggtggtcgtccggatgttatgtttgtgagtattgtgtgcctctccttgaggaagtccggataggagaggcgcgccacgtgtactcttggggaaatccggattggattaatccagacagaaatgtgtgtcacgtgtcaccaagaagtgtgtgccacgtgtcatcagggggagaggtccctacacatatcattgaaataattaaatagatcaactgaaatcaaagtgctattgtcttatttaaaaaaaaaattacaaaaaaaaaaaaaaatcatgggctttatgcaaaaacgatagttgcgcaaaactccttctttggaatactagattggtgtcatgtatcatttcacttggcaccttcttccataactatcaaaaatgatatttgtttatgaggaaaacaagagttttgggcaaatataatatatttgaaaaataaattcataaaatagatcttcagccaaaataattttcaagttagtgcattttaactacttggacatctaaatagtcttagaatgttttattttttttgaagtataaatttaaaaccgtagttggtaattataattttaaccatttaaaaaaagtaaagtttctaagttagtacatttcaacatgaacatccacgtggcttgagaataatttttttttaaaatgttttttgcatcacaaaattgtaattagtaactattgttttgaatttttttaaacataaaaccataattggagactctaattttaaatttatctttaaaattcatagttgatgatcgtagttatcgactatagtttaaatttaaatttaaaaccataattgataactattattttaaccatttaaaaaacatcaaaattatagttaagtatggtttgtgacatggatacacatgtagataagacactctagtttgaaaattattttgaaagggacctactttgtagaattttatttttgcaaataaatcatttttcctcaaaactcaaaactaacatgtttagaaataaattcaattatacactttcctatttttcttttccctaatataagaccaagtccatgttatcacttttccactagaatattcctcactgatatcacttttccactagaatatttctcactgtccattcccttagctgtgcattattccaaggccagttttctagctaccataatttagtccaggatgtggaacaactgctggatcatgctggatccttttgtgagacttgaccatcaatatccttctctccatttgtggggtcctgcccacttaatcactactttggaaatttcgctaacacccaaattctcaacaacccaaagccacagacttctgcatccttccatccatctttctttaagtaaaatagacacccatttggtctttgttcgtcatttgtttcactttctcccaagaatactaatcttgtctgactgattagtttcatcagagatttttcaagaaaaagaatatcacattttatatttgaaaaaaaaaaaagtattgaatatattagcaagatatcatcctcgaaaagttacggtagttgaccggcatagaaaaaagaataagtgaatggggatgacaacggagcgggtttttttgggtactcgtccttaatgaaacggagtttaaatttaataaacgagtttgagatgagtatgaattttttttttaaacccgggacaggttcgggtattgccccatcccgtcccgtcccgattacatataaaattaattttaaaattaatttaatttaaaattttattttattatttttaatatatagataataataaaaaaatttaataaaataaattataaaatatataataattttattatttataaaatatatttattttaatgtaattaaaaaatttaaaagtaatttttaaataaataaaaaactaaatagggtgggacgggcccatatccgcctcgtttaattttttaaatgggacaaaaataagaattatttttaataaataggacaggattgggatggagtgacccgtcctgaaacccttccgttggcattccgacgattttggaatttttgtttatgttactttgcattgttcttagatttcccctttccaataaaagcctgacattatatgtatagaattccgtataatccaatcattgcttcggtggttcgtgtataccacgggaattaggataagtctcctcttttgacgagtcaatgccctttcgcattcatttataattgtttggattacatgaaagactataaaagcaacctggccccattttgttgacggaagctgccacttccaaacacacttactgatttttggttatttgtttattctgttttctgtttttgatttttaaagaaaataaaaatcaagtttaaaaacatgtttagattttttttttttttttaattttgagtacaaaaatggtaagaaataaaaatattaatttggtgtttttaaaattttcctatgacaatgttttccttcaacttaaaaatagaaaaattatctttagaattaattataaaattatatatatatatatatttgatatattattttaaaataaaaacataatcaaatacagaacaataaagcaaaacaattatgtgtgaccgggtcagtgtccatgtccaatctccgctactctaaatcgtaccatgcccacatcaagctttcattgagtcattccatgttcaaaccataacccacggcaagactgacccagaaaattttgccccatcccgtcccacacgattacatataaaattaattttaaaattgaatttaatttaaaatttaaaattaatttaatttaaaattttattttattatttttaatatataaatgataataataaaattttaataaaataaattataaaaaatataataattttattatttataaaatatatatttttaatataattaaaaaatttaaaaataatttaaaaaaaaaaactaaataggacgggataggacgggtacgagaattttaaacgggattgaaatgaaaattatttttaataaatgagacgggattggaatggaaacgatccgttggaaccgcccgttggcattccgataattttggaatgtttgtttatgttactttgcattgttcttagatttcccctttccaataaaagcctgacattatatgtatagaattccgtacaatccaatcattgcttcgctggttcgtgtataccacgggaataaggataagtctcctcttttgacgagtcaatgccctttcgcattcatttataattgtttggattatatgaaagactataaaagcaacctgagtcaataccctttcgcattcatttataattgtttggattatatgaaagaccataaaagcaacctggccccattttgttgacgccttgacggaagctgccacttccaaacacacttactgatttttggttatttgtttattctgttttctgtttttgatttttaaagaaaataaaaatcaagtttaaaaacatgtttagatattttttttaaaaattttgagttcaaaaatgataagaaataaaaatattaatttggtgtttttaaaattttcctatgacaatgttttccttcaacttaaaaatagaaaaattatctttagaattaattataaaattgtatatatatatatatatatatatatatatattattttaaaataaaaacataatcaaatacagaacaataaaataaaacaattatgtgtgaccggtcagtgtccatgtccaatctccactactttaaatcattgagtcattccatgttcataccataatccacggcaagacgaccaagaaaattttgcaagcgtcgacttcttcttctgatttttactggctgtcaggatacaaacctttatcgaggaaaaagactgcatgcctctttaggcttcttcaattttttttttataaatatttttataaaaaaatgaattaattttcaaattcaacttatatgatataataatatagtataatataatatataatattaataaataataataaataaaatagttatatattattattatatattatatatattatattttatatagaggatgttcgataaatcaattttatgatttaaagtgatttaataacttaatttaaattattaaataaattaaatattttataaaatatcataatatttaaaatgattttaaatattaaatcaaaataattaatttatttttaatctgaaatcatttttattagattttattttttagtataagtttactcgattaatgaattaaatttttgaaattatttaaaataattataaaatatttactttataaaaaatgagtcatacatattataaagattgttattacatatttggagtgatctgagattcataataaatttagcattttaatttaatatttaaatattatttttaattttaaattatgatattaaattattttattaaatgtatttaataacttacattgaattattaaatcattatattaatttatcacacacctcctaaaaatccttttttctagtataccaaaaataagaccaataaaatcatatcattaggtctcaatttttttttacgttccatttatttatattttaataatatatgtttggatcgtcgtgaaatgacgtagattttaccttacacttttgatagtcagtgctgcatgttgattaggtttacacttgcccttctttctatggtattttcctgcgctgccactgtcgacatggcagtcaactagtcaaggagcatcgacttaaaagtgatgtgaaatcagttggaattattaattatacttgtggaaatgaagtgctttagacccaggtgggcctggaaatcagctaaaggtcctcctttcgtcgtgataataaatatatgaaataggaatgaaaaaaaaaaatactcctttgacttatcataacaaatatataaaaatcgggaataattatattttagacctaattagactaaaaaattaagctttaatccatataaattcataatataagctaaaaacttatagaaagtgtgaaaattgagaagaatgatatgaaatttttatctttccaaaaataatatttattggttatggaaaaaaagagagtagaaaaacattaatttaaattttattccttttgcaaatttcaataaaatttaatataatttagtggtttggaaaaaaatacacccatgtccaaaaaattaaaaataaattattattatttaaaaatcaaacatcttggaaaatatatatatttaaaattatgtatataaaaaataattaaaaatatgtcaatttttttttaaatgatatatttttataatatattttaaaaaaaattagttttctaaaaataataaattttcataataattattaaaaaaaattaagataaaaaagtttttcaaaccttatgatagaaaatagttctgaatggtatattagtctcttcatattttatatcatctccatcaattatgcaacttttatgggtcaaatcttaatttttaggtccaattgggttcaaaagacaattgtccctaaaaattatctcaaataataaattgtttttacccatgtggtgtttgtaggatccattatttttgtctctattccaccactctttacatgctaattccaacaaattcttccttatttagtcgtttctggatttttcattattttttaaaactcttttataaataatctaaagtcaacaatattttttatttttaaattataaataaaaaaatacattaatgattcaaaaactattttgaataatatttttttaatatatatatatatatatatatatatatgttcatttaaatgaataaaactgtcttttacatttaaaagtaaataatttaatgattaaaacactatttaaaataaacatattcattattttattttcttttatactaaaaatcattttaaagtttatttctttattttttttactattctaacataaaaagtttaaatcttcttttaattttttttcttattttaataacattttaaacatgacttctactaataagttatatgaaatgttacaaattcatctactaaggattttttttaatgatttgaattaattgaaaaattatcaaaataagaaaaaaaaaataaagaaagaaagaagatggataaagagtttattttaaatatccaactaaaataaggtatgcaaggtatttgtgtaagtgaacgatgtatttacattaagtgtacaagataaatgtattaattgtacaaaggtgtacaaggctatattccttgaaagaattcaatcgattttcaaaaaatcgcttactcatttcctttttccaaggatgtaggacattccacaaacacattgtttgatgacatacttatctcatctatttttttgacattgtatatgttcattcgattacctagcccactaatgatgaataggaacataaattgggtttaatttttcccattttcccttagccatgacaatggaaacatggttagcccactcatatgcacacattgcattctaggtctatgaaatttgtgtaggtgtacaaagtatttacacaaagtgtacaaagtaaatgtattaactatataagggtgtacaagactactttcctttaaggaattcaattgattttcaaaaacttgctcgctcatttcccttttgacaaggatggaggacattccatagacacatttcttgatgagacactcatcctatgcatttttttgacatcacacatgttcatttgattacctaccccactaattatgaataaaaacataaattgggtttaattttcccattttccttgagccatgacaatggaaacatggttaaccacccatatgcacacactgcattctaggtctatagaatttgtgcaagtgtacaaggtatttacactaagtgtataatgtaaatgtactaattgtacaagagtgtacacagctaccttccttgaagaaattcaactgattttcaaaaactcgctcactcattttcctttgtcaaggatcaaagacattccacaaacacattacttaatgacacgcttattctatgcattttttttttacttcgtacatgttcatttgattacctactccactaataatgaatggaaacataaattgggttcaaattttcctttttcccctaagccatgacagtgggaatatggttaactcactcatattcacatattgcattctgggtctatggaatttgtgcaggtgtataaggtatttacacaaagtgtacaaggtaaatgtactaactgtataaagaagtacaagactacctttcttgaagaatttcaaataattttcaaaaactaacttgactcttatttctaaatttcatcatctaaaatttgtaacttcatattttgttttttgtaacccgtataatttaaatgttccgaaaactcttcatctattctcaatgttttcctattgaactgcacttatactctttttccaacatattttttcaaattttccttatatctttagaattaagtctatatttatgaattttaatattattgaaaaaagaaaaaaaaatcatagtcttagacttagagtgtagaatgcaatactcaaaatttgatatatattgtgattttaaaattaacttatgctttctacatctttttattaattcatcatgttggacactatgaatacattgtgcagttgcacccttattgtgaatttgatcacatgctaaaagaaaaaataaataaaaatttgaaggaaaaaataaaattacattgcaaccacctagctacatgcccacattatcaaagacattctggaaaattcttttccacaatgcaaggaattagaagacccaagtttctggatgaaaaccaaagtcccacaactttggttgtagttcttcttcacttgtagatccatagacaaacttgttaattctatcacacatatccactttgttccaatactaaaagtagaatacctaacctgcccaaaaaggagagcctaaaaatagttcacattctcatccaaacaagccaattttcttgagaaaaaactagtgaaaagggtaaaaacaaaaccaaatacaaaattaatcaagatgatctataagtacctgaataagaagcacatggaaaactaaattctcaacaactaaaaaacttccactagtaaaggtctcgatgtcgacgaaatggaaaatggtgatggtgaggaacatggggatgccgactactacaatgacaataggaggacttcgagctcctttagggatatttgtgtggctacaacaatgttgacgacaacaacgactaccgagatccaaagtagatgatggtgtgctagggtttaagatcattttagggcttcgacgtcttcaaaaaaaaaaaaaactaataagagaaatattttaattaccaaacttggaatccattttgcaaaaggagaattgtgttttagatccagatgggtctaaaaattggccttaaatcctcttaacccgcataattgggcccaaaacccagcaaagccttacaaattgagatgaaggatattgacattccataaacccgaaaatgcccttcgttaagctagaaaaaaaaaattcatgctggaaatacaatttgaaaaatggattccaagtttggcaattaaaatatttctcctattagttttcattttttgaagaattgaaaacgccaaagccttaaatgatccaaaaccttagccaccatcatttactctagatctcagtggctgtcgttgtcaacgacgttgctgtagccactcaaatatccctaaagtattcatgatgaattaataaaaagacttagaaagagcataagttaattttaaaatcataatatatatatatatatatatatatatatattatcaaattctgagtactacattctacactctaagtttaagactatgattttttttcaacaatattaaaattcataaatataaacttaattctaaatatatgaggaaaatttgaaaaaatatgttggaaaaagagtatatgtgtagttcaaaaggaaaaatattgaaaagagatgaagagttttcggaatatttaaattatatgggttacaaaaaacaaaatatgaagttataaattttggataatgaaatttagaaataagagttgagtgagtttcgaaaattatttgaaatccttcaaggaaagtagtcttgtacacccttgtatagttagcatatttaccttgtacgattaatgttaataccttgtacacttgcacaaattccatagacctagaatccaatatgcgaatatgggtgagttaatcatattctcattgtcatggctcagggaaaaggggaaaaattgacatgtacgaagtcaaaaaaaaaaaaattgcatggaataagtgtgtcatcaagcaatgtgtttgtggaatgtctttgatccttaacaaagggaaatgaacgagcgagtttttgaaaatcaattgaattctttcaaagaaagtagtcttgtacaattagtatatttacattgtacactttatgtaaataccttataaacttacacaaattccatagacctaaaatgcaatgtgtgcatataagtgggttaactatgcttccattgtcatggctcagggaaaagggaaaagattgaacccaatttatgttcttattcatcattagtggggtaggtaatcgaatgaatatatacgatgtcaaaaaaatgcgtgagataagtgtgtcatcaaacaatgtgtttatggaatgttcctcatcattggcaaaaggaaatgagcaaacgagtttttgaaaatcagttgaattctttcaagaaaagtagttttgtacacctttatatagttagtacatttaccttgtacgcttaatgcaaatgccttgtacacatgcacaaataccttgtacacatgcacaaataccttgtacacatgcacaaatactttgaacactttattttagttggatatttaaaataaaaactcttcatctatcatctttttctctttttcattttcttattttgataaattttcaattaattaaaatcactaaaaaaataaaaaataaaaatccttagtagataaatttgcaacatttcatataacttattactagaagtcatattcaaaacgttattagaataaggaatgaaagacattcaaagaaaatttaaactttttattttagactagtaaaaaaaagaaagaaataaactttaaaatgttttttagtataaaaaaaaaagaggaaaatggtgaatatgtttattttaaatagtgttttaatcattaaattatttacttttaaaatgtaaatgaaactttttatttatttaaattaacacttttttttttttaacaaaaagcattttttaaaatagtttttgaatcattaatttaatttttttatttataattttaaaataaaaaataatattgattttagattatttataaaagagtttaaaaaaataatgataaataaaaaaaatggctaaataagggagaatttattggagttggtatgtaaagaatggtgaaagaaagacaaaaatgatggtcttacaaacacgagatgagttaaaacaatttattatttgagataatttttatatatttgagataatttttatatatttgatgtggtaagttaggctatattttttgggaaacttgtgttttgatggggccatttggcaaatatatgcttttcagaacccaactttatgaaatctaaaaaccagtttttaatgtgaaaaattatatcttttttatgcactctaagccgactgcattttttgtaccgagattgcctttttttttcctcccttacccaccatccatttctcccttcatccccagtgaaaccggctagccgacgtcatccccggccgccactcacacctctcaccggccggcaggcaaaggttgtgtttttcaacctggctcaaaaatcgtggatttagggttcgtgaaatttaaatccaatggcacaaaagcaaagagacccctagaacagatctagaaaacacatggatcaaaaaaaaaaaagcaatttttttggttttccttgggggttttgcatgaattttctcggaaatcaaacgaggatgaattttccaaaaaatcaaatatggatggattttcttggggatcaaacaaggattttttttttttttgcttctatcgccgtcgtcaatgattgcaagacttgttggttgccgccgtcaatggcaaccagtcgtgccttcttccctccgaccctggttctcccccattgccatcgcctttttctctcttggtgatgtcgaaagagaataaaagagaaagaaagaggaaagggaaaaggagaaagggggagattgccgaccagaaaaaggtgtgagtggcagccggtgatgacgccggtcggctagtttcactgaggagagagggagaggcggatggtgggtacaagatgaaaaaaaaaaaaggcaatctcggtacaaaaaatgcagccggcttagaatgcataaaaaagatataattttttacattaaaaattggttttcagatttcataaagttgggttccaaaaagtatatatttaccaaatggccccatcaaaacacaagtttcccatttttttttcattattatttcatatacttatcatcgtgataaaaggataaggccgatcattgtcgcactgaatggcactccaccccatgcccatgacacacgaccaattgatattgacccttcacattgactttcagatccatttttgtttatcaggaatagtttttcttcacttattcttcataatcctgtatttatatactatatcaatatttctaaatccttaccattaataactttttcaaaattctttattagtatccatgttataaataataaaatatgaattgaacattttcgctctcctcataagcatatcacacttgtctatttggttcttagaaaatattaggaataaacaaagatagcattggaaaaaaataatttttttttatattttgtttaacatgaaaatattaaaatcaaatcaatataattaaaaatagtttaaattttaaacattttaaactagtttatctttatataatacaaaaatacatacaatgaatttgaataaacatagaaatgtaatttattaataatattaattatttttcattttccttcatgtaaaaaaaatggatattatatatatatttaaaaaaaaagtatatgtgattcttggaaaatttaagggagaattcaagaaaaaaataactgaattttctttttttctttcttttccttacattttcccttaaatttttagagaattgaagatagattaaaaggtttttttcctacatttttcttacataaaaggttagaaaaaagttgagaaaatacattcctcaataatttttttttcttcaatttctcaatatatataaaccaaacttattccaagagataatgattatatttattatcaaataaaatttttatatctaatttacttttagctagtattgtccaacataattaaataataccatggtggcttaggttaattctaaaatgatgggaaataaatcaaaatggtaatggactaatgatagaaaaattatcatataaaatacctaggcaaccataggtgaaaaaaaaaatttgaaaataagactcatattatgaaaatattaaaaaatattataatttaatcacaaagataatgagtatgactaagatcgacgtttaggaaaagagattttataaataaataaaaattattttgaagtatcttacatggatcgctgatttttattcaaattttaaacaaattcatactaaaaaaccataatgcttgctaaatctaatcttgtaacctagtgttttgttcttagaatatatatatataactgtcccggcatcttccaccctcctcatagagatgctggtaacgaactcaacgccacaaaaatgccgaaagtaaacttttaatttgccaaaattccattccccgctctgtttctcctcctcgtcctctccttaccctttcaagtaatttccgaaaatctggacg

SEQ ID NO: 12462 - DNA, 777 bp, Vitis vinifera
  Intron number 3 from transcript GSVIVT01028920001 (locus G SVIVG01028920001) derived from phytozome v7.0 (chr-ID chr1 6; pos 17536637 to 17537413)
cttggtcttggtgacgtatgaaattttttttcttccatgatttaacttaccatgcacttatcctggttgctgttattttttgttactttgaaaattgaggtggtgcattgaaatttaatttatgcctgcagttttccatgtgtggtcataagaaaattgtagatcatatatgctgttttgccagacgtatccatggaactgaataatcattttctttgtgtacaatgttaaattcagaagtattcagttgaaagatcacagctacagaatctacgtgcttactttctttcttttaattcaattcttatttagctatcaaaaaaaaaaaaaaaaaggtatacaaaagtgttatgccatgccttttggactggcttcatggatttgattatcattttttatttcccatttttctttttgttcatgaaaagagcattcttaggtcaagatctatcatgcctctagccaaaatagttctatcaaatctcacaaaggatacacccttgggtgatgcttttggatttattccatggctttatcagaggaccgttcaattcctattgtatgtattatgtactatatttgaaattaataggcattcatatgtagagactgcatgtttttttcttcttgtttggtatattttgtttgagaatatcatcgtgctattatctaccatttgattattccattacatttgagtgctcttgctgcttcttttatgaggcttttaacaaactcttaagcttttgttcttccattttgcaggctattcctgcc

SEQ ID NO: 12463 - DNA, 13049 bp, Vitis vinifera
  Intron number 4 from transcript GSVIVT01034788001 (locus G SVIVG01034788001) derived from phytozome v7.0 (chr-ID chr1 8; pos 21655107 to 21668155 reverse strand)
aaagggcaatattatcaagaatcttgatttcaatagtaatcaattagaaggtccaatacctcgatctttgatcatttgtagaaaacttgaagttctagaccttaggaataataagatgaatgatacatttgcccattggtggggaactcttccacagttgcaagttctcattctacgctctaatagtttccatggtcatatagggttttccaaaatcaaatccccatatgtgaacctaagaattattgatcttactcacaatgatttcgagggtgacttgcctgaaatgtatttgagaaatttgaaagcaacaataaatatagatgaaagcaacatgacaagaaaatacatgggggaatattattatcaagattctataacagtgacaacaaaggggttggagattgaacttgtgaaaatcttgaatactttcacaacaattgatttatcgagcaatccaaggagagattccaaagtccattggaaatcttaattcacttcgagggctcaatttgtctcataacaaccttacaggccatattccatcatctttcagaaatttgaagttgcttaaatcattggacctctcttcaaataaggtcattgggagaattccttaagaattaacaagtttgacatttcttgaagttttgaatctttcccaaaaccatctcactggatttgtacctcgaggcaatcaatttgagacatttggaaatgattcatacaatgggaactcaaggctatgtggatttccattatcgaataaatgcacaactaatgaaacactagagccttcacaagaagtggatgaagagtttgaaagtggatttgattggaaaatcacattgatgggatatggatgtggattggtaattgggttttctcttaggtatctcgttttctcaactgggaaacctaaatggttggtaacattaatggtcgaagagaacattcacaagaagattagaagatctaaaagatgcacttataggagaggaacaagaagaaactagcacattccaattgcattgtattttgttttacatattacaaatagattttacatttgtcaacaaataatctaattgttattataaaagtgtaatattgtttgcaaaattaatataatgctattttcctttttctttttttgtgataatgcaatagtcattagattcaatatttttccaatcaacatgataacttaaaattcaaagagcaatttttatctcttagaaattaaccaaacactaattgataaaaatattaaagacttaataggaatttggatatacttctaatttttattctttttttaaaagaaaaaaaaaaacaagacattgacattgaggaatatccaaaaagacatttaagcaatcagtcagattctatctttgttcattctgtttgaagaaagaaaggatcccaaagaatcgatttttcttttaattcttttatataaattcttatacaacaagtaaggaattacattatgttcaaaactactttttaattttattttaaatttaagaacacaaatttttttttaaagttttaaaagatcttttagataatataaaataaatcttctctcttgctataaaaatgatttatagaagagcttaaaaaccaaaaaaaaaaaaattgctaaaaacaaaaaacgaaagacgaaaagtattattattacatagggaaagaacaataatttgtttatattaaatatgtataggtatattatttttcaactcgtattttatttgattaaaacatgtatagaagccaccccatgccaagtttagaccacggaagatagattcattgcgaccaaggctcaattggtatttcatttgaaatcatttttcaaatatatattattgagaaatctcaactattgcatcatggaaaaaaaagaaatttatgaaaggaccacttgatagcttttaatttgtaaggatataattgttagtgatctatgttaaatattaaaatcaatttgataattaatgttatagatatttgaaggaaagaaaaacataaataaattatatgatttaacatttttcaatcaaactagctttaataatataaattcataaaatcaagaaagaaaaagtatattttttataattattcatttaaagaaactactattcattcctgtgctatttatctcttatcattttaaaataataatattcattttaaaaatattattacattataattttttaaagtagtactattgattttaataaaaaaaatataattttatttaatatttattttaaaaagtcgatgatttggaagatctgtttctaatactcatgaatgtaaaatcgtgtctttttctcaaaaataagtaaataaatattattaatgtattatgaatagtgtcattttaaaaatataattcttgattatttaataaaaatattgttatatatcataactttttaaaatttattatttatttttaatttgaagaaataaaattttaatatttatttttaaaaaatacccaatgatatgctatggccttataataaagtttatttttattttcaattcaaattattatttttttaaaaaaatctaaaactaaaatcattgccacgccacccaagtgaggtggagaaacatagatgcatgatggaagtaataacttggtggtaacaggatgcaagtattgaaatattatactaattttaaaaaattattcactcataaaacaattaatatgtgaataaaataaaaaaattgaatccattttcatttagatttttattttaatatgtatagaaattcaatctaataaaattaattctcaatagttatttttttatataaaaagtcaagtgatccccttatctcttaatttattggacaaacacaaacgcattttgattaagcaagtttgaggagataggtggatttgggccgtcttaaatttatatttgagcccagaatatgactccaagctcagtccagcccaaatagaacacatcttattgggtctgaattggggcctattgagttgacctgggccaacccaattcaattcaatggggggcaatttggtaccatcatcactagtatacaattgctggttttattttagtattcactccgtttttttgttttctcaatcccaattcactagccaacttttcatagtcgtaattgacattaaactaggtttaatttataattaaatataattagtcttaaactaattccaatctctagttaaattgggtaatttttacatgaaaatttatattgtaatttatattatcgggtattatagtaaatgctcttaaataactaaattcatgtcaagatttaattatgtcataccattaataagacacataccaaaaaagggataaaaactcgccaacatatacatattttgtcaaaaacaaatttcttagatggatttctccttttctaggtaaattgttccataatctatatggatttattttgtttgcttttgttgctttgtaactagatttgatagaaaaacaaatttttaaagactttgggtatctctagttgttggattttttatgagactttagtcgatcctctaaaatattttactatggatcaaatattagaaacatcattattgttattcttattttgggtttaagatcatttcttcatgacacaactaaggaaccttctcctataagagagaaaagaaaatgaaaaaaaaaaacaaattctaaagaagaccactagtgtttttgggtatattcattaatgccctacaaataattgtacatagtaagaaaaaagcatgataaaaaaaactataagatatacatatttttcttatgttagtgcaaatgcaagacaataataatattgtattaatattttttttgtcttaataggccaaatatggatagacaatatttatttaaaaacaaatatttagatacaaccataaacaatcacataagattcattgtttggatagtggggaatcctttgaataactatgaatagaaaaggaagaatacataaacttgcataaaaccgtttttaaaaacaattttctactattaatcaatatatattcatgatagagacaagctaaaaaaaaaaaagtcaagtaatagttttcaaggataacccaaatgtatataaatggtaataactttcaaggatatcccaatcgaggggaaattgagaagaccttgtaataagtcaatgtgacttatgagacacgactttgtgcatgtctaagttagtaagtggttattatgctttatggtaaagataaaaactttaggattgcaatactatggagaccaagtcaaattaaatatttcttcattttaagtcataaacaaacttgtacttggaacaacatatatgtagacaaaaaccaaaaacaaaggtcaagtataatagcttccaagaataacccaattgaggagaaattgagaagacttcgtaataagctaatgtgacttatgagacacgattttgtgcatatccaagttagtgagtgacaattatgttttgtagaaaagatgaaagctctagaattgttatgtcatggagaccaagtcaaattatatatatatatatatatatatatatatatattaacatgaaggaaagggacaaaaggatggattgattaaaagtctttgattggtttatgttgtcaatatgcatggtactaaatcaaaatatatatggcattttaaattataaacacaatactaaaaatgaactaaattttatttttgtaattctttaaaaaaagttgatgaaataagactttttatttatttttattttttaaaaataaaaacttttatataaaaagaacaagcttttataaattaagcttatatcattgaaaattatttttaatataattctttaatttgtttaatcaattattaaaaatcattacatttttgtgtaaacttgaacctaaatttactagttatataatttgcaatttcttaaatctcaagaacttcttgaactagaaatagattttctcaatgacaatttgttcttgtacgaacacaagaagaaactggggattttttttttttaaatatatgattgaaaataattatttaaaaaataagtaaggtattttttattaattattatttttatatattcaacttgtattttcaaaagatgaattcactttttatactctaaatttgtttttgtttttttttaaaatgagtttgctttcaagatgattgtcatttttacattgaattaagcagaatattttttaaacaattatactactaatgcaaagagcccacgaaaatggctagtacccattgtgacaattatgaggcataaagttgatatgtcaccaaatcacattactcaccataaaattgagaccaatgatcgattaagcttaaaataaagtgtgtaaaaaaacaaataatatatgtctaaacctaggaatgataatttgaacacaatattgtcatttccttagtcctgcagattagttagaaaaaggaggaagattctatgaaagaaaccctaattaatttgttcaacttccaaacctgaccatggaagaaaatatcggtaatcacggatatatcggtacttcgattttacggatatatcggatatatcggagatatatcggcggatattttggaagaaaaaatcgataggcttaaaattgttaaaaactcatggaaatgtaaagaaaacttcataataatataattagaagtataatagacattttaaagttgttttgtagaaaaaattgatatacatatgatataatttgcgatattaaatgtaattatatcatgtcgatctataagaaatgttaattttgtaattgttctcattataaagtcacataaaatacttcatttcattaaatagcaataattcgtacacattacattacaatgtccctttaataccaaaatgaggatcgatgtggttcaatgggattgatagatgaaggaacgacgtcttgctgttggagacaatattggtaccaactcaatgagcctcgataatattggttaaaaattctaacatgccatgcatatatctcttgagtcctgcccactgcctctacatggataggatactcaaagttcacccatgtgttaatgcccaatcctcattccatctgatatggaacttggtaagacatttgtctagaaggtgaataacgcgacataccatactcttcatctgttgaacttgaaggttgaccataactcatcacatgaggagggtagacattagtctcattcgaggagtcactaaattgagttcctatactcatagattcaaaactccctgaaagtaactcctcattatatggttccatcattcgttctcttcctctatatggcttcccaatagctcctatgcctggaccagctcttctagagccatggtcttcatcctgtgtgcagtgtgtgaaagtattttcacaagtgaattggctaactggatattgactatgttgacgttcattaatatctcctcccgcattatcacctccatcatcagttccacctcttgaaccatcgtaaccagaagcagaagtacctgcagcactaggtctactactatggccagcacttgtggagtcaatctcttggtgggaatcatcagtatctttgctaaaactttcagagtgaacttcttcagacaacacacgttcaacattaactccaaattctcgagcatgagcagcaattcatggatcgggatatccaacttcgtcatccaagtgtataggtctcacccattggaacaactgattatcttcttcttcacccacctcggctgaaatgtcaagaagatcaagataatctttttcagcaactcgatcattttctgcctccatatcgcgtaactttagcctcatattatagtaacaaaaaactaattactccaatcgagagtaagccaaacgatttcgttgctttgtgtggatgagagcaaacgtgctccaatttctctcacaggcagtagatgacgcggtttgtgaaagaactttgatggctaactttctcaatgtaggtgtttgattcccatacataaaccaccattcagctgcaaccaatttgataatcatataaatacttatgtggtgaatttacaataatgataatcaattttttcctacaaagactcaccgggcaccatggttgaccttgctgcaattgtcgctcgatcaccgaatcctctttttgcatctcgaaaaagcacaagctatgtattcaacatttaatttgttaatatcatatttgttagtaaacgttcaaataaattgatgaatgaaattattgttttatagacaaataacaattttttatttacctcatttccaaattgaccaagtgattcagtagttggatctaattttgcaaaaacatcatggaccgcttgaagtagttccggatcactaccaactccacgcctatattgaaatcttggattcaagaagtatgctacaataaaattaagtagagttagtatttttttaaacaaaattaaatacagagtaaaaacttataaagatatatagtacttaagtacctgctgcatgaagtggatgttttagtgttttctcccaacgatcttgtattattttgaacatccaatctccagctccttgacgcgtaaggttcgttttcatcacgtgcataagctcatacacaaatggcattgtgggaacaacttcagaatccataagtcgaagcaccacgtataatggctcatataatgaaactatatttgtcattctgtcccaatacgcatggtcaaacaataattgctccaactctcgtccatgttttgttcgactcagcttgtgttgtgcccaatcatcactcataaacaattttttcaaatcgaccctttttttaagaagactatcaagagcaatataattggtagcaaaccttgtagctcctggtcgaacaatgtctccaccacaatacagtctcatttgtgctagtaaccaaccatgattgtaaatgaagttagttatcttgcgagcattgtttatcacctcgataacactgggtcttttaccaatgtcttcaaagattaagtcgatgcagtgcgccgcacacggagtccagtataagttatacttcttcatcaattgtttccctgctttcatgaacgccgacccattatctgtgacaatttggaccacgttttctttaccgacttctttgataacagtcttcaataggtcgtatatatacttgtggtctttgatatagttcgatgcaccaactgacttaaggaagaccatgctccctttagaataaaccatgaaattaataatacttaatttcgtgggccctgtccatccatctgacattattgtgcacccatatgtcttccatttttctctttgttggttcacataagcttccatgtctctgtactccatttccaagtacttgttctttatgtcaaatggagatggaggttcgattcccattcctgcacttcatataaaaaaaaatgtaaaacatgtcacaaaagactatacttactaaaagtgtaacacaatataacatttaaaaaattagtaattaccagcttgttgtgcaccaataatcatattcttgaagtgatgagactttgcttttacgggtgcgacgctctcataaatgaagaatttgctaattaagcgtcccatcgtttctttaattgcaccacccttgaatgtatctttgatatttttttgttttgctgcagaagacttgtaaagtgaaggggcaataggggtgattgttgcgaatgtcgcatactatgtgattttcgcatcatcgacggtaatccagtagactgtgaagactcccccgttttgcgtttgcttcctacaatattgtcatattgttcacgttcccattctgatgctttcgaggcacgaactgcagatcgatatgcatctcgctcatctgggtgcatatctgtcggatacatagacacatcttcattctcaacatcttcatcatcatcatcttcttctaccaaatgtgtatgatgagtccccattgtgccacgtaattgagcacgaatttcttcaatatctgcatttttctttgcttttgcttttgttttgtcatgcactaggaatcgtatctcttctttcacttcgggcggcactctcggacactttttggtgttgttatgcgggtctttttgcattaaatgaaacttgaatcgcgtgatgcctccacttttcatcaccaacccacagaaattacaaattgttccatttcggttaccctcaatcggtaaacaatacttccaagccggatctcgccctggcagggcagaaccaccttcactagccatgctaaatctattgcaataaaaatacacttgaatgtgatttcaatgtaaacaaaaatcaagtcaatatttaaatttaaatatatgagaaatgtacaaaataatgataaagaatgagcatagttgatattccatatatttaattaaactaattaaataatttagctaagttaattttttgaatctaaatctaattctatgaaaaatttactaaattaaaaattaatcataattggatatgaaactaaatcatgataatcataaaaattgaacatatttaatattccatatatagtagttcatgttaattaaactaattaaataatttagctaagttaattttttgaatttaaatctaattttatgaaaaatttactaaattaaaaattaatcataattggatatgaaactaaatcatgataatcttaaaaatggaacatatttaatattccatatatagtagttcatattaattaaactaattaaataatttagctaagttaattttttaaatctagatctaattctatgataaatttactaaattaaaaactaatcataattgcatatgaaaaaaaatcccaataatcataaaaatgaacatatttcatattcaaaatatactagttcatgttaattaaattaattaaataatttagcatgttaattaaattaattaaatgtgaaactaaatcacaaataatcatctaaaataaacatatcaatttataattaaataatcaaattaacctaagtcaattcaataaaaatatacaaattaattactattgaatataaaaataacattaaatcatccatattaattataattgcaaacaaaattaattacaatttaaaataaacataccttcaaattggagtaatgagagagcaaatgaagaatgaaagcaacaatgggtgaaattgatggaaaaatggcaatttatagaagaaatttgggccaaaatagctgttggaacaccaatttactgttgaaattcaaatctggccgttggatcataaactgggacaaatctggccgttggatcacattattaacgttggaatcgcatctgggccattggatcaacgcgggggaaatctaagccgtcagatcgcgctggagagaggagcgaaaaatcggcaaaaaatcggcgatttattggcgatttcccgcggccacaggcgattttatgaaaaaatcgccgatttattgagattcggcgatatatcgccgatttatcgccgattaattggcgatttttggcgaaatttcctccttcgatttttctcctccatatgccgtgtcgccgccgtccgatacaagatatatcggcgatatttcgctgatatttcgcgattttttcctccatgaacctgacacccacttcatagctctgtgcaccttaatttaagtcacaccaataattcatctactagaccaaaagtaactgccctttttttttttcccttattcttctctcaatattttctaagtataaaacaaattaaaaaaaaatgctaattatctgctttctttgttgactggactgggctggcaggtaggctctcttacatggagttgccctagtcttcaagtctggttattgttatgcccaaaaagtcccacagaacccctatataaattgcctccttattggaacgaagaagacaacccaagatccccaaggaatcagtagagagaagaagatttggggtttgggaaatggaggctttttcagttgttaaggtgctcatatagctttggtgggtgttcttggactaggtggacatgttccttcatcaattagtaatctaaagtctttagactatgtttggttcttggaaaatttgaaagaaaatgagggggagagaaaatagagaggaaaagtggaaggaaaaaaaaatgaaggaaaataaaaaatagattcaaaattaataaattatttttatatgttttttcaaactcattttacttagtttcctctattatataaagattaaataattttaaaatatataaatttttaaataattttaattatatttaattttctttaaaaaagaatttttgcctacttgcaaactccttgatagtatagttagtccattgacacttaacagtcaaagtcaagatacatgtcttatcaaatcatttattttaaactacattttacccgatcaacttaaaaaataattaatattactttaatttataaatgatctaattggctgagttttaagaaatagattacgatagccataaaaattataattgaactccaatattataataaacatcctaatacaacacatggtcatgaacaatttgtttgttttttctttttaaattgagttggaagttttaactttctctatttcaaccaaaagacaaactattaggattaaatatgtctagtcatcatatatgaaaaatgtttatataatttgattttgtttgtttggtgggattgacatgtgagatatcaaatttaaaatctgatttatgaaaaaaaaattatttttatttaaaccaaaaggctaatgtatcattttggtctttctataatgaggaattttaacacgaaaagtcttcgttggtcccctatttgagttggaaatttccaagaagtttttcgtagagaagaagagtaagatgaagttacagtgaatcattttcatatcaattgaaaaactcttttgatttctttgggaagaatgatgtctaaactcctcctttgtttagttttcttcatctcatgctctcgacctcttccctcgtctttctctaattccaccaaaccgtgctctcatcaccaaacccttgctctgctctagcttaagcaatcatttcctatcaacaattacaattcttcgaattgttatagctatggtgtcacgtcttatcccaaaacagagtcttggaagaagggcaatgattgctgctcatgggatggggtcacatgtgataaggtgataggctatgtaattgggttagacctcaattgcagctagctctttggcatcatccattccaatagtatcctcttcttctttcctcacatgcaaaggatcaatcttgcttccaatgactttaatgggtcctcttttttagctaggtttggccgcttctcaaccttgatgcatcttggtttcacttggtctgtctgggaattatcgagcacaatttgccccgcatggcttcaattctctggttcaaaatttaaccaagttacagaagcttcaccccttaggaatattcatcccttctgtttttcttgtttccttgccaaatcagtcttctttaatatcattaaatctctcttcgtgtggattacatgggagatttcctggccatgacattcatcttccaaaactcgaggttctcaacttatggggaaattatgacctctttggaaacttcccatgattcattgagaacaattcccttacggagttagatttatcatccacaaatttcagtggagtgcttctagcttcaatttccaatctaaaatctttaaagactttggatctcaaattttccgaattctcaggtccattcctacttggctagagaaccttacacatatcactttcttgcacctcgatgggagtcattttagtggtaaaattccaaatgtttttaacaaccttagaaattttatttcatt

SEQ ID NO: 12464 - DNA, 3014 bp, Vitis vinifera
  Intron number 2 from transcript GSVIVT01023865001 (locus G SVIVG01023865001) derived from phytozome v7.0 (chr-ID chr3 ; pos 2898270 to 2901283 reverse strand)
ccagaactttgatcaaggaaatacagcaatccgttgaattccatgctggggatcactgcaaactttgattggaataaagatgaagtagattaaaactcagatcaaggttgtggctctctctctgtatctctgtctctctgtccctctctttttctctctttgttttgcagtttttgtgatattcatgttcatgcagattctgaatatttgtgttacctgagctttggatttgggctcaaactcaaaaacaccatcatcattgtccatgaaatttcaagtttgtagccaagaaaaaatggcagtaggggtgaatatgtgagataatagcaaagaaatatttgttagtaaatatttgatttttgttgttgtcattctattaaattattgttgtacaagtgtttagatccatggattgtgtaatgggtacttcagctagctgtttgtttcttggattcaaccctatgtccatataataatgaacccaccgacattgcccattctcacaagtaaatcacagcatcaaccccttttcatcatgggttcttttcatgagtttgaaggctcaactgctttttaggttgtaaatcactgaacccagatcttatatagtgagttcttaccaaccatggaggcaggatgcaggatgcaggaggctactccccatatctacctctctgtctttggattcaagtcaaaagttgggtattaatgcaattcaaaagcaaaccatttggactagtaaaaagggggcagagaacagggcattggggacatgttgattctctgcttttttttcttgggtagatggcaaagtgggggtgtcaaattttgtattttcttggctccgtatgtattcatattttgtttggtttgggggtgtgagggaggaggaacatgcaaacagattaaagaggaaagaaaaagtggagtgtttgccagcagggaatgaggtggactggtggaggaaccctaaccccatgtggcacccctaatttgtggtggggtggatgggacaccatgttactctattttaaaggattctttgaatgtgatttattagtgaaattaaagttttttttagtaaaatcaagtcatattattaagggaaaatcctaaaattccaaatgggtatttgccaagctgtcaatcctaggccattaatgtgtatcaaatttctttgaatagttgaataagaaagacaaatgagatacaagtacaagtaaaatgagatttggtataaggaatttttgccatgtcacaggttttagtccatcaattccgaagaggtggtatataaaatgtttcatattaggaccacaattttaatatactatataagatttagaactcgttttatagtgattttaaaaagcatttataatatttttaacacttcaaaatttttatcattcaaatgttaagaagactgtaaacgttttttataatcattatcaaatgctttctttagtttatagttttttttttagtatttttattaaaaatgcttttaatgaaaatcacttaaattatgtttggttctcataaaatgttaaggaaagaaaaaaaatactaaagaaaattattttctcatgttgtcctatgaaaaatattaaaaaaaaatcaaatataattaaaaccaattagaaacttatatatttttaaattatctaatttttatatctatgagttaaaataaataaaatgagttagaaataataaaaaaaaaattattgatttttaatttattttttattttctttctcttatattttcccttatatttttttgagaattaaacatagctaattgaaaataaagtaaaacaaaaaaaaaaattattaatttatagcgtttttgtagtatttttattaaaaatgcttggaagaaaaatatttcaatatttgaaaataacttaaaatgattattttaatagtatttttggtaatgtattatataataaaaaaatatatttaaaaaatcatttatcaaattattgtttaataattactttaaataattctctaaatttttaaaaataatttccaaaaatctatcaaatgcttaaattttacacaaaaaaaaaaaaaaaaaaaaccttttcctaatgttggaaacacttccaacctctctcaaaccagctcttgaagtggcactctaaatttcaaaaatttaccaaacatttaatttttatataaaagtatttttaaaaatttattttaaaattacttccaaatgggttcttagtattcaatgtcaatacccttatcataaatttttatacaccaatcatattctttgtatttcaatcatatttttataatttaatctcattcccgatacttttaactatatatatatatatatattttaattatattcttattttacgtattcaagtaagtatttggacaaagacatcccataccgtaccaaaaattttgatttgatactaaagagagacccttgattaaagggagtgatgctgctgatgcattagaagaagttggtaataagcaaggtggcaacaccatcctcttggttcctgccaacagagctgtcggtggataaaataaaacgaaattatgagttgtgagtcttatgactcatggccttcttttgtgaaccaaaaaaaaggggctaattaattcttggattgtgaattgacatttgactaaaagcctttggggcacatggatcccaccatggtcgcaacccaatgtgtacaatttgcaattaaggttcgttggttgagccaatgatttaattaaaatttttctagatttaatcttagatttactttctaaaaaggatctagagataatatagtgtataatctttgtggtcaaattagggccgttcatgttgtttgcacatggagggattcagtggcacctaacccatctcaaaggaatatcccccttttgtttggttttttgattgaaggtgttgttgatcagtctcttttcccacactgaggataagagtgggagtggacagagggagagagagcagca

SEQ ID NO: 12465 - DNA, 10446 bp, Vitis vinifera
  Intron number 4 from transcript GSVIVT01011279001 (locus G SVIVG01011279001) derived from phytozome v7.0 (chr-ID chr1 3; pos 10468707 to 10479152 reverse strand)
ttgcgagtaccaacgttggccattcaccttgaccggtttgttgcttgttcctttaaagacatgatatttttaattatattcaatgaattaaatgttacataagttttggtttatattggactgtctttgaataattaaaaagcattctatggtctatattatagtgatgctataggtttaatatagaaaattcacagatacatgcatgtaaccatgtcttggtatctagattacggagttgtcattttggaactttagatttgaagcctccaatctcaagttagtgtgtctgaactttaggcctcccttaaagaggagctgcctttcttcactttacctaagatggggtggcatagttcacaatacacagtaacttccccaatttgtctacctatgtcgagtagttgcatagctgctaaaaccacctccttgggtaagtcttcatgattaattcttggatgccatcttttggattattgtggcatcaatatgttgtttggcctagatgtgtcatggtccaaaacccactccaagggtatgacggtcatttcatacctcaagcccagagactcaaagtggaaaccacacagacattcatattgtaactggaaattcaccaattatcaaattcctgttcagagtagtaggacaaaattttaaaatctccaagtatcaacttttaaaaaaaaactaacacatcaatcagagtgttattgtccaaataactccaaattcaaataatttaaatggagaattaaattttaatatctaaataatgcccaaaataaagtttgaaccaaaatcctaatagagaaaaattccccagcctagccatcacttctcgcccgaactaagagtacctgaaaaattatcaacgaaggggcatgagcttaaagctcaataaggaatattaatacagtttcatggatcaaacattttcaatcatgcttgcaaataggagatataacatatacttatttttataaaaacttttgagttcaaaatactaatacactcaaacttttcaacaaaactttctcatatccttttcaaaacaatttctcatcaaaaccaaatcgaatgtattcaaaatacctttactctggttatcaaataacaaattgtgcccaattaggtggggcttcataaatgagtggctagtttcaaatttgttctaattaaggtgaacaaaaccaaatgtcaacaattataacccgttgactagggccatataatatcaactattagaacccgttgattagggccgaaaatgtcaacaattataacccgttgactagggccatataatccagagtcaacactttattttattaattcaaacttacaaaacaaaatatcatatctcctcaatttttcatttttcataaacaaagaaaattctcaaatatactttccatacaaaacacatatttgatccatgcgaaaagataaaaataatatttttacacatttcaaaatacaatataaaaaaaaatattttcttttataaaaatttgcattaatttcccttaccttgaagaagcgttcaaaaacttggagtatttagcttgatgaatttactcctcacctaacataatatcatacacaattatctaaaggtaaaaatttgacaatcctaaatatattttatttagtattagggatcctaattaacttttcatgctaatattattactacccaatattattttcaacttcttaaacaataataatataatttaatgaatttccaaattttttataaactcatatttcttccaaatcttattcaaccatttatttcttttgtatacttaaactaaattaaaacttttattaaaaacaattactattattattactatatttttttcgataccccgtaacatccaaatagtcctgctgtaagttacttacaagcatccaaatcacacaatttttactattattattattaataataataataatatcattattatcattattcttattaatcccaatgtcccctcttacttaacaaagtaccccatgtacttttaacaactctaacaaccccactaattctactcattatttttttttataggaaagaacaaatatatatattgaaagaataagtacaaaagaaggatgaggaatcctcccaccaaagataaaactaaacaacacaataaaagaacacgaaactacactatgaaaactacgaacaagctctcttggctagaccatcccctcggaactacacactgctagccaatctatttgtaacatgttaaagggaatgcccttaaaaaccgcagaacaataagcccaaaaagaagctaggaagtgaatggaatctcatagattctctgaattcctagctttgtcctcaaatatcctagcatttctttcccgccacacaacccaaattaaagcaatgcacacattttgccacaaaactatccttcttttggaagtgtcaaaacctttataattgataaacatcatgtctgaaatgcttatcggaggaacccaatccatcttggctagctaaaataatctgtgccacaaccccatggacaaggaacaatgtaggaaaagatgatctactgattctccttgcttcatgcacaacttacaaatgtcaggactaagagctttgtaggatcttctcaattatagcaagtcattagtgtttaccttcttgtgtgccactaaccaaacaaaggacttgactttgaaagggacttgagaattccatacaaacttagtaggaaaacaaggagataaatcgggcacttgggacaaggctataaagaaagacttgactataaacaatcctaaagaagataaagaccaggatctcacatctgaagccgaggtggataaatgcatacaatcaagagatcacatgaggcattctagatcttctatctcagaatcggaaggattacggcggaaattaaagttctaagagaaagggcgagcagaaccgagaattgaaaaaataggactatttttatccgtgactactctaaatagtcttggatattgggatttcaaaggctggtccccccaccacaaatcttcccaaaagcgaattctttccccatctcctaccacaaaccgagtatgcttggaaaaatcttgaaagacttgtgcaataacctttcaaggacaacgatgtgaccatctgactaaagtgttggcatcccaaccatttgtatgtgtcccataaatgcttagaatgacctgatgccacagagctgtactctccctaggatatctccacaaccacttccttaaaagagcaagattccttaaagaaatctttccaaatcccaaacccccttttaccctcgacttacacactacatcccaactaacaagatgatcttttttaccttttccaacccctgaccaaaggaaatccctttccaatctctcaatttttgtagccactgaagcgggaatcttaaacagagagagaaagtagctaggaatgtgggaaaggcaagagtggataagagttatcctacctccgaaagataagtaagccttttgtcacccgtctaatctccttgagattctctcaatcactggatcccaaaatccacaagcaattgggttccctcccaaaggaagacccaggtagagtatggaccaatcagaagccttgcaatcaagcaacaaggctagcctagagagatgatcctgatcaaggttgatgccaaaaatattactcttgtcaagattgaccttaagctcagaaatttgcctaaacactaacaataaactcttaagagttttcagttcttccgcgcaagagttagaaaagaagatggtgtcatctgcaaattgcagatgggacaccctagttctattcctacctaccctgaaaccctccaacaaactttttcctcagctctcaacatcattctactcaacacatctgcaacaatagtgaacagaaaaggggataaagggtcaccttgccttaatcctctagaagtcttgaccaaccctttagcatttccattcactagaatagcataagagactgaagatagacaacctcttatccaattcctccatttatgactaaacccctttttctccaacacgtgatccaaaaaatcccaattcacatggtcataagccttttcaaagtcaattttgaagacaactccttcctccccagatcgccttttctcatccactatctcattgggtagaagaactccacccaaaatttgtctcccttgaacaaaagcgccttgagtagagtggatagttttgtgtagtactcctcttaatcgtcctgatagaactttggttattaccttatataggcaagtgatcaagctaataggtctaaaatctgaaatcttctttgtctgcctttttttgggcaaaagaactatgaagaaggcattggtgctttgattaataatcccgctaccgtgaaactctgcaaacaccctcactaagtcttccttgatcatatcccaacaatcctgaaacactgcaatggtaaaaccattaggcccccacaccttatccctatctaactgacaaatgacattaaagatctcttcttcggagaaaggggaatccagcctagatgcactctctcctgagattggggaccaatctatgcctttgactctccaagactctccaggaggacttgagtagagctttttaaaataaagtaagatctcctctgtgatgctcttagaattatccaacaccaagcctttttcattctccaaaaacttgatgaaattcctgtttcgtctgccatcagccactttatgaaaaaactttgaattgcaatccccgtctttaacccatttcaccttagctttttgtctccaatgaatttcttccctcaatattaattcctttagctccccttttcttaaaactctttgagcataaagattataagagagaaccccttcttgcttaatggcatcaatgttagatatttcatccaagatgctttttttcctttcctttagcattccaaaagtattcttattccaatatttcaattttgccttaacaaattgtaacttcctcatgaacctgtgaccctcccaaccattgccttcaaattctctccaccaactactaaagcactctttgaaacttggatattgcagccacatattctcaaacctaaaaggtgttgggccccacttgaaaggattggtatccaaaacaattggccaatgatcggatgtccatctaagaagaacttcttgaaggctttgagggaagaagagctcccactcatttgaataaagaaaccaatccaatctcttgcacaccgacgactcttatatgtttgaccaagtgaaaggggcattccgtaaggggggatcaattaattcacaatcacttataaaaccatcaaaatccctcatgctagaagtgaaactagagccacccaatttttttgaacttctccttataacattaaaatcatcacccacacaccataatggaaaagaaaggccaaaaatgtctaatagctccacccaaaaatccttcctaattaagggactgtttgggccataaattgtggacaaccacaagggtccacatccatccaacaaaaacttgattgaaacaaaaaagatccaattaccacctcctcactgctcaatttctttgagtcccaaatgatcaaaatccctcccgaagccccgcacgtcggaagagcagcccactccttattcctaaccgaccagacactacctacaaaccttttatcgcacacctctctttttgtttcctgaatcatcactacatcgggattctcgagcctaaaaaaatccttaaccacccttctttttttcctagaacccaaacccctagtattccaattgatgattttcataaatacacctcattgacccaaaacgtccaaaccaacgccaacagatctcaactatttgtgtaaaatctgttcttccgccttgaatacaccttaaggtccagagaacttaagacctcacagactttggccattttgctaggggaaaggccttctatttggaacctacccatcgggggggactccgcatcaccttggctaactgtaaccaggttgggaggcccaagaggcgagttgggattaggcttaaaggatttaaaactctcggacaaatggttcagactgactaactgggacactacaacatctcggttaggattgccaacagacccaagacaaaaagccccatcgccatcgtcatcttttttggaaaaaaaatcatgtttaactcgaggtttcgtaggaaactgagactgaatggctgaattgggaagaacgggaacagaaggacttaggtgtggaagaaccaagctagagggagggggaagaagagacagagatgaccgagaatgttgataagaagatacctcgaggttttccactcccatcattccacaagaccccacagagttgagccctttttctctagttactggataagaaggaaaaacagcgactgatgagccacgatgaggaaaacccgcaaaacccttaaaacctgctctatcttcacctttagagaagttgggtaatttatccttcccttttgatagaaaaagagccttaagaatagacctttgatccgcatctccactcggcggcgacgttccttcccaatccccgaaacacctttttcgactccctgacgaacgacttggactcgcactgaagctccgttccaactgtgttcccgcttcgaaagaatcttcctttggaagatcatcgctagctgacgacggtctctcaagcgttagaggctcacttcaactttgacccccttgtcgacaactagaacttggagggaacggggcattccacagcttctttgaaccacaattcaacacggaacccctcacttgagcttcagaagcctcatatcctaccttcccctttccctttgcagaggggtcatctctgcgtaaagagcccttcatagagatgggttgtttgcctcccatttcttgacccaacaacgaaagcgggccaaataaagaaactcccctcttccgacccaagttagtttcgacctgtggactgggcttaagaggagattgggtccttctcccttgtttggaggcccgaagcccatcctcaacatttgattgggctttgtcctctccaacccaaacatctccatcctgccttgacccgacataccttgttctcagaatatttgaattcaaactgaaagactgggatggttaggaccagctgttccccactgttggtcttctcttgccacgtgtccccataagagcaaattcaaccttttgacaagcttttccttcctttattctgccaactaccccatcagaagacctacctacaactgttgatttagcctcctcagccctctttctgccacctatccacgagtgaggttcaagcttctgtcgagttgactcacccatttccctaacgtcttcctttccagccactgcaattgaaactatgaactcccatcccccatttcatacctcgatcaaagctgggagaattgatcgttccttcattacaactttcacccttgccttgctaagatcaaatagttttattgttcgccaatcgatctctgttacggtcccccactgctctataattttcttcagatgcacctcagaccataaatgaaatggcaaaccccataattctaaccaaccttctctaaatttcccctctattactgaattttcctttggcgaccatcttcttaacaagattgtaggcccacccttgatcctgataaaccttaaatcgtggaggggtaaagcttcctctatggtttccacaaaaaataatccttttccaccggagaaggggatgatagtcaccacacctttatgccctaatcttttcgccaaagcccggctgacctcagcccagttaacagaaccagcatgacattcgcacaccacaactctcgcctatctcccgactggaacaaggcctcctctccttggtccttcttctctgactacattcgcgaaggaccggcacaaaggacccacattttgtgaaaagtccctttttccctgcactgtcttccattttcatctgtactcgaggaggggaccaccaacattgaagacaacacaatctttagattttcccatcccctaccattctctccctcaagtattaccaggaaagttgactttctgttagaagcgaactctaagagccttataaacctaccatgattgttgaagcaaacctccattaaatggactttagtttttccttcgaattttctgttgaaacccatgaaattcttcatctcaatggccttcatcaaatgttctatcatccaaccaacctcttccttctcaaatcctaaggcataaacagagcctctactgcactctgtaagcgaacaccattttcccctggcctcaccttcgaacctaaccaagaacgtcttcctctccacagagaccttcaacgtccttggcattttctccttcaccaattctactcattattattattttaatttattccactaccactatttgcctctcacgattacattttttttttttttctttctttctttagtgcctcaaatccaaaatctagaaacatgcaattctttttcttattattttccaatcctttaagccacatataatcatagatttatttactcatttaatttttaaaatttcattgtttagatctattcatctaaaaaaataatttcgaatttccctattttcatcaatgaaacaacctatattcataatttcaatcttttgatcttaaaataaattaactaaactaaccctaatttaaattaaaattttctaaagaatatctaatgtgttcaaaactaactaacgaatataatatattaactagggttagaattttacttggaaaaatctgaacttctaactctagacctccaaacctttagccctacgttctccaatttttttatttttggttaatagagttttctgaatggagaagatgagaggaaaatctaatttatacttagaatttttaattgtaaaaggactcttttacctttaatgagtttaattaattcattaattaatttttaatttactattttgcccctaaagtttattttggggtattacatctctaatgtcccacattggataggggagaatgttcttggcgctatatatgtagaggttcctcttaatcaagtagacgcgttttaaagccgtgaggacccctttaggttcaaagcggacaatatctacactgttgggagtgagttgttacaaatgatatcagagccgatccccgaccccggtgtgggggtttatttggccccgtaaggggtgtttgtctgtttaaccccacaatcccatgggatacaacgagggcattttgtctgcatgagggggtgtttgtaatgtcccacatcggataggggagaatgttcctaacgctatatatgtagaggctcctcttaaccaagtagatgcgttttaaagccgtgagggcccctttgggttcaaagcagacaatatctacacggttgggagcgggttgttacaagatgaatctgtctttattgcacaaaaagcaagtgattccatgtttgagagccaggaatatgaaatggaagatggttactgagtattcttcttaattagcaaaaaaatatggaaaagaatctattaaggttcttttaatacaccaatcttcaagtgtcaactatgtggaatcaaagaacaggtgttcacttgagtcaaaacttctcaaaacattgataaaaaattatgtatttatgataaatggaagtttgaattgttaatggacttttatatgacagatagatctgaatgccttaatggcacatattgtgtgaaatttacctatctttaattgcgtactttcttcttggttaattaattgaggaatagaccatggataagatcattcaaatgaagataactataatgttaacaataataatttaaaggaacatctcttggatttagaagtcagatgaagaatttcaagaactcagtatgtgttgtagtacatatattaaaattttattttccaaataagtaaattcatttttctttttaggggtgcacataagaaatgcatgcataattctatttcattatttgggtgacaaaatccattttgttttttggggtgcacataagaaattccattttgttttttcttttttcatgttttcagtgtgttgcttagatggtgtgtagctttgaatattccttttatattttggtttagttttcaaatcactgaaatgtttgagaatttaaaactggcttttacatatggtttgtaaattgttagtttctgttggttgccaaatctgtgtgctcacttgtttttcggccttcttttgttgtttagcacagtgaacaagg

SEQ ID NO: 12466 - DNA, 3592 bp, Vitis vinifera
  Intron number 1 from transcript GSVIVT01009816001 (locus G SVIVG01009816001) derived from phytozome v7.0 (chr-ID chr1 8; pos 11515580 to 11519171)
atcttttgttaaagaacgcagttgaggtaagcggttttttttttttacacatcacccatgtccttttcttcaatagttttcaaagattccgtctctttcttgacccgatttcacaacccgggttcccttttttcaccctattgtgcttcttttccattttttttttctaatttttgtatttttaagtttgaaataaaaccttgggcttgcaactgaaaatgggttgtttctattattcgaagaagcagagaaattgattcctttgtttggctttgcagagtgtgttcttctgggttgggttaactgtgctgattgtttagcactttccatacttcatgttgtggggggttggaatccttggtttttttggttaaagaataagctatgacaaagatagggcttttcaaaattgggtataaggctattagtatgattagtttatggaggttttggggtgtgggcttcccatctccagccagaacgaggttagttatgtttgagagcttgggtcagtaggtcagttttcctaaagccattatttagctaaacatgagctgttggagtataaagggagtgtcatacttagggaatacatagaaaatcctgaaactaattgcatgatgtcctgcctccagaaaccatagatgtaaagttatgttgacatgtcctctccatgtgtcaaagggctgggtcatggagtagggcaggagcagaatggactcaataccatttttaaccaaaaaaaaaaagaaagtcaggtttctagttggttagaatgtcttatgtaaagtaaaattatgttttggagtatgaaccgaagatgtgttaataaattcatgtttctggtatgcatggagacaggttttttgttttttaaatttgaaataatatgcaaagctttgggttaaaacctaaccataaattgtaagttccattatgattctacatgaacacatgatttacattttgacatcggcatatggtatggggcatgggatgctggacccataacatcccaaaatttttatactagacatggttgtttatgctttcacttgttaattaagaattccaagagtgaagtattgagaaagtataaaatagaagagaagggaatgacttcctaacaggttcagtagcataaaggcgtaataatgctttggaggtaattaaatgtggacaatttataagtctccgaaccagttatcggcatgtgtaagcacaagtgtcattctgacaagtgtttgacatgccacttgtcaatgggcagaagtgtcctcttacacatcacaggttgttccttcattttcttttaaaagttagaacttgtaacaatatgaaatgattcataaagaatggtgtgttcagtggcaaaagtcttatgagaacaattgggtccttgaataattcatggttgaagctttatgcttggaagcatgcagttttttcatttactaagttgtagatcacaaaaaatggagaaaaaaaagttatggaagaaatactgcaggttatatggtgatacgtcatagtccattcttgaactccagtttgttaaatcctttatggctttgtttgttaagtaatgcattagtgctgatgatcaaggctgctcctcgttgagattgttaatcactaagctataaggattgaaaaattaatataacaccaatgaaatgaacctggtgcatccggccaattatgatttgtgagatatacctttcctgagaaggcccaaaagagcctgtttggagaatgaggacattgtgaaacaatttttaatgatcaactgtggccttaaaattcgtacaaagaaatgttgcctcaaaagtgttttatgaactacaaatggtatgattgagatactgtagtgctagctgtaagaaaataaaaagtaaaatgctagtagtgatcttgtaaatattgctagctagctagtagaagattgaaaagcaaaacctaagaacaaaatagaaaatgtcaaatttcaaacttatagatgaaaatcctgtttttgatttatgtgtgatgttcaagaatgagatattagatggtttctaagcatgggatggaaatcttaatgtgaaggaatgaaacttaatgatctctcctttgggtgagcattaaagaaagccttatatgcctaatgatgtgcaaaccaataaaaaattgacaatcctcccttggttgccatttgtttgtttgtttcttctctgatttgttggaaatgaatgaggaccaaaagaaaaaaagaaattaaaatgattggggaccaaaagagctcgtgattacaaatggcctattggtttactcgtatgggcattgtgagacctcaatttgaagagttttagagtttataactacttataaacaacttttttggatggactaactccttataaacactagtgacataggttgtggtaatgcctgcctattgtaaggtttaggtggagtttagggttgggttggattgggttcttctatcatgtggcactcaaaataagaaaataaaaaaattgtgggtttgtgaaagcttgtgaattgacattgtttaactattagctataaaactagaaaattacatttaagtttgggggaggaagtgattctatgtttttcattttatactatttttatgggtaattaaatatgtatttagtattacatcatgattttttttggatcgacaaataagaaaatatattagaagcgtctaagaggtcatgaattattattataaaaaaactctataaacaaattgaatctggattgcaaatataaaattaaactaaacatcgagtattacttatgatttgtagttctcattagaatgtaattaagtttctattttccatccttttttttttgataagtaaatttctaaaggaggaaaccatcagaaaagtttctattttccatcctctattggccattataaaatggaggccctttgaatttgtttttccatatatactagtggtagttcataaccagtcagatctgattctcaaacctatcaaactagaatgggttgggttgagttatgaattaggtttgggatgtggtgaaaggcttggtgggaaattgccaccccaactttagctatgtataattgaaaagagactcttaatcataaaattgccacccaactttgacaatgcgtaactcaaacaaaactccctagagagttgccacctcaacttctagcaatgcataatgccatagccccagctttgaaacaaggatgcaaatcaattcttgaagatttcattatcaacccagcttttcaacttattatgagactatgaaagttttttctattaatgatatgaatttgctacttgttcttcaccccactctggttcaaggtcacaaacaaattccttgaagagttcattacttttcaatttttaatgaggctattgcaagttttctcacatgatgagacaataatattgatttcatatagctcttttcaatttctctttttttgatgcttgaccaaggagtttgagattaaagagttaggaaaaggaatggctgctttctcggaggggagaggagctccgaaggggggtaagagctggtt

SEQ ID NO: 12467 - DNA, 17143 bp, Vitis vinifera
  Intron number 3 from transcript GSVIVT01013340001 (locus G SVIVG01013340001) derived from phytozome v7.0 (chr-ID chr1 2; pos 12339558 to 12356700)
ccacagcttggtcagcttacaaatttgcaatatctgtgagtcatatttctataatgaaatttgtttgccatatctgtttgatgttcaagcatatatgcttgttatcttttatgttcccttctgatcgcttttccccccattacagccaaagccataaattgcaaggtttccatttctgtgtttttatttctcattgatatgtggtaatatttttatgagctttacattagtttcttgtagaaatatgtagccttggtccttagaagggaaaataaacttcaacaattctattggttacttcagaatttttgcttcgataataataataataataataatttcttcaataaagaagcatgtggttcagtgttcagttgcatcaagttttcaggggacaaatattctcatttgttcttcttatgcgttcatgacttacattaagaattcatatttttcctggttacagattctgtcccaacattaaggtttcacttagagaaatgaacttcaagagcttgtttggctgtgtttcacattttatgtttctaatagtgttttaattatttgcttgtgatatctgttttcttcaatttgccctttttctaatctttcatgttttacatattaacactctacattgctttgtattcatcaaattcacctgatatggcattttgatttccattttctaaatagaacatgtttcaagaagtgcatccaaatgagaacaagtgtctttctagaaacatgaaatgttgtcaatctttctttgatcaacatattggtttcctgacctctgctctatcttacatgttcattcttgtcattttaatcggttagatgttgtcatgttatatattctgaacttagttggttttgataattcctgttaggattattttatgattttatttgatgaggtgttacgagtgtttgttcacccctttacgtatttacgattaactgcttcaataattgtaatacttccaaaagagtgtgtttctgttcaccataagtgtctatctagggaaaaccttttatatgttcagaaaattctctgtgagtcatatttttataatgaaagttgtttgccatatctgtctgatgttcaagcatatatgcttgttatcttttgtgttcccttctgattgcttttccccccattacagccgaagccataaattgcaaggtttccatttctgtgtttttattcctcattgatatgtggtaatatttttatgagctttacattagtttcttgtagaaatatatagccttgctccttagaatggaaaataaacttcagcaattctatcggttacttcaataataatgataataataataataatttcttcaataaagaagcatgtggttcagtgttcggttgcatcaagtttcaggggacaaatattctcatttgttcttcttatgtgttcatgacttacattaagagttacagattctgtcccaacattaaggtttcacttagagaaatgaacttcaagagcttgtttggctgtgtttcacattttatgtttctaatagtgtcttgattatttgcttgtgatatctgttttcttcaatttgccctttttctaatctttcttgttttagatattaacactccacattgctttgtattcatcaaattcacttgatatgccattttgatatccattttttaaatagaatatgtgtcaagaagtgcatccaaatgagaacaagtgtctttctagaagcatgaaatgttgtcaatctttctttgatcaaaagaaagatgtcgtcactttacatatttaaatataactgagttggttttgataattcttattaggattattttatgattttgtttgatgaggctgttaggagtgtttgttcgtccctttacatatttatgattacttgcttcaataattgtaatacttccaaaagagtgtttctattcaccaaatgcgtctatctagggaaaacctcttatatgttcaaaaaattctagaactttactatcttactttttatgtaaaaaaagaagcgtagtgtggacccacattattcatgtgagtcccttacttgacagcaagactcactttcttgtaatgaaaaactgcattcttgtaaaaactggagtcatcacattttttttctttttcttttttgtaagggaaagtaaaataagaaactaaaaccctaagaaaaatgactccttaagttttggaaaaatatgtctttaaaaaatttgattctatatctgggaatcaagttacctatcgaaaaggtatggtgattaagttataacacccctttaagttcgtatacctatggtctttactaagcgaatgaagcgattcatgacaattgattaataaatcgaggataccaataatacgacaataagatacatataagtcatgcggtgtgaaacacgtacacaaaaatgtatacaattaatgaatgtgaaacacacaaaatagaatttaatcatttgttaaagttgcaacatttcaaaagaaatttatttgtattggaaacaattctaaattaaagaagtcaaacttatttactcacaatgtttcaatttatttacaagagattcaatttttattcacatccaaaattaattttaaaaaaaaattcttgattttattaaaagaattttgattgaatttgaatttgttaaagaaaaaagtttcaatttgatcttctattaaaaaagaaatgattttggtttaaactttattaaaaaaaaaaaacaagattccacaattataaagaaacatcaattctattttttgaaaaatgatttttacaaggaaaaggggatttatttaatttaattacaagaaccaaatttcaatttattaagaaaacaaatttttacaacttttatttcctctagatttttattaaaacaattttcaagatttttttattcaatcaaaatttggaactttattaaaaccattttgaatattttttttattaaaacaaaatcttataacttttattaagcaaacttttggaacattttatcaaacacaaacttagaaaactttaatttaaaataaaatttgaggactttgattaaaaaattaacttcgagaaaatttattaaaacacttactttgagggtttttattaaacaatttttagaattgattaaaacacttattttgagaatttattaggacacttattaaaacttttaagacttttatggaaacaaactttaagtaaatttaaaagacataacttggagaacaattattaaaatatttattttaaaaattttaattaaaccaaatttgagaacttttatgacttttgtgactttaatgaaaacaaactttgagaatatttatttaaacacttattttaagaattttcattaaacaaaccttatgaaaaaaacaattttaaaagaacatttattaaaatatgctttttagtaaacaaacttattaaaaaaaagggttttgtaaagaacatttattaaaacataaattttagtacacaaacttattaaaaacaaacgattttctaaagaaaattgattaaaacacaaattttagaatttcaattttattaaaaaaacaattttctaagaggcatttattaaaacaccattttgagtaaacaaacttatttttaaaaaatgattttctaagggatatttattaaaaacgatgttctaaggaacgtttattaaaacacaatttttagtaaacaaacttattaaaacacaattttctaaggaatatttattaaaaaaacaattttctaagaaacatttattaaaacacaaattttagtaaacaaacttattaaaaaaaaaatattctaaggaatatttattaaaacacaattttcgataaacaaacttattaaaaactaattttctaagggacacttattaaaatactatttttagcaaacaaacttattgaaaacgattttctaaggaacgtttattaaaacataatttttagtaaacaaacttattaaaacccgattttctaagggacatttattaaaacaaaattttaagcaaacaaacttttaggactttgaacatttttattaaaaaaaaaaaatttctagatttattaaaaatgaattttttgattttgaaatgaaaaaagaaaagaaaaagaaaccattttttaaatatattataaaaacaattttttttgaattattaaagaaaagaattttatgaatttattaaaaaaaataattttttgaattactttatattaatccaaattcctgaatttagtaataacagttcttttatattaatttattaaaaccatttttttttttttgcaatttattgaataaaataaagaaaaactcatgtaagatcaatcaaaaacccaaatatgacagaaaatgaaatatgaggaaaaaagactagcataaatagaattacaaaaaatttaagatataacgaaatatgagacaataagattaatataaacagaattactaaaatttaaaataagatgaaatatgagacaacaagactaatataaatagaattacaaaaaattgaggatcaaatttacacaaatatagaaaacttgaaataaaatataatacatacattatcaacagaataataaataaaaatgacaaacatatagatgagtagaaaaatttagacaaatgtgcatacatacaaaatatagagcataatgaacagataaataaaataggtagagaactgaataaatgataggataaaatattcaactaccaaaatgctcacaaatataataaatataatttctggtgtttcctttaaattttgttgttctaactttatttgttctatttcttttctaacaaatttttcttctttgactaattgttctttaatataatctagttatttcttaacatattatggttcttaaagttttccaacttcttttctaattcctaggactatatttaatttttctaaggattttctttgtcttatctggatttcttctaaacaatttatattatttgtattttctttctgaatttgttttttatgttctcgtaatattacatttgttatttttaattgtatttctactaaaaatttaattgttttacctcttgggtttgtagataagggttcatgaattttcattattttctaatcagatgagctagaatataagttgtcaatataatattttataatttctcttttaattagggtttttgtagcaaaaagtttgtcaaatgattcttttatagctattttgtattcactcaaatatttaagagaggttaggtttttaatatctctagttaaatcttttacagtagtccttaaagtatgcaatttatcatagttttatctaaatgcaatttatcatagttttatctaaattctttacgttgaacatacaacctgttattaagttattttacatgatcatgatttatattatatataccaagaggataagggataaaagacattaattcatatcaaatcagcaagctaaataaacagatcaagtgaatataatcagacttttaatggggtaagataaagttcagtactctaaaaaattaatttgaatcaagagttatttttttctaattaatatactaacaatatgcataaagttctgataccaatcttttcacaaacttttcacatagtcaaggcaaatggctaaaactttgaatttagtcgttgaaaatcagagtgtaaaccatgagaatcaaagtttaaaaccaaaaccagtgtgaatgcatttattatacaatttatttaatgtaaaccctttcaatatacaatgtaaaagcatttattacatataaatacattttttgaagatcagatatctcaaaattctctaaatgaactcaagattttaaagcattatttcgtgtcaaggtaataccccctttttgaccagacaaagtctccttaacatgccaattttccggcaaaaacgagttaaggtcaattgttaagactaaaaactctagtttaaaaacctgattttacaccaaaaactttttcaataacccgatttttttattttaataatttggcagaaacattatatatatataggatctatgtatattgcagatattaatattagtataaataaaactgtgattcaaataattttcatttccctactttatctgtttaccccttttacctcttaagggttagaaaaaaaaaacacacaaataaattaaattacaaataaaataagaacataaatttaatagaaatttcttactttttattattgaatgtagaaatttacaattgaagatacaactaaaatttctctatttctctcaatctctttattgatcattggttgatccactatcagtttgcaactcatttatagataaaatttttacaacacgacaaactaaagttaattagggttgttggcagttacatttacaaagtcataaaggtttggtagaattcaatgtaacttttgacttccttccttctttcttctttctctaatttctagattctttctttttcttttatttgtcatatgtgttttacacagtcaatgggactttattactttgtctgccactttcatttctcgtggttagggacgcatttattgcttcaatgtcgtcattgatgacatcaacgttccattgtgttttacacattttgatagctttcttcatcaagtttttcccaaaatgatgcatcatcgctgaggtaagaagatggttctagtaattctacagtaagctcggttgtaaaatcttgttctttaggggtaacagaaggttttggaacaataatatgttataaaggtttatttctccatatagacatgatttttgtttctccaatgagataaaataatttatttcgggttggtctaaaatcataaatttgaaaagctctaaaacgagtaaaaaattctggaaattgatttaaacgagtcatttcccattctggttcttgttgaggaataagtgattctttattgtgttttatataaacatggtgataggctagtactatcgatccattgatttgaaataaaggtggaatggtttcaaaagaaatgcaaaaactgaaatagtaagatacaataagccaaaaagacttcaatggaaaaccaaaacataactttttagctctttacaaccaatatatgaatatgaaacaatattaaacatagataatacacaagacctttagaaaaccatagaaaattgggatcaatccttaaattcaaccggtgtagtagtatcctttgaggtttaactctttattttctcaaaaccttttttgaagaacataaagttattatagataatttttggtctctaaaaccaaaaatttttccaaaccaaaatttagaatatgcttatggaaaaaccgtgtcagctttagcccaacatttacaaaaccttcaaaaccaactgattgctttagaaacccaaaaatttgaaaaccttaaaatccaagaaaatcaagaaagactgataaaggatttgaaaaccagtacaatgtcaaccagtcaaactagttgttcaaatggtcaacctaaaatacttagtttaattaagaaatcagctcttctgtttgaaaaatatgaaaaacttgttaaaaacctaattggagcaaataactactctttagtcgaaaccttctttctgcaaacccaatataacaaagtgtttaaaaatcaagaacttttgtataaacattttagaactaaaaatgttaagataaaaacagggtatatgacatatcatgaccttgaatttttctttgttatatatttggagtaccctagttcatggatcaaggaactttaaaaaatgtttttatgaaccagatatctcaaatccctgaaaatttcctaaataaatgaaaagatattttaacctatctaataaatgaaaagatattttaacctatcttttcaaaatcgaaaaatagatagacatttcttttgaaaccattccacctttatttcaaatcgatggaccattagtgacagcctatcactatgtttatataaaacacaataaagaaccattgattcctcaacaagaaccagaatgggaaatgacccgtccaaatgaatttccagacttttttacttgttttgaagcccttcaaatttatgatcttagacaaactcaaaataaattatttcatcttattggagaaacaaaaaccatgtttatatggagaaacaaacttttagaacacattaatgtttcagaatctcttattactcctaaagaacaagattttataatcgaactcagtgtagaaataccagaatcatcttcttacctcagcgatgatgcatcattttgggaaaaccttgacaatgaaagttattataatctgcaaaatgcaatggaatgttgatgtcaacaatgacgacattgaagtagtaaatacgtcttcaactacaagaatttaatgcaacagcagaagttcaaaatcaataaagccacgtatactgcatgtgatgaaaaagaagaaagaggcaaggaagaagccactagacataaggtaaaagaagaaagaaaagtcaaatctcataagtctttaccatctttgcatttattgttaactaaacctttgaagactttgtaaatatttttgcttgtcatataccaactgccaacaacccaattaaatttagtatatcatattgtaaaaattttgtctataaataagtagtaaacagagagagaaaaaaaacgagaaagaaaaagcaagttggaagtgagcaatcaaagagcaattaaagtgttagttgtatattcaacctgtaaatttctacattcagcaataaaaagtaagaaatttatgttaaatttctattctcatttgattttatttgtcttttttcttacccttaggggtaaaatgggtaaatagataaagtaggaaaatgaaaattatttgaatcatagttcagttttcttttactagttaatatctacaatatacataaatatttcatatatataatgtttccatcaaattttttttaaaaaaaggttatttagaaagttttttttttaatgtaaaatcaagttttaaaattagaatatttagtcttaactcttgacctgtaacccctttttgtcaaaaaattagcgtgttagggagactttgtctggtcagaaggggggtatcaccttgacgcgaagtaatgttttaaaatcttgagtttattctctgaatttttttaaaatagttgatctttaaaaacataactttgatacaataaatgctttcacgctataaactgaaagtataaatttaaataaatattataataatatgtgataaatggtttcacacagtatgttgaaagtttttattttaaaataacaatataataaatgccttcacactggttttggttttaaacttcgattttgaatgaaaaattttcaagttcctgccatagccttgactgtgaatatctaattatgtatgtggatgagaaaagttggtatcagagctttatgtatattgttagtatattaattaggaaaagtaactgttgattcaaattaattttcagagtaccaaactttatcttacctcgttaaaagtctaattatatttgcttgatctattaattaagtttgcatgtttatttagtctgatatgaattgatgtcttttattccttattctcctggtatatataatttagattatgatcgtgtaaaagaacttaatagtagattgtatgctcaatggaaagaatttagagaaacttgtgataaattgcataatttaaggactattgtaaaatatttaaccacggaaataagaaacctaacttctcttaaatatttgaatgaatacgaaataactatacaagaagcctttgatgcactttttactacaaaaaccttaattaaaagagaaattataaaatattatattgataatttatatgttagttcatctaattagaaaatattaaaaactaatgaactctcatctacaaacctaagaggtaaaatatttaaaatttctagtagaatcacaattaaaaataagtagtcttacaagaacataaaaaccaaattcagaaagaaaaccaaaataatataaaccaaaataatatcaattgtttaaaagaaatccaaagaagacaaagaaaatccttagaaaaactaaacacgatcttaggaatttgaaaagaagctgaaagactttaagaaccataatttgctaataaataacttagattatattaaagaacaattatctagagaataaaaacaattagttcaaaattataaaataactagatttttaaaccaacatactatatgttcaataggaaatattatatatttagacttagtatctccagaaacaaaacataaactattaaaaaataaaaccaataaatatatgcatttaggaataattttaataggaataataggacttcatcataaagaaatttgagcacttataaatattaaccttttagttactagaaacaatatagtaggacgagctcttttagccagcgcaaaagttaatatgaactaaaattacttagtcattggctgtatacctcaattttgtatagatcttatggaattcatagaaaaaataaaaataactataaatactaaaggttatgatatggaattaggaagtaagaaccttagcatagctataaaatttatatgaaaaaccactaatgctctaagcttaaaatgtatgatggaatttgatgatatagtaaaaacctttgtaagtaagactgtaaatatgatagaagcaaaacctataaatatagactatttgcttggatgagagtgggaattaccccaaataaataaactagtaataaaatattcaacatctagtagtttatatgaaaatcaagatggaagcacaaggataacctttggaaactataaaaccataaatgtagaggtagaatcaaatagtgagatggaatctataaatgttatacaagaagatattttaataaacattgaaatagtagaaaacctatacaaaaattcagaactagttaatataatgttagaagaattcagtaacccaacgttactagaagaacatgtagatcaagaaaactttgttgatataatgtctaaaaactatacagattagcaaataataaaacaactttataaaaccaatttgataaaaaaacttaaagatatagaaacaataaatcaatttactattcaaccaaaaactaaagaaaacctagaaataatctcaaatgagtcggtaaatacaataaatgtagaaaaagaatttgtaaatataaaaactgaaatagtaaggtgtagtaagttgtatggtaagccaaaaggacctcaatggaaaactaaaacagaatcttctagttctttacaaccaatatatgaatatggaataatattagatatagataatacacaagatcttaagaaaaccatagaaaattgggaagaatccttaaattcagccggtgtcgtagtatcctttgaaaatcaacaaaaaatttatgaattttgtaaaagcacccttggaagaattgtatcttgaccatataagatctgaatgtcttgaacttaaaaaaccattaaatgaatgaagtagaaaaacccaggtaaaaataaacctaaataatgagtattagatagatagtgaagaagaagaactcattagtgaattagattttgaaagtggaaattcaagtgtatgtagtatagatgatagtgaaaccgaaagagaagaaatttgtacaattattgaaaaagaggaaaatcaacctaagagaacctctttaaatttagaaaaccttattcaatctttagaaagtaaaataaaaccttataatatgtggaaagacttacaagtaataattaaaggaaaaatcttggaagaagaggaaggcagttcaaactctaaagaaataaaagaaccaataagtcttgtaaaataaataaaagaactaataagtcttgtaaaaacaactatacaaacaatagaacaagtaaatatgacaaataaagttaaatctatgatttttccaacaacaattaaattaaaaaccatagaattaaaagtagatgcaatgttagatattggagctagtaaaaaccttttatttgaaaccctagtacctcaggaagactagaaaaaattagttcaactagtagaattagtccaatataatcaacaaaaactaatactaaccaagttatttcaaatgtactaatcataattaacaacataactttagtgttacctcaaacctatcttgtacctactataagtttatatcctttcattttgggtttaaattttgtacattctttacaagaagggataacaatgcaaaataactaaatcagttttcatcttaaaacgacaacaattatttatgcaaacatggaaaatgcatcaaataaaaatcataatgtaacctctcatcaaattaacaaagtagaagcacaaaaggataacataattaatgattattcagaacaattaagaaatgcagataggttaaaaaaccttatattagaaacaaaaaaataggaattataggggaaaaggaagataatttaaactctcaaaaaataaaagaaccaataaatcttgttgatacaactatatagacaatagaataagtaaatatgaaaaataaagttaaatttatcatattcccaacaacaattaaattaaaaaccatagaattaaacgtagatgcaatgttagatactggagctagtaaaaaccatttatttgaaactttagtaccttaagaagaccagcaaacactagtctaaccagtagaattagtccaatataattaacaaaaactaatattaacaaagaatatttcaaatgtaccaatcatcattaacaacataaccttagtattacctcaaacttatcttatacttgttacaagtttatatcctttcattttaggtctaaattttgtacattatttacaatgagggataacaatacaaaataaccaagttagtttttatcctaaaactacaacaattgtttatacgaatatagaaaatgcatcaaataaaaatcataatataatctttcatcagattaacaaagtagaacacaaaaggatagtataattaataattattcagaacaattaaggaatgtaaatacattaaaaaaaaccttgtatatattgatgatattcttgtttttttttttttatatacttttcaagaacaaataaagcatttagaatttgtttttgaaaagctaattagtcatggactaataataagtacaaagaaactgaaattatttaaaacccaaatagaatttttaggattagaattggaggatggacaaataaaaatacaagatcatatagtacaaaaaaataaataattttctagataaactcgaagacttaaaaacccttcaaagttttttatgattattaaactatgctaaaccatatattaaaaaccttagtagattagttggttctctttatagtaaaacaaaaaatacaagataaagatattttaactaagaagatgttaaacttttacaaaaaataaaggaacttctaaagcatattccaaccttatatttacccttagaaagagaatacaaaatagttcaaattgatgctagtcaaatagaatggggaggtatgcttttagcagttactaatactggagaagaaaaattttgtagatattgtagtagaactttcaatgattattaaaagaaccttagtttacagacttagaaatagaagcaataatcttagtctcagaaaaaattcaactatttctaaatgaagaacaatttaccttaagaactgattgtgagaacatttaaaagttctttgaaaataaaaactcttcaaaattgtccaccaaaagatggataaagtatcaaaactctttaattgattttaaacctaaatttgaacatattaagggaagaagtattgaattcaaacttaaggtttaactctttatattctcaaaacctttttgaagaacataatgttatagtagataatttttggtctttgaaaccacaaagttttccaaaccaaaatttagaatatgcttatggaaaaactatgttagctttagcccaatatttacaaaaccttcaaaaccaattgattactttagaaacccaaaaatttcaaacctcaaaatccaagaaaatcaagaaagattgataaaagatttgaaaaccagtacagtgtcaaccaatcaaaccagttgtttagataatcaacctgaaatgcttaatttaattaggaaatcaactcttctgtctaaacaatatgaaaaacttcttgttaaaaacttctgtctaaacaatagtaccagcctatcaccatgtttatataaaacacaataaagaaccacttatttctcaataagaaccagaatgggaaatgacccgttcaaatgaatttctagaattttttacttgttttcaagcttttcaaatttatgatcttagaccaacccaaaataaattatttcatctcattggagaaacaaaaaccatgtctatatggagaaataaacctttagaacacattattgttccaaaaccttttgttacccttgaagaacaagattttataatcgagctcactatagaattactagaaccatcttcttacctcaacgatgacacattattttaggaaaaccttgatgaaaaaagttattacaatttgcaaaatgcgatggaatggtgacgtcagaaatgacaacattgaaataataaatgcgtctcaaactacaagaattcaatgcaataatagaagtatagaatcgacaaaagatctaatagccatgtatactgcatgtgatggaaaagaagaaaaagacaaggaagagactatacatgcggtaaataaagaaattagggagaagaaaggaaaatcaagacttcataaatagagttatagaaatttaaaacaagatgaaatatgagacaacaagattaacataaacaaaattacagaaaatttaggacaaaatttacacaaatatagcaaacttgaaataaaatataatacatataatatcacatgtcaatacatatcaacaaaataataaataaaaatgacaaacatatagatgagcagaaaaatttagacaaatgtatatacatacaaaatgtagaatataatgaataaataaattaaattggtagagctctaaataaaatataggataaaatattcaactactaaaatgctcacaaatataataaatataaaacaagataaatctaagaaatcctaaaaggaacaaaaacatgattcaaataaagagatgagaaagaaataacttacctaaatgtagccctaaatcaatcctaactctccaaacctccaaaggcaactccaagatacgaatctagtataaaaaaacaaatggatagccccacagtaaatacacgataaggaaaaactttcactcaccaacgatatacaataaagaaagaaagaaccctaagaaaagtaagagaagaacactaaaaaacaaagtagcagcacctcgcctctctttggttatcctcccccctacttagggcttatgtgccctttaagtatagttttcaagactttctccctaagaaatcttatgggcccctgcaaaacaaataaagcccaaaatgaggactgataacccaagcccaattaaaataaaataacctaagtccaattaaaataaataactgaagcccacaacttaaaatctaaatactcacaatctaaaaataaaatagcccaaacccaattaaaataaactaacccaaatccaataaaatagcctaggcctacaacttaaaatctaaatacttataactcgataaaaataaaataactcatatccatttataaggaaatttgaatatcaattcacgcaattttggaaaaaaaaactaaaattgaacctcatgcaattttctaacaaataaataaatttataagtatataaaaaaatagataagtaaagaaataaataatacaaaataataataataataatgataataatatagacattaaacactataatcaaaattcaaatgttaatctagtgtaattaatgataaaaaaaatgaaaagttgaaatctcacgactaaatattgaaaatttaatccaagcaataaaaaaaaaaaaaaacaaaaaaaaataagtcaaatactcacttaaactcataatcatgtaatcacaactcaaaaaacaagcctaagtgcactaagcctaaagaatctttcttataagtgaacctaagtgggttgggtgaaattacctaaaatgtgcctaagtgatctaaatggaaaaatctctcagtgaactaagtggaatctaacctaaggaggtgcctaaacgggcctaggggagtctagatgggcctaagtgggcatagtgtcctaggaaatgcctaaatatattgtcctaaaagggaaagtgcacctaaaagggctaacctaagagaaaaaggaaaaagaacctagatctaactcaaggttgccaatggtcacattgaagggccacataaatccctcaaccagagtctctaaagtggctcaagcaagtaagctacatgaatagaaatgggtcattgggaactaatgtggagtattgaaaaagcacttaatagggcataagagaagcacaagaatatacctagtatcctatgtacatggaggagaaaattgagggtctacatgtagtttgttatggatgtagaaattcaattgcttttgttgtgaagccattgttgcatgcttttctttgttagctgcataatccattgttgcaaatattgaatatatatacattcactagtcatacaatccatgccttttgagtctcaagtttatattatctacctcctagagttggccatttgattctgcttattgttatatatattgaattataggttatggatgttctatgccttttctttttttataaaaaataaaaataaaatgcttagaatatgctttcgttacttctttttttgatccatgaattatcaaaattaaacttttatggcagggaacttcataataataatataagtggaaaaatac

SEQ ID NO: 12468 - DNA, 1753 bp, Vitis vinifera
  Intron number 2 from transcript GSVIVT01016236001 (locus G SVIVG01016236001) derived from phytozome v7.0 (chr-ID chr1 3; pos 6115488 to 6117240 reverse strand)
gtccgaggacaaagagttttgctgacattcttcaggtgattgatttaggccaatacttattgtttaatatttgtagatttttgtgatagtttcttgcaagatttattttttggatgcatgattatgattcaatcatttttatgatagctgatgtaggacaaccctaagattgctggctataatcaaatagatgggctgaggtttcaatcattttagggttcaacaaggggaacatgaatagaattataccagcaggaaaaaagtaaaatgaaagatagaaaaggaaaaaataaatagggaagtgatctttggctgcttcacatagaaagttcaaagacaaatgagaataaataggcaattccactgaggtggagacattacccgggcattgtctaggtgataaaagtattgtttttttatttgccttttataaattttcatatgaacaaaaattttaatacatgcaattaatgtcttagttgttatattgtggtattgagtgtacattgtgtttccaacttctgggccactgtaaacatgaatttaagtatatctcagaagaatgaagcattaaatgccaaactgaagtccagattgatagttcagtgtttgtaagccaaatagaaggcaaatgaaaatggtttagtccctttgttgcacctgatcttgaatttgtattctgtgaaagtttccattttaatgcgtcttgcactgtactcaatctccattgctcaatttttcccttttaaaaggcttctcatatgaaagatgtggaaatttgccattggaccataatctgaatcagataaactcatgtgctgtggtcagcatggtttacgtttattatacacttgacaatttttaagtgaactttaaatttagtattgttcttgttacctataaaaaaatcattttatttttctgcttattcctaaatgttgggtcctgaatagctctgctcagtgtttgtgcctctgattcacaatgtcattccttaaaaagaaaaaagaaaaataatcaaaagcaaaaacaaaaccaaaagagctctttgccttcccatgtataaatccccaataaagagggaggaaagagtggtagtgtggaacttcaatgtttcagtttagataacttggttttgaccaattacaattcagtcttctaacttacattggcttggaaagattattttccctttttatttctacacttatgcattcatatttatcattatcctgctgatccaatggctttggataaaagttgcattccagtttgaagtttctgatttgttatttgtgcatttacccatcatacccatagacacatgccccatgatattggctgatagatgttttgagcaatcctctttgctctttagcctggctatcacactatttcatgcattatcaatttataattttgcatttgttgctctttagaatttctcacttttgcttttctagaatcagggcacaatatggtgtgcaggccactttatatcagttcttttgataaactccaccaccatagcttctatctgactatcacactcattgagattatggatttctgagatcaccttggttttgcctgtaaatataagtaaacaattcaattggattcaacatgcataatcactcaagataagtgataacagtttattcttgttttatctggctttctattattttaataactgaagttattttatgttgcaggaaggacttgatcgacctgcatccttatcaagtcc

SEQ ID NO: 12469 - DNA, 1714 bp, Vitis vinifera
  Intron number 1 from transcript GSVIVT01034581001 (locus G SVIVG01034581001) derived from phytozome v7.0 (chr-ID chr1 8; pos 19098050 to 19099763 reverse strand)
ccctcctgattccggcacaatccgcgtctgaaacggtgcgtctccgagctctgaagtttctgtgttttgtgatttgtgatttgtgatttatgatttgtgtgcgatttttttttgttttttttttataattttgactgtgtggtggatctgctggttgtgtgtggtatttgtgaggtcaatgctggagtttggagatctaaatgcgaaattgtgttttgtgtagatctgatgcggaatgttccaattgtgtgagaatttatatgcttgatctggaatttggtagatctgtcagagttcgtgatcggttttagggagtttgttttattttacacagcgatcttatggtttctgagaggaatttgtgttgtttattgaggttgaaaacgacatggttatgaggattttttgggagtttggaaattttaggtttggagattctttggctgactttgagagcctataattctgcgatttttatgcttttcgttattctactttttggaatggaattatttttgtcttaagatgaagaatcagcgattttaggtacacaatcatgagaaattgctgtgttacagatgatgtgggtcctactattttaatttttgtaatgagattattattagttctttttttaaaaaaaaaaagagaatcagctatttataaagtacaactctatcatgttggagagaaatgagatttatttgtttactaggttctctatctcattacacacgtctaaatttgtcagtagcaaattagcagtgctacaagatttttctgaacaattcatttaataatgctataattgttttttcttttttcataaattgatacgggtgaattattctttattttttataaaatgatgttctaacaatggaagttggatttgcccttttgaatgtatctatagtttacctcataatggtctaagtattgttccaatgagaatctcaaatcatagagtactatataattgctcaaaaattgttgaagactttgaatgacaggaagacattaggtgagttggtttgagttgaagactttgaaatgtggaggggagagcaggacagacatttctagagcataggaattttgaaatctgaagctttaatgcaagttgttgccactcacttgttgaatggcatggtaggatttgttttgctaacctccaaaatctttgtttaaaattatggcacatgggataagtgaattttctaatttttatgcaaacttatttgcaaataatgaaagaaccaatgtatatgtcaaaagttacaaattagctttgtactttttatgtaaatttcttttcaaataaagaaggaaagagggtgttcatttagtgttacgcattagcttatttcttgttgctgttacttcttgatgtgttgatatacttgaatttttgttgttatgcatggcgagattatttcataagttcttttcactgtgagttaatttaaagactaaactctctgttctcaagtttttggagcaacatgtaatgttctttaaattattttttgtgtacattgtcagtgattgtgcaatagtacaatagtcatccctgtaattttctgctatcatattgataattgtaactgcatattccgtaattttgattgtgttatattatgccaattttcttatttgttccaattttatgtcctcaggaattcttgttgttgaagtggataaaactctcgga

SEQ ID NO: 12470 - DNA, 8801 bp, Vitis vinifera
  Intron number 2 from transcript GSVIVT01028361001 (locus G SVIVG01028361001) derived from phytozome v7.0 (chr-ID chr7 ; pos 6589011 to 6597811)
aagagtcttcaggagaggagggaacggtatgacaatactcttaaagataaatttgaaattttaggcacataatatctgtccctgagttagcttacacttctatagaatacacgaactacaggggattggtcagtctgacacttagtaagttctgtttcttgtccaataaccaatcattacctcttatgtttacactatgccaattgatcctataattatgcgtactgccaatgctcttatatgaatctagtcaatccacttaatgccagtatgccctatcattctttatccataatttgatgaagtgaagccctgttgtaactcatcaccagttgaagttgaatcagttttcttcttaatatcaacttctactgctttggagataaagttaataattactttttgcatgacaaggtattgtagaaaatctgggagaagatccagataagttaaattcctactatccacatatataagttttggtaattgccttccataagcatatcatgtgcatcatttctgtatttattaatgaaaaccttatgaaagaaacagcatatttttccttttgatctctaaagtgtagctttttggatgacaaatcctggtggctatcataccttttcagtttctttttaatgagatcaatgatgatattttttctgaaaagaaatgtggcagattgttgttgacagtaatactgatattatgataataaatacaatctatcttgttagagcttaggaagttctataacatgtctaacattttttgattggtaaagaaaaggccacccctgtaagatgttggatctatcttagtatggatagtgaaaataatgcaaatacacttaggaccctttcagacttgttaacagttgccctgttggcatttttgggatttttttatgtgagactgatacttctcaatgggcagctctaattgactcatctacttatgaaatccaaatagaaaaagaaaaccataagattgtatttgattcaaaatcatactctttaaggaggcacaccctttttcatgatctaaaatagtaccaaaatatgtaaaacatttattcaagaaactggcgtatcaatcattcaaggataagcaaattccttaatatacctaagtccaattatgtcagcatggttctttctttctttctttatttatttttattatttttatttatttatttatttattttaaattttgatgctgtcattgatgtattattaaattttttgttttgtctgtggaaacaataattagaacaaaatactgtgtaccatcaaaggaatggctcttcaggttctcaactggggaagatgtctcctttcattagcacaaggtcccaactttttgaagaagcaataatgattttaaccaaatcagtatctgttgtcctatttgcatgcctataatcatattttttgtttagatatcaaaattccatcccttaatggttatattttctcaaaacgttgcctctgaaaatatattttctcaaaatattatattaccttgtgtcccatggatttatgacagatgaacatgctctgttagtttcctcattcatgtccatttatttgcaatacacctagaaatccccttgactcacttatcttttactagtgatttggtagattgaactcaataaactcgttctggtctttgttcacaggttagggaatcaaaatgggactagtgtgaaaggcatgtttagttgaatcaataaaaatagaaattgaactttgaaaatgtagaactgatgatgggaaataggttttgaaatatttatcaactaaagaacttccaagagatttagaagcaaataaatatgttgaatttatcacttataaatccttttagtggagaacataaaacatagcatgaaaaagaagatattgatttactcttttttttttttttttcttccagtcagcattaaatttcactttcccttactacttcactcccccccactctcacccaccccaaaaattggaaaaaaaagaaaaggaagaaaaggctttgtgatacaaaggcgtgtttatatcctaagctatgggacccagaagaggagtctgttacagttttagtgcagtcatcacaattactaatcaagatgggggtaatattgaccagtcccattgattggaatccaaataaataacagttttaaggatgcaccaagtttctaaaatgttatataattttttttcatagaaagtcatccatatacattttttttttggataagtaaaggataaaaattgtattaaaaaagcagccaaaacagcggcttaaagattacaaagaagaaaacaccccccacttccccagctggatgccaagaacggaggtgcagcccaaaccctaccctcaataggttcccacccaatcaataaaatcaactaaagtcaaaggaccatcttttataaatagtttcgtctccaaccaaaggaaatatacaaaagaattcttaagtctttggattgacagctcttcttcctcaaaagcaactttgttccttgccttccaaaccgttcaaaaaaaaagacaatgggcttgctctccaaactcccttcctcttttctcccacaaaagacccgtcccaacctaaaagcgtcgccttaactgtggttggcagcacccactgcaccccaaaaagagagaaaagcaacgcccaaagaatccttgccttgacgcaaaggagaagaatgtgatctattgattcttcatgcctttgacaaaggtagcatctgtttgctagaggccatcctctcttttgaagttggtccaaggtaagagccttttcccacattgcttcccacccaaaaaaactcattctaggctgcatgtaaactttccaaatggccgacgaaggaaaagagactgaagagcctaagactaatgatttgtaaagagacttaacagaaaacttcccacatttagtctcgctccaaagcaccctatcttccactacctattgaactctcttcccattaagacccaaaaaaaacctgcacacctcatccatctcccaatcattaaacggtatagagaagtgcgggctccaattccccccaccctcagtggaacaccacacatctttgacccaagcatccttgaatacaactaaagcaaataaagtgggaaaagatacacaaagaggttcatccccacaccatctatctttctagaatttcaccctttgcccattccccaccacaaaaaagagcctattgcttacaacaaaccactccttcctaaaagctttccataaccccacaccatacccacccttcacttccttagaacaccaacccctttgctcctcaccatactttcccttaattacttgattccaaaaaacccctctctcattagcaaatctccaactccatttacacaaaagagccttattgagggtagaaaggcactttacccccaatccccctttgcttttatctaagcaaaccaaaccccactgaacaagatgaggtttccattcaagggccccgtcttcccacaaaaaaccctctgaatctactctatcctcaatctgacctttctaggcaaagaaagcacaaacatgaaataaatgggcatactcgccaaagtgcttcgaatcaaggtgatcttccctcttttggagatgtattggctcctccatctagccaatttcttccgcattctctcctccactccatcccagacaaccacggatctatgaggcacacttaatggcaaacacaagtgagtggaagaaagacttccaaccttacacccaagatctgcagccaaagcttccgcgttttccacactacccaccaggattgactcacttttgtccagattaattcttaaccccatcatgacctcaaaccataataaaatccaacttaaatacatcaactgatccatagaagccccatagaaaaccaaagtatcatcaacgaatataagtgggacacctgaaccccctcaccacctctacccctcgccttgcaagctaacaaaaaacccccatttactgcactccttaggagacaactaagagcctccataatcatcacaaataggtatggagagaggagatccccctgccttaaacccctagaagtttggaagaaacctgaaagagacccattaaccagaacagaaaagctggttgtggaataacaccactgcatccatcgaatccatttctcctaaaaacccatcatactcatgactgaaaacaagaaggaccggtccacatgatcatacgccttttctatatccagtttacacatcactgccccttcattgctcttcaatatcgaatctgtaacttcattagcaacaaggacaacatccactatttgtcttccttccataaaaacattttgagccttaaaaaccaccttacccaccaccaactttagcttattggctagaacttatacagcctttccaccaaaccaataggcttgaagtcccttaagtcttttgttcctcctttttttgggatcaaaacaagaaaagttgcatttagacttttaacaaaccggccatggtcatgaaactctctaaaaactccatgaccttcttcttcacaaaattccaagaaaattgccaaaaagccataggaaaaccatcaggcctaggcgtttgtccccacaaaagcccttaagagcttccaacacctcctgctccgaaaacgacttctccagtctagctgtttccacatcctccaacctctcaaaggacatcccacttatgttgggtttccgtcctcctgcagcagacaacaacaacttaaactcattcaccaccccacctctaacctcattctcctctgttaaccaagaaccaattattttaaccaagaaactagtgttcccatccccctctctcaaccaaacttcctttgatttttgtctccgcgaaatttttccagaagaacccattttttaaaatcctcatttgctcctctccttgcttccaattcatgaatagtaagaggccatgttaactctattttgtcctagaagtccacctgattcaaagccaaagccttattgacttccactttaccgaaaaccatcctattccagtctatcaataacgacttcagagctttcagcttagctgccaacacatagctagcagactcactaaaactgagacctttccaccaagcctacaccttatccttgaagcccttctccttcaaccacgtatttttaaatctaaacggcatagggcctctcctcactcattccccatctagaagaattggaaaatgatccgaaaccgacttaggaaggacatattgcacagcccctgtaaagttaccttcccactcattcaagaccaaaaactaatcaagcctagagtgagactgattattcaaaccacccttccaagtaaaagggcctccctgtaaaggcaggtccctcaactccaaatcctcgataatctctaagaatcttctcattgaataggttagtctgcctcctttattgctttccacagggaacctaaccacattaaaatcacctggcatgcaccaagggccaccccataacccttttattgcatttatctcatcccaaaaatcttccctctctttcttcaacgtaggaccatagactttagtgaagatccaacaaaaatcatcctcacagcttttaaaccagcaagacataaagaaagtccccacttccgcctccaataattgtaacaccctattatcccagaacaccaacacttcatcagaggctcctctcgagttgatggccccccaatctaaacatcttcccacgccaaggctccttactatcctctttgacatctcctgcatcttagtctcctgcaagcacaccaaatccactttttggtctttaatcattgccttggtcacctttcttttctctcaatcattagcccctcttacgttccacgatgatattcttaacttcattacataaacaaaaaaaaaaccttgctcacctcttagcaccagcaaaacaccaacttcaattagcaagctgaagaacccttgtattcctcccagtaccactgtaattcatcgagcactcaagttttttcaattccctctttgatctagaaaccttttggattttccttctttttccgaccgaatcgcccttgagatttttcctctctttcattcttctcaaaagcaacaaaatttccccctcaaacccctcagtaggcatacccagacaatgatagagattcacaaaactaccgttcatccaagaacccaaaacactcccttcttcctcttccaaaactctttccacgtcttttgttggcaatactctcccctcatactccttggccccctcttccagacgatcgaaactactctctaacttccatctgcctagattaccctcaacgggtcaacagacccctctccgttcacataagatggcccctcgagcgccacaaggtcccaatcagcaaccaccacctctttttcaccccccccccccccaagcacaaaaagaagaagaaggctaggaaaagaacaagtctcggaatgggagtacctggaagcttcctccaatagggactcatctgctccagacttccctctcgcttcaaccaacggcgcaacaccaagaacatatacattgagctgaacattagaatattggcaattagttctcacatttggtgatctataacactccaatatcatgtagcttaggtcactaaccattaatggtgatgcaactcaatttataagatcttacaaatggttttttgatcatattattgcactttaggtattaagatggattaatatatgcacttaatttgcaccatatttgcttgtctgatttttttatttacactttctctaggacaattaaatccactaatccaagtttagattctaatttttgtgtcaaatacaattgtatttgaaatcaaaatgatttttagctttttaaatggaaaaggctctttgcaatgttaaaaattttaaatggattttgaggctaatacttttaaaatatgaaaagaagtgaacttaaatttgtattcttgtctccctcccaccttttctcctttgtctacatagttaactcaattttagtgatcattttacacccttctattgagtggatacccactagccctgctttgcaggataaggaaaaccacaggtacttgattcgttcatttttttaatttatttttatttttagagatacttgatttgttcatgaggaactcgtatgaaattaatttcagttcttgaacttgggacctcccattcctgagtaggagcacctctcatttgagctgcctctgggaggctcattctgcacttttttatgttctttaatatgataaatgaaaaataaatgtcaaagcatggttgtacaagcctatacagacatgtggtgcatgttttctaatatactggcttctgtgcaaatccaatgctgaatctcataatcttcacatgtcgatattatttagtccaagattttaatttgaacactagcttcagtggtttttcaaaatactccagtattatatggaataacacactgttaggcagtccaaaatcatttgactaagacataatgtgagtttttcttttttttcccttctttaacatgatttctcaaatcctcctcaagcatgtaagaagtatgcttaaaatgattttgttgctctaaattagggttcttagtgtttgatagcctaaaaccattttagaaatttagaagtggttagtattatttccaagcggcttttctaagttaccttttcaattctttttccatttttttttctgtttcttcttttcctaatgaatcattatctagtgacaataggaaattcaatctctatctgttccttgtgtcaattgtttgttttttccaatagtaggtaggagtttgggtgagaacatgctttctgtaggaaattgtacatgtaatgttggagtgacttcaattcattatccttgttatctctcgtttagtatttgattgaagttttcatcttattttatggtagaagacttttctcttgacatctgagtctttaatgctccctaaaagaatgatcgaatctattttcttcctggtattttaaattttgctaaaaaaatttcctgttgtgctaattattctatttcttcttgtgattgaatttcaatcatgaagatgcttcctttctatttgtattgccatttaccaaataaggtgtacttttattgtttgtgatgtagagcacctcttgatttgagatgtaattggtgtatgttggaaaaatgaagattaatgggttgaagatgtcctacagaaaacttttaacatttttaaactggcaatactcttttccctgttttacttcatcttttagtgggtgtgaggttaaattagtaatagtttcaatgtagttctgtcattattttttttcacaacttacttttttggagttgaactaggaacctctggatccacaccataaccccctgctacctaagcatcaggtggcctcaatatagttccagcataagcttggaaccgatggtttcttgatgattccactagttacctggtgataacatccatttgtagactatttatttcttgcataagtacctctaaaagatcacttcaatctaatgtcaggtcaagttatgtcaaggatatttgtttcctgaaagtcaaatttataggattctatagagataagataggccattttacttgtaagcaggcgaaatatactggaaaagaagttggctg

SEQ ID NO: 12471 - DNA, 1639 bp, Vitis vinifera
  Intron number 6 from transcript GSVIVT01009553001 (locus G SVIVG01009553001) derived from phytozome v7.0 (chr-ID chr1 8; pos 9342429 to 9344067)
attgggaaccggccagtcgtgtttgtgactcacaggtccgtgttatggtagtggtcatttcttttttttgtgtgtgtattggccttaacgtaatgttttgttatctctcgactatagcagataatttgtgtaaataatcaatgatttattttttcgtagatgactatgtggattttgtctagggatctgatcctttgatcttaaattttaggacacaagaagttagctaaaaacgatcttaatagtggtatgagtgcttggatgtgattgagaaattaaatttatgtttgattagggattagggtagcttatttaaagttatatctattttattttttgttgcattccatcatatcaaagaaataaattcaatacatattgttcatcgatatgtggtaaaaataaaagagaaagaaaagaaagaaaaagatgaaatcatattatttctcatgtcctttcgtgatatttcaaacttttattaaataatttttattgtataaattttaatgttctatgtgaacttaattaaatttcaaattagatgttttgataaaagaataaaacaatgtcttttttttctttttttgtagaagcctatttatctttttaagtttttattattttaaaatcagatttgtgacctactttttcccatctcacatttctaggggaaaaaaaaaaaaccctcgcttctatctttctttctttttttacttgtttctaattatccttgtaaaaacccactttaaaacaatttattctcttttcattagccagaatttaagtaaaataaacatcccaggaggagcccatagacgggttgaacagggatcccataccttacaaagatcccatacctatgcctgtgtcatgtaaacaggtaccttgtaccctgagtctaattgaaaagtccaagcatcaagatagatatacctgggtaccttggatcaaatcaaggagcaggcatcacaaacagatggattagatctttgaaggaatattttgtagacatttttgctatctttgagttgctttgaccatttgcactatgaaaaattcacattgcaaaatcaacttgctctacttaaggattggcattttgacaagagccaaacctcatagtttaatgaagcactaaaggtcttctaatagactccactgcttttgctttgatgggaattaccagttcagcttttgacaactcatcgcaccttcgcaccctttaagttgatcttgagtccccttacaataggatacttataaatcaagggtgattcatctgcactcaatagacaataagctgttagaagctaaaatctgatttgttcctactattatttctaatttctctcttatcctgtttgcatggattaagattcttcaataaataggcatatgatagtcaggatcttatttcagattctgccaaattttggataaataaatgagaaaaaaataaataatttaggcagttggttccaatggttgttggaggacagggttcctctagagatgacatcaactctcaagtttgttttatgctggatcattgtgcagctgtttagttaagatagtgtattttctatatattgaacctagaaccaaatacttttttgtaattgttggctctttttgcagc

SEQ ID NO: 12472 - DNA, 1112 bp, Vitis vinifera
  Intron number 5 from transcript GSVIVT01036113001 (locus G SVIVG01036113001) derived from phytozome v7.0 (chr-ID chr6 ; pos 20554505 to 20555616 reverse strand)
ctcaagctgttattttctgcaacacgaaacgaaaggtaatgggtgatgaaaagttcttatcttaatagtacgttggatggtagatatccactttacattgaatgcacaaatttgagaccaaatttcatatttgatctggacttgtaggtatacacacacgcacactcaaaatggtggtatatacaactttgattcaatagtttttcattgctgatatctataagaaagcgtatatcaatttgatgagaaagtaaatgtcaatatgcctactgaacatatccccacattaaataagctgcaaatttgggtttgtattttaagctgcaaatttagtcattcccatttagcaaaccaagcagctgcatagtatggatttagacaagttcagtagttgcataattttaaaaggtacaaggcgcacctagggtgcaaaagtcttttaaagcttaagcacaaggtgcgacgcaaggcgtgtgcctgagtgaagtgaaatgcaagcatatcaattttataaaatataatttaaaatctaatccaatcaattaaaaatttaagattccaaacatttaaaagaagcattcaataacaaagtactgaagttatataaattttaatatacaattagaaatttgaagaataaaagtgtttaaaaaggaaaagtaaagtagataaagcgagcctcttcaacaaggcacatgtcttggaaaaccaggtgctatgcctagaaagtggttgtgtcttgtgcttaggtgtgcttaaagcatgccttttaaaagtatgagtagttgaatgggcaatcggggcatccatctgatgcctctttttgagagtttcccttggttttatagtctcaaattaggccattttacatgatttatagacaatctttgaacttctacatttaccggatgtttatgaggagagaaaatattttgcttcctctcgactcttgatttgaattttgtctcatggaaatggggataaaatggtggagcagacagatttcctcagttttcaccaccttagctttcattcgtatcccaggtcccagtctatggatttattttaatttctttatattgttggtacaggtggattggctaactgagaag

SEQ ID NO: 12473 - DNA, 4094 bp, Vitis vinifera
  Intron number 7 from transcript GSVIVT01036322001 (locus G SVIVG01036322001) derived from phytozome v7.0 (chr-ID chr1 8_random; pos 3791912 to 3796005)
tgcaagactataaggcttttgaaacgacaaaagtaagccacctatccttttctgctcattttgccttagcctcttgtttcacaacgatttctctattgcctcttcagatgatagtcggagtctaaaacctcatgtggcagcacgctccccttttctaccgattggaaacagtcgagaccatgagggcatactttgcccataatatgaacaagaatgaggatctttttgccaacttggagacaacgtagagtgaagccgttgctgcccaaaagcttgttgaagaagaagccaatctattgaggaaagccgaggaagaaaaggagacagttcaaattgaagctcgtcggctggctgaaaagaagaaaaccatggcggtcgacaaaaataagcctgaaaaaaaggctgcctgattcgtgcccaattggtgtctcagctgattcgtgtccagctggtgctccttgattgagggagtaatcaacaaaatttataacctattacaccatatactagggtagcaaagacaaagctactatagcatagtggctctaggatcgtccattgggatgggttttcacttcacaattgatattaattcaaagatgaattggtgccttttcatttcaaggttagctttaaaagaaaacataaacttgtttgaaagaaaaaggtttggttttaaactaaccacaaatagtaactaattttacttacaaagaaaagatgtttcttggagttcagatcactaggctcagattcctcatacaaaaagggagttccggtcacttgtttcttttcctcgtattagagaattaacatatagttaattctccaaccggtgttgtacagatgctccccattaatgggttcaaacactaaatccctctcactgatgcatcttgcaatgactcatacctctcacctagcacttgccattcaaggtgatctttaaccttggattacccgtcaaaagctcgcaagagataactaatggatgtctccttggagtccaaaagcttaccaagtgttggctattctagaaaatcctaccttcaagtcacctcccaaaggctcgcaaggggtaaactagtgcatttccatggttggaaatcacttgtcttaccaagtgttggcccaggtgaccctaaggtgttttaagttaactaaaaacatagaaatcactaacgggttacactttctcttcattaaaaactaaaacaacaaaacttccaaattatgcatgtggaaacttacccggctttcctcactccaagagacaaaaagcttagcctctcatcctctgtggaaaaatcctcagagtttggttggctagaaaatgaaaatgaaagagaagacaagaatatatatcaaaaacagagcaagtgctctgttcgttgattctatatattggattacatgatatcacatacttccccccagcgtctcctgagagtgtttacaagagagtttatataagaaggtaatttacccttccttggatacttcctagctaaggaattacatgagtggttgaatacaaggagaaaatggaaatttagacacaaaaatctgaagaaaaatatctaaaagagtcggtgcaaaaatatcgggatgcttcgggaaccatttcgcaagagaaaatggtgtctgcgagatttcgcagacactcaagaggggctgcgaaatcacttcgcaacatcaagctattctcacagggctacgaaattggcttcctccttgaggttctcagcgttccagcttgcgtcatgtatcgggtagcttcaggaggaatttcatagcactgtacaaaaaggctgcggaattctcgcaacaaaaggctgatttcgcaacactttggagtgatctgctttcaatggctgtaactccttcgtttcaactccgaatcgcgcaccgtttgaagcattggattcttgacttcctgagctttgaaatggtatatagaatgtagaaaatggacttcggaaagtgctccaaaagtgcaaaagaatactgcagctagctttcctctgttttcttcactctgtttttcctctctccttgcttctctccttgcatactttgaacgactttggcaaagggatatggggctccaaagcttggtttcttcatgaatttgagctcttcattgctttgccatgaattccaaataactctcctcaatcttggattgttttggtgatcaaattactaacaaaaacaccaaaacttacacaatttgattagaattgattgcaagggtccttaacatgttaattgggttaaaagacaataactactactcaaaagtgtttaaaaggattaattacaagctacaaaatagcactttttgagtagtaatcactgcccagctgaggcatgagctacaagatctccgagtggggtttgccgcttgaaaagaagacttggaggttgactaccaaaagcaagtggatgatatattcctgtacgaatatcgttgttatataaagaagcatggcatcatccatgatgctcccacctttccttcggatgacgagaatgagtttttaggcgacccttcccaaaaaggaggagatgttttcgaaggcggtccctttggcgagtaggcttgatattttgtttgtatttatttattatggttggatgtggcttggactgctacatctataaagacaatggatgctttatttatttgaatatatttactttagtcatttgtctctcatacattgttttcataagcaaactttattgaaattactactttaaattggatacattcaaagagtagagcaggggtacgacgtccaatatttgaagatggtatgtccctgagtctctagccttagttacaatatatgacccttctcagttagcttgtagaactataatactttggtttatacatttaaggttatataaagtgttaattcaaattagtgatgttatgttgttcacccgtttccttgataatttaaacaaataaaactcaaatgcatcctaaagtctaaatgaaagaaattctaactaaacaaattattacaaccattacctatttttctttcatataattaaaaaattatacattttaaccaagacataagttcaaatcacacttaataagaaataacctaaaatcataatcattggcattaattttcatatgaaaatataaatttttaaaataatataaacaatttctttagttattttaaaattttaaaatactataaataaataattttctttagttcatatgtgaaaatattcataaaacaaataaatattttatttatcataaatatataaatttttatgggaatgcatgtagaccaaattattttctcaaaattttaaggaaaatatgaaaaaataaagataaaatatatatatttgtaatagaactttcgcatgcacattgttttcacgattaggaattagagatagaagatttttatagatttgaaaagaatcatggaagaaactcaacttaatttccaattttgaaaagaattgtggaagaaattaaacttaatttctaattttaaaaaagaattgtgaaataaaatcaatttaatttccaaaattaaaaagaattgtggaagaaattcaaattaatttctaattttaaaaaagaattgtgaaataaaatcaaattaatttcaaattttaaaatgaattgtggaagaaattcgaacaattaacacacctttgtggcaagggaatctaccgcattcgttgaacagacttagtcccattttcccaatcaacttagcacgttgtttgaattaaatacctacggattgatattgtttgaaactcaagcaaaccaatattttatagtctattctgagcacgactatttcacaccttgggccccaaaactaaaccaaatcccacataccattcaacttaacacaaccttagccgcccctaacggtttgggcttttgcgtgaatttaggcaaggggtttctctttcatgtcatcaatctctttcatacattatattcaacaacatacagcttctggaggccattgctgccctataaatgcaatggagcttcccaagcttttgcactcatactttccaagtca

SEQ ID NO: 12474 - DNA, 1498 bp, Vitis vinifera
  Intron number 3 from transcript GSVIVT01025726001 (locus G SVIVG01025726001) derived from phytozome v7.0 (chr-ID chr8 ; pos 12618118 to 12619615)
tgagggttttgttgatccttcagatttcatttcaggtattcttgaagccctaaatttcatagtgttttctggatgtgatttgtgttggtgaagtatagctcgaaaccctaactctgtttggtttccgagaaaatgcaggaaaagtaatgaaaatcaaaattttcgacctagggttttgcggtttggggaaggaagaaaatagaatagcataagactcgtaatttttatcttcttttctttttccctggttttctgaacagtcaaacgcagttcttttggctttgttttgcgaggaagatcataatcatggttttatttgttttgcttgctatatatcattattgttccttgaacaatgtacatttgtagatacagtttgatggtgttttgttagtctcaattgaattgggcagcttgtgatgtcactagggtttgttcttttgcttttgttcttcttgtttttgctaacacttagtttctggtaatgttatgattaatcatgcattgaagtcatagtttgtattcattactcatcaaaaaaacaaaaattatggtttggttcatgttattccatcaaaccatttgaatgctagccttttctcgtggtttgaagaatgacagttttgaaggattcactattgtaataaaattgcgtggtgtctaaaatttggcctccctttggttgctatataaacacaggaaaagaaaagaaatagaatgtaagagttatatcctctattgtttttcttatgaaaattgaaaactcaactcagctgacaaaatgtgtattgaactcacaggaggaggtttttttttctttttttttgggatcaaatgctgatctacactatgtaaaattttatgttttttaatttagacttgttttcccagcaaccaataggaaccttgtagttagtatgcttctcatatttatatttcagagctttgtattaccagcagaatggttaaagatgatcattgttgatcaaggatggatgcatatcacatgttcaattgagttttctttttcttttctctgctgatcagcatggctctccagatttctttttaaaactccttattaatcatgactttgtctctcaccaactaagaagacaaaaataagttaccatcaaaaaagaaaaaagaaaaaaatcataaaatttatttaggtagccgaacaatcaaagtaacaagatttatgcatactatgtttatgcttataacagatacatgaaacttcatgattctgttttacagaatggaatcctttttttatgatttctttatttatttaaagcaagcaagattggtgcacatcttctcatgcatgtgctttttcatgcatacggttggccggattcttgataatgggatcttataataacataccttgatattaattgatcttcctcttttttctttttttggattctaagttgtcctcttcttgttataaatagatcgctgcatttgggctatcttgtaatttggaagt

SEQ ID NO: 12475 - DNA, 8921 bp, Vitis vinifera
  Intron number 7 from transcript GSVIVT01028660001 (locus G SVIVG01028660001) derived from phytozome v7.0 (chr-ID chr7 ; pos 11759243 to 11768163)
caaattggtcaataaggtgtgtcctcctttcttacctgaatccgagcaggatcttcctttggttggggcttttgagccaaaatttcttcctgaatcctctgtttctttggttcatccttctcgttgttagcctttttcttcgattccgttggagtcaagctttgccgttcagcgtggttccttttttatctctcctgttgtgaatatcaaccgttgtggtggtgcgtcctgttttgaaggtgtggtgtttcccctagaaacctctaaccgaaaatttaaagactggcctttccttagggaaacactcagtaaccctgaggagcgtggtgtctcaggtgaggcttcgtccccagagctagaaccttccaccctcccgttggaaggttttcaggttgagggacttatgcctaggaagatggtcaaggtttagtcgattttggagagtttgaggattagaattgtcagggataatggaaaaggtgtggaaggagagaacaagagtgctctctctgtggacaaggtttattccagaagaaagaggaaaaatgactctggaactcgaggagaggattagtactgggtgttggttgtgtcgggttgtttttgttttcatgaagatcttaagttggaatacaagaggtttaggatctaggaagaaaaggaggactgtgagaaggtttttaagtactcaaaacccagatgtggtgatgcttcaggaaacaaagcgagaaatttgggataggaggtctatgagtagtgtttggaaaggtagaagtctggaatgggctgctcttcctgcttgtggggcatcggggggattgtgattttgtgggattcaattaagttcaagtgtacaaagaagatgttaggatctttctctgtaactgtaaaattgaactctgatgaggaagggtctttttggttaacctcagtgtatggcccgaataagcctttgtggaggaaggacttttggttggagcttcaagacctgtatggtctgactttcccaaggtggtgcgtaggaggggattttaatgtgatcaggaggatatctgaaaagatgggtgactctaggttaacagtcaacatgaggtgttctgacgagtttataagggagagtggttggttggatccccctctaaggaatgcggcttttacatggtcaaacatgcaagtcgatcctatttgcaagaggttggataggttttgttctcttctgagtgggattcttttttctctcaaagtattcaagaagcccttcctagatggacctctgatcatagcccaatttgtttggaaactaatcctttaaaatggggaccaactccttttaggtttgagaatatgtggttgctccattctgagtttaaagagaagtttagagattggtggcaagagtgtacgattgaaggttgggaaggtcacaagtttatgaggaaactaaagtttattaaatcaaagttgaaagagtggaatatagtggtctttggagatttaagagaggaaaaagcacatgctttcggacttaggtagaattgatctaattgaacaagaagggaatttaaatcttgatctagtttcggaaaggaccttaagaaggaaggagctagaggatttgttattaaaggaagaggttcaatggagacaaaaatctagggttaagtggattaaagaaggggactgcaactctaagttttttcacagagtggccattggaagaagaagtaggaagttcattaagtctctgatttctgagaggggggagactttaagtaacattgaggttatttctgaggagattgtaaatttctttggaaatctctattccaaacctaaaggtgactcttggaggattgaagggattgattgggcccctatttctggagagagtgcagtttggttggatagaccgttttttgaagaggaggttcgaatggcagttttccaattgaataaggaaaaggcccctggccctgatggcttgactatagtagtttatcaagagtgttgggatgtgataaaagaggatcttatgagggtgttttttaaattccacactaagggggtaataaatcaaagtacaaatgcgacattcattgctatggtgcctaagaaaagccaaacttttaaaatctcagattatagacctattagcttggttacaagtttatataagataattgctaagatcttatcaaggtgtttacgcaaagttctacatgaaacaatctttggctctcaaggagcctttgtggaagggagacaaattttggatgctgtattgatagccaatgaagtggtggatgagaaaagaaggtcaggggaggaaggggtagtcttcaaaattgattttgagaaggcctatgatcatgtggattggggctttttagatcatgtgcttcaaaggaaggggttcagccaaaaatagagatcttggatgaggggctgtttgtcttcatctagttttgcaatcctagttaatgggaatgcaaagggttgggttaaggcctctagaggtttgagatagggagaccctctttctcctttcctttttactctagtagcagatgttctaagtaggttgatgattagagcagaggaaactgggataactgagggtttctttgtggggagggataggactagagtgtctttgttacagttttctgatgataccatttttttctctaaagcctctttggatcatcttcaaaacctcaagattatccttttggtttttgggcaagtatttggtttaaaaatcaacttagaaaaaagcaccatttcaagtattaacactaggcaagagcagttgtctagtttggctttggttttggactgcagagtgtcagagtggcctttgtcttatttaggccttcctttgggagggaacccaaagacaataggcttttgggatccagtggttgagagaattttgaggaggctggatgggtggaaaaagacctatttgtctttgggagggaggattactttaattcagtcttgtctgtctcacatccctagctacttcctctccctctttaaaatcccagtatcaatagcttcaaagattgagaagatgtaaaaggattttctttggtctggggcaggggaagggaagaaagatcaccttatcagatgggaggttgttagtagaccaaaggagatgggaggtttgggctttgagaagacttctatgagaaatattgctctcttagggaaatggctttggaggttccctagagaaaggagcggtctttagcataaggttattgcgagtatatatgggacacatcctaatggatgggacgccaacacggtggttagatggtcacacagatgtccttggaaggctattgctcaagttttctaggagttctccccttttgtccgcctagtggtgggcaatggggagagaattcggttctgggaagatctttggtggggaaaccaaactttgtgctctcaatttgctgatctttacaaagttatttttatgaaaaacctcactgtctcaaatgtccttggcaattccttaccactgtcttggaattttaactttcgccgcaatctaacggattcaaaaattgatctccttcaaagattaatgtcctcccttaattctgtgcttttttccccttcttcatcagattcaagagcgtggcctttgtcttcgtcaggcttgttttcaataaaatatgttttcttggccttgtcaaaagtttcaaatcctttaatgttccttccggctaagtttttatagagctcaaaagtcccttcaaaggttaaggccctcgcttggttagtagcacatgggaaggtaaacactaatgacaagttgcaattgagaagaccctacaaagccctttgtcctcaatggtgcattctttgcaaaggaaatggagagtcgattaaccacctttttcttcattatcctgttaccattggactttggcataggttgttcaatctagtagggttggtttgggtccctccaaggagccttaaggacatgttggttattacttttaaaggcttggggaactcattaagaggcaacacactttggcaaattgcttgccttactttgatttggatggtgtggcaagaaagaaacaataggatctttgaggataaagggagaacggaagagatggtttgggatttgatccgattttattcttctctatgggcttcttgtaataaagcttttagaggagttcctctaaacattctacaactcaattggattggggtttgcgtttcaaaagtttgaagattgatggggtttctctttgtttttagagttttatcctttgttcaaattgtgtaggaaagacctttcatccttcccttggttttttttctctttctattgtctcttttttctctcctgtatttgttcttatattaatataatcttcttcgtttctgattaaaaaaaaaactttatttaattatttgattagaaacaagagatgtatatattaatgttaaagaaaacatgaaaaggatgaggagttccccataattacaaaaaccttatcaaaatatgatcgaactccttcactatacaaggaagttgtgcaaaagatttagactataacatgaaataaattatgctctcttcttgaattgttttagaatacaatatgtaaatcctatttatacacaattggggattagattcacctagaatctctcccataaatcagggattttattcacctaccacctattatcctataacatctcccataaatcatattttactaaagaaagaaaatgaaataaataaatacaaaattatttataattttccaactctccccgtcaagttggagaatagatgttgcccattcttaacttgcatgtaattatttgaaactcttgactagccaatcctttggtcaatacatctgcaagctgcccttttgttgaaacataaggcatgcaaatcaaaccaatatcaagtttttccttgataaagtgttgatctacttttacatgcttcattaggtcatgttgtattggattgtaagcaatattgattattgatttgttgtcacaatataactttattatcccttcctacttgattcctagatcatcaaggacaatcccatgtgtaatagctttgaactttacttctacacttgatcgagccaccatagattgcttcttacttctccatgttactaggttgccacctaaatatgtatagtaaccgaaggtagaacatcgatttgccactgattttgcccaatccgcatcaatgtatgcctctaggcttagctcttcatttttcttaaataaaattccctttcttggagtaaactttaagtaatgtagaatcttgtatatcgcctctagacgaacttccttgggagaatgcatgaattgacttacaacgttgacgacataggctatatccgaccttgtgtgtgataagtagattaacttcccaactagacattgatacattccacattctactactgcatcttcttgagcttcccctagcttatgattttgtttaataggggtatcaataagcttacaaccaagcttattgtgttctttcgaaaaataaaatttgggtggagagagttccaactaaaattgtgttctttgcgtgggaagccacttgggggaatattatgactcttgacagactccagaagagagggtggcagcttctcaatcactgttttttgtgtgcttgtgaagaggaaaatgtaaatcacattctcattcattgtacaatggccagagtgctgtgggacttagttttgggtttgtttggggtgcagcgggcatttccaaaaactgtaaaggaggttttatttagttggaggggttcttttgtggggaaaaaaaggaaaaaactttggaatttcattcagttatttattttttggacggtttggaaggaaatgaatagactagcttttaaggggggaggggtagtagttagcaattcagacacttaaatattcttttgtatgtaacatttggggttggactaaattgtatattggtgaggagtcgtattcccttataggctttctagagtggttagcctccagataaggggaggtgggttttttggttttttgcttgagaggccttagtagccttgtataccccctatatattgtgtggctagtttgcctctttttaatgaattttgtgcttacttatcagaaaaaaaaaaaaaaagcttacaaccaagcatgttggtctccttaagaagatccaaaatgtacttctgttgagagataaaaatacccttccttgattgagccacttcaatgcctaaaaaatacttgagtgttcccaagtcttttatctcaaattctttggctagtttctttgtaagtctttctatttcctcaaagtcatctcttgtcacaattatgtcatcaacataaactatgacaatggtaagtttacccatatgtgagcatttgatgaagagtgtatgatctccttggctttgtcaaaactccatgtcattcacagcttttgcaaatcttccaaaccacatttgaggagattgtttaaggctattgaatatgatgtatttatagtgtacaattgttctttcccttcttaatataagtcacatatatggtagttagttcaacctagccttgtatatatgtttctctattgtaagaagttaaatatatgaatgagaattaaggttttctctctctctctttcaacaaaggccataaagcacctttcttagtttgcacacattgtttcttttgaagtctccattgtaacccaatggtgtttccatatacacttcttctaaatcaccatgcaagaatgcattcttatcatcaagttgctacaaagaccaaccaaagttagctaccaacgataacaatatatgaatggtattcatctttgctatcggagcaaatgtttcttggtagtccaccctataagtttgcatataccccttggccaccaacctagccttatatctttgcaacatcccgtcaactctatatttaatagtgaacacccatttacacccaaccggttttttttcccttgggtaattcaactatttcccaagtttggtttttctcaagagctaacatctcctcttccatggctttcctccaattctcgcttctaagtgcttgaactatttgagggatttcaataggaattaattaggtaaggaaggctttatgtgacggggataggttttcaaatgaaataaaattcggttcctctaaggcactagttaggagccaatctaggccttcttcgtttgggtcatatcttccgttgttggagaagcagcccaataggagcaggcctgagttgaaccaagaaggtcttttaagcccctttgttgttgggactattggcttgcccttggagtcactgacaaatgctctcatttagacaaagtctttgggcctgatgaagtgggagttaggagtcgacgagatccttaaggctaaagtggttggttttgaagataggttctcttccccctctcctccttctctgtttgggtttccctttcttgaagtagattgttccgcaagggtggggccttccttggggtctttggttttgagtctccaaccgcttaggtttttgttccaagatgaaaggatagtggatctcacaggaagcgcactgaaggctcctagggcagaggagttagaggttagcaattgttcggagattttagggtttcagaggagaagaatttgagctttggtagcctctctgataagtttgttgccttcaattgctttttgggtttacatgtgacgaggtttaagaaggaaatcaattcccttctcaagatattggagtcaagaagaggttgtggagttaagattgttgggggaaagaagaaatcgcctttggcaactcaatcggagagggagatcataaagctagaacgctcggtcaattatggatgctcccaactctcggctagaggagggggaggggcagcagagtctatgctccctctctttgaggttgttctcttgttttgcagcttgatggcaggtgttgagatccagatggcctctagggtgtcttatgtttcctgccactctttaggggtttattttggtgtgggtggtgctttcagtaatggcctttcccgatagggagagtccggttgttttcagatttttgtagtctaggatggttggtttttctgtttctctttctctcttgctagcctttaggcgtgggttgtatactttgttgtgtacttgactgcgccttttgcgctttttaatatattctctcatttacctataaaaaagaatggtatatagatctctaaaatggatatgtcaaatttaaatgctaaactgatagtatttttgcaaagactatctaagtgctaatatgaggttcgaagtgcatggaacacaactctagaacaaagctgtattaggttttgagcataccaattatgcttcaccacccacccaaatggttccactaaaatattgaggaaatatcttaaatgtcttactgattggaaaatatgatgtctacctagattttgtcaatttgatatattagttaccaactttcctaaaaacttattaggcccacaatgtatatcatgctttaacaccctccctcacgtgtggcctcgtgccctcatacctgcatgcagaaagatagataggtaaatggatggtcgaggacttgtattcaagacctccaattaactaaagctttggtaccatgctgagttatcaacctttttgatataaaagaaaaaattgttgagctattaactttcctaaaagcttaagctattaggatttggatccagatgtatatcatgctctaacatgatatatagtttccctataattgattcatttcatttgcagctttgaaactct

SEQ ID NO: 12476 - DNA, 3996 bp, Vitis vinifera
  Intron number 3 from transcript GSVIVT01024670001 (locus G SVIVG01024670001) derived from phytozome v7.0 (chr-ID chr6 ; pos 7922472 to 7926467 reverse strand)
ggggtgtgttactgggggtgcaatatcagcaaaaggtaactttttttttttttcatcatctggttcatttttgggccaagaagtttatgagggcatggaaactgtgttcttttaaaacctattgctgatctgcattcattgattatgtttcgggttctttatcttgaattgagtatatgctctcaaatttcagcttagttgtgcataactctcatttttaagtactcccattaggtttcaaatgttattgctttttaggaatgttagagatggtatgtattaataaaagtgccaaacaaaaagagggcaagagccatgccgcccaagtacataggaagcatacaaggtgcactaggccaacaaaaccaaaagaaagcaaaaactagatatctacatatttaactctaccacaataccataataacaaagttttaagtagcccatatcgcgttgtgtttctttccttgaaactgcagtgtcaacacaatgggaaactgctagttgctcatgtaagaacccatgacaacccacataagcaagaaagccaaaaattacaaattagaagctcacaatgaatatgttcctccttttgtttcaacaaacaacatctattaactatatttcaaccacatctcatgagctggtcaacagtatgatttttcccacaatcactcccaagaaaagaaactaacttttgatgacactttgtaatcccaaatcttctgcttggaaaatgtgaggcagtgcctagagcaaaaatcctctaggaggatctaacagaggatgtgctctgctgaaaatagacatcacagctgcataaaggtccacaagcttcaacttccaatcaaagaagcaaccctcctgaaaatgggtttctagccaccccaaatctctactccctcaacccaacaatccaccacccaaggatctttgaaaactactatattaagtaattctgtgaactgtatttccaaaggagtctctctacatcagatatcattctaaaatctggttctaaggctattctccaccaaaatacaggttctgaggaagaagtcatgccaactatttctgatggctttccagagattcacctgataagcccttcaacatctcttttagtgccgaatcctcctctggcccctcatactttcatgttgtgacctttgttcatcaactatctcttttactagaaatatacacaatcatttcaggagtaaagctttattaaggactgaaagccttccaatacccaaaacaccattagcttatcacagcaaattctttcactgaaccagatgaatgcttatgattacctgcctgccctcctaaaagaaatttctctgaattttttcaagcatgttctatgctttccttgggcctataaataaaattttaaaaggaaaaaaaaaaaaatctacacctaactggatgtattgtagatgggtagattggcaaggttgcattttaggagcataaatctgtcccctttggacagatgctgcctttttcagcatgcctgccctttcttaattttttgacaacagggtcctgtattgaagataatttaaaaacgccatccttatggaaaaatccaagtttatagcaggaagctacctacactgcgtccaaaccatgaggtcaattgctccacaccttccactcttcccacaggtgtcagctcacttttaacttatctgtactactacattaagaaaatggtgctgcctacttttgttggcattgacaacaagccctaacaccccccaccaaaaaaaaaatgcttgtaatgtccatgtcaatacaagtttggaataggggtaagaaagtaaaactcaagagtaaaggatgttggaatggtgggtggagcctgtaggcttggtgggtccatggcctcaccagtaaggcattttttcataagtacaaaatagttgcctttggaaatcagagtattacagcattttcatgtttattaattggttaatgagttgatcactcagttggcaaatattttgcactggcatgagatcatgaaacttagattactagccaactagatcttgataaaaagctgactgataagggccaatgcctggcacattaggtgtaccatcctgcttctgaatctgggtgaattggatccttgtgactctggtgtttatgctatagtaccctctttttgttggaccccgtcactacctgatgaatttggagggagggttggatgactgtactaattagaaaacactggtttccatatgtccatgtggaaattattttgatgaacttgtcatgcgtactgatcactcaataaagacacagagagggaaaaatatataactttatgagcctttagtgtaatggaaaaaaaggaacttactacgtcatctgatgaaatgtgtagaacaagacactgataattttcataaagatattctttcatatttgcttgagtcataagttaataaccaggtgctcttggcttgtattatggtctccacaatggcaatgtttttgtaatcaggggtagatgtgtctaatcaattattttctccattgaatcttatggcaattgcatatgtgaagattatatcttcaccatcatcatcgttgtgcgaatttttctcaagttctgagtttcctcacaattttgttttactgtttcactccaaggaattttgtgtgctgagaagaggggtaaaatcttgaaatgttaaactcatttttacaaattgaactaaaaaagtggaaaatgattacttttgccatcactttatgaagggtgagaaaacaattgagcttgagatcaaaaggtttctctctttttttcctataagcatttaacagctgtcttcggttcctcccatctactaatctgttgatcttgatttcatgagcatatcatcaacctcttgccgaaaagctaggtcttgaattttctccttcaacataagtcccggatacaattttcagccggattatgtggtctgcatgttcctcaaatatggcaaataataacttcaacctggcatatctagccaagcatctttgtttctagtcttctattgtcatgtcattcccccccaactccttgtactggttttcaagatatatggtttcaaagatcgtttttggttttttttggctttctttttgtttgttttgcttgtttgtttgttttttttttcctgatttgagcaactgtaattttacatttttttttgaaaagggggtctttggtgggtggggggaatctcactggtattgtaccaagaattttttttttctatctgatttcccatggcatttacaatgatcaatcacttccattcctgcattgcattaataaaagatctgttgttgaacagaggatatctttgtgtggagatttttgggattgtgagtaatttgagaataagattaaagctcaagaactttgtagcattgttaaattccagggagactactaagaaaaagtgatgaaatttaatatttatttttcaaatcaattttgcatcaagtgcctcattttgaggaaaaaacaaagggaaaaaaaaaaccaatttcttacttgttttcaagtttttgcaatgaaaggaaattctagtggaaccctatatcttggagaataggttccaatgcaagagcttttatgttgtatgtcatgttacaagaaaagaaatggaacctaagtggaaactgcaatcagaatccctaatggttttaactgtcattctgatcatgtaattctccttcatccagccccgagaccagcaagtgatggctggaagccatttctatttgcaaaacagatgaaacgacaagttttttacccaattgaaaaacgtgttgacttttggtctttgctgatgttgttcttactaataattgttatgactcacatctctatttgctgccatggttatgttgactcacatctctaactctcatgtgtctctaggcggtccaaaagcggcttgtgttggttgtgctggc
